(19) United States
(12) Patent Application Publication
(10) Pub. No.: US 2007/0031850 A1
(43) Pub. Date: Feb. 8, 2007

(54) Nucleic acid arrays for detecting multiple strains of a non-viral species

(76) Inventors: William Martin Mounts, Andover, MA (US); Maryann Zinni Whitley, Quincy, MA (US); Ellen Murphy, City Island, NY (US)

Correspondence Address: NIXON PEABODY, LLP, 401 9TH STREET, NW, SUITE 900, WASHINGTON, DC, 20004-2128, US

(21) Appl. No.: 10/859,198

(22) Filed: Jun. 3, 2004

Related U.S. Application Data
(60) Provisional application No. 60/475,871, filed on Jun. 5, 2003.

(51) Int. Cl. C12Q 1/68; C12M 1/34

(52) U.S. Cl. 435/6; 435/287.2

(57) ABSTRACT

Nucleic acid arrays and methods of using the same for concurrent or discriminable detection of different strains of a non-viral species. In many embodiments, the nucleic acid arrays of the present invention include probes that are specific to different respective strains of a non-viral species. In many other embodiments, the nucleic acid arrays of the present invention include probes that are common to two or more different strains of the non-viral species. In one embodiment, the non-viral species is Staphylococcus aureus, and the different Staphylococcus aureus strains include COL, N315, Mu50, EMRSA-16, MSSA-476, and 8325 strains. In another embodiment, a nucleic acid array of the present invention includes polynucleotide probes capable of hybridizing under stringent or nucleic acid array hybridization conditions to respective sequences selected from SEQ ID NOs: 1 to 7,852, or the complements thereof.

### CROSS-REFERENCE TO RELATED APPLICATIONS

[0001] The present application claims priority from and incorporates by reference the entire content of U.S. Provisional Patent Application Ser. No. 60/475,871, filed Jun. 5, 2003.

[0002] This application incorporates by reference all materials on the compact discs labeled “Copy 1” and “Copy 2.” Each of the compact discs includes the following files: Table A.txt (667 KB, created on May 18, 2004), Table B.txt (671 KB, created on May 18, 2004), Table C.txt (1,326 KB, created on May 18, 2004), Table D.txt (151 KB, created on May 18, 2004), Table E.txt (153 KB, created on Jun. 2, 2004), Table F.txt (3,273 KB, created on May 18, 2004), Table G.txt (9,518 KB, created on Jun. 2, 2004), and “AM101085 Sequence Listing.ST25.txt” (53,562 KB, created on May 26, 2004).

LENGTHY TABLES FILED ON CD
The patent application contains a lengthy table section. A copy of the table is available in electronic form from the USPTO web site (http://seqdata.uspto.gov/?pageRequest=docDetail&DocID=US20070031850A1) An electronic copy of the table will also be available from the USPTO upon request and payment of the fee set forth in 37 CFR 1.19(b)(3).

### TECHNICAL FIELD

[0003] This invention relates to nucleic acid arrays and methods of using the same for concurrent or discriminable detection of different strains of Staphylococcus aureus or other non-viral species.

### BACKGROUND

[0004] Staphylococcus aureus is a leading cause of soft tissue infections. It can cause conditions such as pneumonia, meningitis, skin conditions (e.g. acne, boils or cellulites), arthritis, osteomyelitis, endocarditis, urinary tract infections, and toxic shock syndrome. Some strains of Staphylococcus aureus produce enterotoxins which cause staphylococcal food poisoning (staphyloenterotoxicosis or staphyloenterotoxemia). The most common symptoms for staphylococcal food poisoning include nausea, vomiting, retching, abdominal cramping, and prostration.

[0005] Traditional methods for detecting Staphylococcus aureus involve first growing the bacteria from a sample and then determining the identity of the bacteria. Examples of these methods include the direct plate count method and the most probable number (MPN) method. U.S. Patent Application Publication No. 20020055101 describes a PCR-based method for detecting Staphylococcus aureus. These traditional and PCR-based methods, however, are incapable of discriminably detecting multiple strains of Staphylococcus aureus at the same time.

[0006] Therefore, one object of this invention is to provide systems and methods which allow for concurrent and discriminable detection of different strains of Staphylococcus aureus or other non-viral species.

### SUMMARY OF THE INVENTION

[0007] In one aspect, the present invention provides nucleic acid arrays which allow for concurrent or discriminable detection of different strains of a non-viral species. The nucleic acid arrays include a plurality of polynucleotides, each of which is specific to a different respective strain of a non-viral species. In many embodiments, the nucleic acid arrays further include probes that are common to two or more different strains of the non-viral species.

[0008] In one embodiment, the non-viral species is Staphylococcus aureus. Examples of Staphylococcus aureus strains that are amenable to the present invention include, but are not limited to, COL, N315, Mu50, EMRSA-16, MSSA-476, MW2, and 8325.

[0009] In another embodiment, a nucleic acid array of the present invention includes at least 2, 5, 10, 100, 500, 1,000, 2,000, 3,000, 4,000, or more polynucleotide probes, each of which is capable of hybridizing under stringent or nucleic acid array hybridization conditions to a different respective sequence selected from SEQ ID NOs: 1 to 7,852, or the complement thereof.

[0010] In still another embodiment, a nucleic acid array of the present invention includes polynucleotide probes for each sequence selected from SEQ ID NOs: 1 to 7,852, or the complement thereof.

[0011] In yet another embodiment, a nucleic acid array of the present invention includes at least six polynucleotide probes, each of which is specific to a different respective Staphylococcus aureus strain selected from the group consisting of COL, N315, Mu50, EMRSA-16, MSSA-476, and 8325.

[0012] In many embodiments, a nucleic acid array of the present invention includes two groups of polynucleotide probes. The first group of probes is capable of hybridizing under stringent or nucleic acid array hybridization conditions to respective sequences selected from SEQ ID NOs: 3,817 to 7,852, or the complements thereof. The second group of probes is capable of hybridizing under stringent or nucleic acid array hybridization conditions to respective sequences selected from SEQ ID NOs: 1 to 3,816, or the complements thereof. Each group can include, without limitation, at least 10, 20, 50, 100, 200, 500, 1,000, or more different probes.

[0013] In another embodiment, a nucleic acid array of the present invention includes at least 2, 5, 10, 100, 10, 100, 500, 1,000, 2,000, 3,000, 4,000, or more polynucleotide probes, each of which is capable of hybridizing under stringent or nucleic acid array hybridization conditions to a different respective tiling sequence selected from SEQ ID NOs: 7,704, or the complement thereof.

[0014] In one example, a nucleic acid array of the present invention includes probes selected from SEQ ID NOs: 15,737. In another example, the nucleic acid array includes a mismatch probe for each perfect match probe. In yet another example, the nucleic acid array includes probes for virulence genes, antimicrobial resistance genes, multilocus sequence typing genes, leukotoxin genes, agrB genes, or genes encoding ribosomal proteins.

[0015] In another aspect, the present invention provides methods that are useful for typing, detecting, or monitoring gene expression of a strain of a non-viral species. The methods include preparing a nucleic acid sample from a sample of interest, and hybridizing the nucleic acid sample to a nucleic acid array of the present invention.

[0016] In yet another aspect, the present invention provides methods for preparing nucleic acid arrays. The methods includes selecting a plurality of polynucleotides, each of which is specific to a different respective strain of a non-viral species, and stably attaching the selected polynucleotides to respective regions on one or more substrate supports. The non-viral species can be, without limitation, Staphylococcus aureus or other bacteria. In one embodiment, the methods further include selecting a polynucleotide probe which is common to all of the different strains that are being investigated, and stably attaching the common polynucleotide probe to a discrete region on the substrate support(s). In another embodiment, the methods include identifying a plurality of open reading frames in the genomic sequences of different strains of a non-viral species, and selecting polynucleotide probes for the open reading frames thus identified.

[0017] In still another aspect, the present invention provides polynucleotide collections. The polynucleotide collections include at least one polynucleotide capable of hybridizing under stringent or nucleic acid array hybridization conditions to a respective sequence selected from SEQ ID NOs: 1 to 7,852, or the complement thereof.

[0018] The present invention also features protein arrays capable of concurrent or discriminable detection of different strains of a non-viral species. The protein arrays include probes that are specific to respective strains of a non-viral species. These probes can specifically bind to respective proteins of the non-viral species.

[0019] Other features, objects, and advantages of the present invention are apparent in the detailed description that follows. It should be understood, however, that the detailed description, while indicating preferred embodiments of the invention, is given by way of illustration only, not limitation. Various changes and modifications within the scope of the invention will become apparent to those skilled in the art from the detailed description.

### BRIEF DESCRIPTION OF THE DRAWINGS

[0020] The patent or application file contains at least one drawing executed in color. Copies of this patent or patent application publication with color drawing(s) will be provided by the Office upon request and payment of the necessary fee. The drawings are provided for illustration, not limitation.

[0021] FIG. 1 depicts the color scale of the expression level of a gene relative to the mean value for that gene over all nucleic acid arrays that are being investigated.

[0022] FIG. 2 shows an unsupervised hierarchical clustering of the normalized profiles of 2,059 “imperfect ORFs” across a set of Staphylococcus aureus strains or clones.

[0023] FIG. 3 illustrates the normalized profiles of seven multilocus sequence typing (MLST) genes across a set of Staphylococcus aureus strains or clones.

[0024] FIG. 4 shows the normalized profiles of 259 virulence genes across a set of Staphylococcus aureus strains or clones.

[0025] FIG. 5 indicates the normalized profiles of Panton-Valentine leukocidin (PVL) genes and other leukotoxin genes across a set of Staphylococcus aureus strains or clones.

[0026] FIG. 6 depicts the relationship between the PVL profiles and the profiles of two types of agrB gene.

[0027] FIG. 7 shows the normalized profiles of exfoliative toxin A gene (“eta”) and exfoliative toxin B gene (“etb”) across a set of Staphylococcus aureus strains or clones.

[0028] FIG. 8A illustrates a nucleic acid array-derived dendrogram (top) with heatmap (beneath) for all qualifiers that were analyzed in each strain. The dendrogran indicates the relatedness of each strain based on the signal intensity of each qualifier across all strains. Within the heatmap, each qualifier is shown vertically for each strain. Red indicates high signal intensity; green indicates low signal intensity. The order of qualifiers is identical for all strains. Scanning horizontally identifies qualifiers that have high signal intensity (red) in some strains but low intensities (green) in others.

[0029] FIG. 8B is a dendrogram of CDC strains 10, 13, 12, 9, and 8, which were all considered to be identical strains by both ribotyping and PFGE. Heatmap illustrates 36 qualifiers (horizontally) that are considered present in strains 10 and 13 but absent in other strains, based on adjusted call-determinations.

[0030] FIG. 8C shows growth characteristics of CDC strains 10, 13, 12, 9, and 8 on kanamycin-containing agar plates.

### DETAILED DESCRIPTION

[0031] The present invention provides nucleic acid arrays which allow for concurrent or discriminable detection of different strains of a non-viral species. In many embodiments, the nucleic acid arrays of the present invention include at least two probes, each of which is specific to a different respective strain of a non-viral species. In many other embodiments, the nucleic acid arrays of the present invention include at least one probe which is common to two or more different strains of a non-viral species. Examples of non-viral species that are amenable to the present invention include, but are not limited to, bacteria, fungi, animals, plants, or other prokaryotic or eukaryotic species. In one embodiment, the non-viral species is a pathogenic microorganism, such as a bacterium or fungus.

[0032] Different strains of a non-viral species can have different genetic properties. These genetic differences can be manifested in gene expression profiles and therefore become detectable by using the nucleic acid arrays of the present invention. The present invention contemplates detection of non-viral strains that have distinguishable phenotypical properties, such as immunological, morphological, or antibiotic-resistance properties. The present invention also contemplates detection of non-viral strains that have no distinguishable phenotypical properties. As used herein, “strain” includes subspecies.

[0033] The following subsections focus on nucleic acid arrays which allow for concurrent or discriminable detection of different Staphylococcus aureus strains. As appreciated by one of ordinary skill in the art, the same methodology can be readily adapted to the making of nucleic acid arrays that are suitable for the detection of different strains of other non-viral species. The use of subsections is not meant to limit the invention; each subsection may apply to any aspect of the invention. In this application, the use of “or” means “and/or” unless stated otherwise

### A. IDENTIFICATION OF OPEN READING FRAMES AND INTERGENIC SEQUENCES OF STAPHYLOCOCCUS AUREUS STRAINS

[0034] Open reading frames (ORFs) and intergenic sequences of different Staphylococcus aureus strains can be derived from their genomic sequences. Numerous Staphylococcus aureus genomes are available from a variety of sources. Table 1 lists six exemplary Staphylococcus aureus strains and the sources from which their genomic sequences can be obtained.

TABLE 1
Genomes of Staphylococcus aureus Strains

| Strain Name | Genome Status | Source |
|---|---|---|
| COL | Complete | The Microbial Database at The |
| | | Institute for Genome Research |
| | | (TIGR) |
| N315 | Complete | GenBank |
| Mu50 | Complete | GenBank |
| EMRSA-16 | Complete | Sanger Centre (United Kingdom) |
| MSSA-476 | Incomplete | Sanger Centre (United Kingdom) |
| 8325 | Incomplete | Oklahoma University |

[0035] The incomplete genomes (such as the MSSA-476 and 8325 genomes) can be organized and oriented based on alignments to the complete genomes. The organized and oriented sequence fragments for each incomplete genome can be further bridged with a six-frame stop sequence (such as CTAACTAATFAG).

[0036] ORFs in each of the six genomic sequences can be predicted or isolated by various methods. Exemplary methods include, but are not limited to, GeneMark (such as GeneMark 1.2.4a, provided by the European Bioinformatics Institute), Glimmer (such as Glimmer 2.0, provided by TIGR), and ORF Finder (provided by the National Center for Biotechnology Information (NCBI)). In addition, ORF sets can be collected from other sources. For instance, a number of ORF sets in the COL, N315 and Mu50 genomes have been published or publicly disclosed. ORFs present in GenBank or other sequence databases can also be collected.

[0037] tRNA and rRNA sequences can be similarly obtained. In one embodiment, tRNA and rRNA identified in the N315 and Mu50 genomes are collected.

[0038] The ORFs and other transcribeable sequences thus collected can be separated based on whether they are oriented 5′ to 3′ on the sense or antisense strand of their respective genomes. The strand assignment can be arbitrary. In one embodiment, all of the six genomes described in Table 1 are assigned in a similar manner. That is, the genomes for each of the six Staphylococcus aureus strains are highly conserved such that the overall primary structure is similar. Each genome can be oriented similarly such that the sense and antisense strands between different strains are highly conserved.

[0039] The collection of sense and antisense ORFs can then be clustered separately to identify highly homologous ORFs. Separate clustering may prevent the ORFs, which overlap on both the sense and antisense strands, from clustering together. This reduces the chance of generating misleading sequence clusters. Suitable clustering algorithms for this purpose include, but are not limited to, the CAT (cluster and alignment tool) software package provided by DoubleTwist. See Clustering and Alignment Tools User's Guide (DoubleTwist, Inc., 2000).

[0040] The CAT program can cause all similar ORFs to cluster together, and then align those similar ORFs to generate one or more sub-clusters. Each sub-cluster of two or more members generates a consensus sequence. The consensus sequences can be generated such that any base ambiguity would be identified with the respective IUPAC (International Union of Pure and Applied Chemistry) base representation, which is consistent with the WIPO Standard ST.25 (1998).

[0041] The consensus sequences, in addition to all singleton sequences that are either excluded in the initial clustering or sub-clustered into a singleton sub-cluster, can be manually curated to verify cluster membership. At this stage, some clusters can be joined or separated based on known homologies that are not identified with CAT. Moreover, filtered intergenic sequences can be added to the final set of sequences which are used for generating the nucleic acid array probes.

[0042] Examples of the consensus sequences identified using the above-described method are depicted in SEQ ID NOs: 1-3,816. Each of these consensus sequences has a header which includes the identification number (the number after “wyeSaureus2a:”) and other information of the sequence. See Table A. These consensus sequences were derived from sixteen sequence sets that comprised the input sequences for the clustering. These sixteen sequence sets include three sets derived from the COL genome (GeneMark, Glimmer, and TIGR), two sets from each of the 8325, MRSA, and MSSA genomes (GeneMark and Glimmer), three sets from each of the Mu50 and N315 genomes (GeneMark, Glimmer, and public ORF sets), and one set of other GenBank sequences. If a sequence was not derived from the genomes of the six strains listed in Table 1, the sequence belongs to the “Other” category. See Table E.

[0043] The consensus sequences represent ORFs or other transcribeable elements that are highly conserved among two or more different input sequences. Some consensus sequences are specific for a single genome and represent the Glimmer, Genemark, and public ORF calls on a single genome. Table E shows the Staphylococcus aureus strains (including the “Other” category) from which each consensus sequence was derived. For example, SEQ ID NO: 7 (consensus:wyeSaureus2a: WAN014A7L-5_at) was derived from and is highly conserved among all of the six strains listed in Table 1, and SEQ ID NO: 1 (consensus:wyeSaureus2a:AB047088-cds7_s_at) was derived from and is conserved among two or more different sequences in the “Other” category. See Table E. The consensus sequences can be used to prepare probes that are common to the Staphylococcus aureus strains from which the sequences were derived.

[0044] As used herein, a polynucleotide probe is “common” to a group of strains if the polynucleotide probe can hybridize under stringent conditions to each and every strain selected from the group. A polynucleotide can hybridize to a strain if the polynucleotide can hybridize to an RNA transcript, or the complement thereof, of the strain. In many embodiments, a probe common to a group of strains can hybridize under stringent conditions to a protein-coding sequence (e.g., an exon or the protein-coding region of an mRNA), or the complement thereof, of each strain in the group. In many other embodiments, a probe common to a group of strains does not hybridize under stringent conditions to RNA transcripts, or the complements thereof, of other strains of the same species or strains of other species.

[0045] “Stringent conditions” are at least as stringent as, for example, conditions G L shown in Table 2. In certain embodiments of the present invention, highly stringent conditions A-F can be used. In Table 2, hybridization is carried out under the hybridization conditions (Hybridization Temperature and Buffer) for about four hours, followed by two 20-minute washes under the corresponding wash conditions (Wash Temp. and Buffer).

TABLE 2
Stringency Conditions

| Stringency | Polynucleotide | Hybrid | Hybridization | Wash Temp. |
|---|---|---|---|---|
| Condition | Hybrid | Length (bp)¹ | Temperature and Buffer^{H} | and Buffer^{H} |
| A | DNA:DNA | >50 | 65° C.; 1xSSC -or- | 65° C.; 0.3xSSC |
| | | | 42° C.; 1xSSC, 50% formamide | |
| B | DNA:DNA | <50 | T_{B}*; 1xSSC | T_{B}*; 1xSSC |
| C | DNA:RNA | >50 | 67° C.; 1xSSC -or- | 67° C.; 0.3xSSC |
| | | | 45° C.; 1xSSC, 50% formamide | |
| D | DNA:RNA | <50 | T_{D}*; 1xSSC | T_{D}*; 1xSSC |
| E | RNA:RNA | >50 | 70° C.; 1xSSC -or- | 70° C.; 0.3xSSC |
| | | | 50° C.; 1xSSC, 50% formamide | |
| F | RNA:RNA | <50 | T_{F}*; 1xSSC | T_{f}*; 1xSSC |
| G | DNA:DNA | >50 | 65° C.; 4xSSC -or- | 65° C.; 1xSSC |
| | | | 42° C.; 4xSSC, 50% formamide | |
| H | DNA:DNA | <50 | T_{H}*; 4XSSC | T_{H}*; 4xSSC |
| I | DNA:RNA | >50 | 67° C.; 4xSSC -or- | 67° C.; 1xSSC |
| | | | 45° C.; 4xSSC, 50% formamide | |
| J | DNA:RNA | <50 | T_{J}*; 4xSSC | T_{J}*; 4xSSC |
| K | DNA:RNA | >50 | 70° C.; 4xSSC -or- | 67° C.; 1xSSC |
| | | | 50° C.; 4xSSC, 50% formamide | |
| L | RNA:RNA | <50 | T_{L}*; 2xSSC | T_{L}*; 2xSSC |
| ¹The hybrid length is that anticipated for the hybridized region(s) of the hybridizing polynucleotides. When hybridizing a polynucleotide to a target polynucleotide of unknown sequence, the hybrid length is assumed to be that of the hybridizing polynucleotide. When polynucleotides of known sequence are hybridized, the hybrid length can be determined by aligning the sequences of the polynucleotides and identifying the region or regions of optimal sequence complementarity. | | | | |
| ^{H}SSPE (1xSSPE is 0.15M NaCl, 10 mM NaH₂PO₄, and 1.25 mM EDTA, pH 7.4) can be substituted for SSC (1xSSC is 0.15M NaCl and 15 mM sodium citrate) in the hybridization and wash buffers. | | | | |
| T_{B}* − T_{R}*: The hybridization temperature for hybrids anticipated to be less than 50 base pairs in length should be 5-10° C. less than the melting temperature (Tₘ) of the hybrid, where Tₘ is determined according to the following equations. For hybrids less than 18 base pairs in length, Tₘ(° C.) = 2(# of A + T bases) + 4(# of G + C bases). For hybrids between | | | | |
| # 18 and 49 base pairs in length, Tₘ(° C.) = 81.5 + 16.6(log₁₀Na⁺) + 0.41(% G + C) − (600/N), where N is the number of bases in the hybrid, and Na⁺ is the molar concentration of sodium ions in the hybridization buffer (Na⁺ for 1xSSC = 0.165M). | | | | |

[0046] Examples of the singleton sequences identified using the above-described clustering method, as well as a filtered set of N315 intergenic sequences, are depicted in SEQ ID NOs: 3,852. These sequences are herein referred to as “exemplar” sequences. The same sixteen sequence sets were used to derive both the exemplar sequences in Table B and the consensus sequences in Table A. Each exemplar sequence has a header which includes the identification number (the number after “wyeSaureus2a:”) and other information of the sequence. See Table B.

[0047] Many of the singleton sequences are unique to only one Staphylococcus aureus strain listed in Table 1 (e.g., SEQ ID NOs: 4,434), or to only one sequence in the “Other” category (e.g., SEQ ID NOs: 7,852). Some of the singleton sequences are present in more than one genome, but were not called as ORFs and were therefore not in the input sequence set.

[0048] Table E illustrates the respective strain from which each exemplar sequence was derived. The exemplar sequences can be used to prepare probes that are specific to the respective Staphylococcus aureus strains from which these sequences were derived. As used herein, a polynucleotide probe is “specific” to a strain selected from a group of strains if the polynucleotide probe is capable of hybridizing under stringent conditions to an RNA transcript, or the complement thereof, of the strain, but is incapable of hybridizing under the same conditions to RNA transcripts, or the complements thereof, of other strains in the group. In many embodiments, a probe specific for a strain can hybridize under stringent conditions to a protein-coding sequence (e.g., an exon or the protein-coding region of an mRNA), or the complement thereof, of the strain, but not RNA transcripts, or the complements thereof, of other strains of the same species or strains of other species. SEQ ID NOs: 4,830 include intergenic sequences, rRNAs, tRNAs, unidentified ORFs, predicted or known ORFs, or other expressible features.

[0049] As appreciated by one of ordinary skill in the art, ORFs and other expressible sequences can be similarly extracted from the genomic sequences of other Staphylococcus aureus strains (such as strain MW2, T. Baba, et al., THE LANCET, 359: 1819-1827 (2002)), or strains of other non-viral species. The extracted sequences can be clustered to obtain consensus and singleton sequences. Probes common to two or more strains or probes specific to a particular strain can be derived from the consensus or singleton sequences, respectively. Like Staphylococcus aureus, the genomic sequences of other non-viral strains can be collected from publicly available sequence databases. For instance, the Entrez Genome database at the NCBI provides the genomic sequences for various bacterial strains or subspecies (see, e.g., www.ncbi.nlm.nih.gov/PMGifs/Genomesteub_g.html). These bacterial strains include, but are not limited to, Escherichia coli strains CTF073, K12, O157:H7, and O157:H7 EDL933; Chlamydophila pneumoniae strains CWL029, AR39, and J138; Streptococcus pneumoniae strains R6 and TIGR4; and Streptococcus pyogenes strains MGAS315, MGAS8232, SSI-1, and M1 GAS.

### B. PREPARATION OF POLYNUCLEOTIDE PROBES FOR DETECTING VARIOUS STAPHYLOCOCCUS AUREUS STRAINS

[0050] The consensus and exemplar sequences depicted in SEQ ID NOs: 1-7,852 (collectively referred to as the “parent sequences”) can be used for preparing polynucleotide probes. The probes for each parent sequence can hybridize under stringent or nucleic acid array hybridization conditions to the parent sequence, or the complement thereof. In many embodiments, the probes for each parent sequence are incapable of hybridizing under stringent or nucleic acid array hybridization conditions to other parent sequences, or the complements thereof. In one embodiment, the probes for each parent sequence comprise or consist of a sequence fragment of the parent sequence, or the complement thereof.

[0051] As used herein, “nucleic acid array hybridization conditions” refer to the temperature and ionic conditions that are normally used in nucleic acid array hybridization. These conditions include 16-hour hybridization at 45° C., followed by at least three 10-minute washes at room temperature. The hybridization buffer comprises 100 mM MES, 1 M [Na⁺], 20 mM EDTA, and 0.01% Tween 20. The pH of the hybridization buffer can range between 6.5 and 6.7. The wash buffer is 6×SSPET. 6×SSPET contains 0.9 M NaCl, 60 mM NaH₂PO₄, 6 mM EDTA, and 0.005% Triton X-100. Under more stringent nucleic acid array hybridization conditions, the wash buffer can contain 100 mM MES, 0.1 M [Na⁺], and 0.01% Tween 20.

[0052] The probes of the present invention can be DNA, RNA, or PNA (“Peptide Nucleic Acid”). Other modified forms of DNA, RNA, or PNA can also be used. The nucleotide units in each probe can be either naturally occurring residues (such as deoxyadenylate, deoxycytidylate, deoxyguanylate, deoxythymidylate, adenylate, cytidylate, guanylate, and uridylate), or synthetically produced analogs that are capable of forming desired base-pair relationships. Examples of these analogs include, but are not limited to, aza and deaza pyrimidine analogs, aza and deaza purine analogs, and other heterocyclic base analogs, wherein one or more of the carbon and nitrogen atoms of the purine and pyrimidine rings are substituted by heteroatoms, such as oxygen, sulfur, selenium, and phosphorus. Similarly, the polynucleotide backbones of the probes of the present invention can be either naturally occurring (such as through 5′ to 3′ linkage), or modified. For instance, the nucleotide units can be connected via non-typical linkage, such as 5′ to 2′ linkage, so long as the linkage does not interfere with hybridization. For another instance, peptide nucleic acids, in which the constitute bases are joined by peptide bonds rather than phosphodiester linkages, can be used.

[0053] In one embodiment, the probes have relatively high sequence complexity. In many instances, the probes do not contain long stretches of the same nucleotide. In another embodiment, the probes can be designed such that they do not have a high proportion of G or C residues at the 3′ ends. In yet another embodiment, the probes do not have a 3′ terminal T residue. Depending on the type of assay or detection to be performed, sequences that are predicted to form hairpins or interstrand structures, such as “primer dimers,” can be either included in or excluded from the probe sequences. In many embodiments, each probe employed in the present invention does not contain any ambiguous base.

[0054] Any part of a parent sequence can be used to prepare probes. For instance, probes can be prepared from the protein-coding region, the 5′ untranslated region, or the 3′ untranslated region of a parent sequence. Multiple probes, such as 5, 10, 15, 20, 25, 30, or more, can be prepared for each parent sequence. The multiple probes for the same parent sequence may or may not overlap each other. Overlap among different probes may be desirable in some assays.

[0055] In many embodiments, the probes for a parent sequence have low sequence identities with other parent sequences, or the complements thereof. For instance, each probe for a parent sequence can have no more than 70%, 60%, 50% or less sequence identity with other parent sequences, or the complements thereof. This reduces the risk of undesired cross-hybridization. Sequence identity can be determined using methods known in the art. These methods include, but are not limited to, BLASTN, FASTA, and FASTDB. The GCG program can also be used, which is a suite of programs including BLASTN and FASTA.

[0056] The suitability of the probes for hybridization can be evaluated using various computer programs. Suitable programs for this purpose include, but are not limited to, LaserGene (DNAStar), Oligo (National Biosciences, Inc.), MacVector (Kodak/IBI), and the standard programs provided by the Genetics Computer Group (GCG).

[0057] In one embodiment, the parent sequences with large sizes are divided into shorter sequence segments to facilitate the probe design. These shorter sequence segments, together with the remaining undivided parent sequences, are collectively referred to as the “tiling” sequences (SEQ ID NOs: 7,704). Like the parent sequences, each tiling sequence has a header which includes the identification number (the number after “wyeSaureus2a:”) and other information of the tiling sequence. See Table C. Table D shows the location of each tiling sequence in the corresponding parent sequence from which the tiling sequence is derived. “TilingStart” denotes the 5′ end location of a tiling sequence in the corresponding parent sequence, and “TilingEnd” represents the 3′ end location of the tiling sequence.

[0058] Polynucleotide probes can be derived from the tiling sequences. The probes for each tiling sequence can hybridize under stringent or nucleic acid array hybridization conditions to that tiling sequence, or the complement thereof. In many embodiments, the probes for each tiling sequence are incapable of hybridizing under stringent or nucleic acid array hybridization conditions to other tiling sequences, or the complements thereof.

[0059] Polynucleotide probes for each tiling sequence can be generated using Array Designer, a software package provided by TeleChem International, Inc (Sunnyvale, Calif. 94089). Examples of the polynucleotide probes thus generated are depicted in SEQ ID NOs: 15,737. The 5′ and 3′ ends of each probe in the corresponding tiling sequence are illustrated in Table F (“5′ End” and “3′ End,” respectively). Each probe in Table F can hybridize under stringent or nucleic acid array hybridization conditions to the complement of the corresponding tiling sequence. Other methods or software programs can also be used to prepare probes for the tiling sequences of the present invention.

[0060] In one embodiment, perfect mismatch probes are prepared for each probe of the present invention. A perfect mismatch probe has the same sequence as the original probe (i.e., the perfect match probe) except for a homomeric substitution (A to T, T to A, G to C, and C to G) at or near the center of the perfect mismatch probe. For instance, if the original probe has 2n nucleotide residues, the homomeric substitution in the perfect mismatch probe is either at the n or n+1 position, but not at both positions. If the original probe has 2n+1 nucleotide residues, the homomeric substitution in the perfect mismatch probe is at the n+1 position.

[0061] The polynucleotide probes of the present invention can be synthesized using a variety of methods. Examples of these methods include, but are not limited to, the use of automated or high throughput DNA synthesizers, such as those provided by Millipore, GeneMachines, and BioAutomation. In many embodiments, the synthesized probes are substantially free of impurities. In many other embodiments, the probes are substantially free of other contaminants that may hinder the desired functions of the probes. The probes can be purified or concentrated using numerous methods, such as reverse phase chromatography, ethanol precipitation, gel filtration, electrophoresis, or any combination thereof.

[0062] The parent sequences, tiling sequences, and polynucleotide probes of the present invention can be used to detect, identify, distinguish, or quantitate different Staphylococcus aureus strains in a sample of interest. Suitable methods for this purpose include, but are not limited to, nucleic acid arrays (including bead arrays), Southern Blot, Northern Blot, PCR, and RT-PCR. A sample of interest can be, without limitation, a food sample, an environmental sample, a pharmaceutical sample, a clinical sample, a blood sample, a body fluid sample, a waste sample, a human or animal sample, a bacterial culture, or any other biological or chemical sample.

[0063] As appreciated by those skilled in the art, parent sequences can be similarly isolated from the genomic sequences of other non-viral species. These parent sequences include ORFs or other transcribable elements. Tiling sequences and polynucleotide probes can be prepared from these parent sequences using the methods described above.

### C. NUCLEIC ACID ARRAYS

[0064] The polynucleotide probes of the present invention can be used to make nucleic acid arrays for the concurrent or discriminable detection of different strains of Staphylococcus aureus or other non-viral species. In many embodiments, the nucleic acid arrays of the present invention include at least one substrate support which has a plurality of discrete regions. The location of each of these discrete regions is either known or determinable. The discrete regions can be organized in various forms or patterns. For instance, the discrete regions can be arranged as an array of regularly spaced areas on a surface of the substrate. Other regular or irregular patterns, such as linear, concentric or spiral patterns, can be used.

[0065] Polynucleotide probes can be stably attached to respective discrete regions through covalent or non-covalent interactions. As used herein, a polynucleotide probe is “stably” attached to a discrete region if the polynucleotide probe retains its position relative to the discrete region during nucleic acid array hybridization.

[0066] Any method may be used to attach polynucleotide probes to a nucleic acid array of the present invention. In one embodiment, polynucleotide probes are covalently attached to a substrate support by first depositing the polynucleotide probes to respective discrete regions on a surface of the substrate support and then exposing the surface to a solution of a cross-linking agent, such as glutaraldehyde, borohydride, or other bifunctional agents. In another embodiment, polynucleotide probes are covalently bound to a substrate via an alkylamino-linker group or by coating a substrate (e.g., a glass slide) with polyethylenimine followed by activation with cyanuric chloride for coupling the polynucleotides. In yet another embodiment, polynucleotide probes are covalently attached to a nucleic acid array through polymer linkers. The polymer linkers may improve the accessibility of the probes to their purported targets. In many cases, the polymer linkers are not involved in the interactions between the probes and their purported targets.

[0067] Polynucleotide probes can also be stably attached to a nucleic acid array through non-covalent interactions. In one embodiment, polynucleotide probes are attached to a substrate support through electrostatic interactions between positively charged surface groups and the negatively charged probes. In another embodiment, a substrate employed in the present invention is a glass slide having a coating of a polycationic polymer on its surface, such as a cationic polypeptide. The polynucleotide probes are bound to these polycationic polymers. In yet another embodiment, the methods described in U.S. Pat. No. 6,440,723 are used to stably attach polynucleotide probes to a nucleic acid array of the present invention.

[0068] Numerous materials can be used to make the substrate supports) of a nucleic acid array of the present invention. Suitable materials include, but are not limited to, glass, silica, ceramics, nylon, quartz wafers, gels, metals, and paper. The substrate supports can be flexible or rigid. In one embodiment, they are in the form of a tape that is wound up on a reel or cassette. Two or more substrate supports can be used in the same nucleic acid array.

[0069] In many embodiments, the substrate supports are non-reactive with reagents that are used in nucleic acid array hybridization.

[0070] The surface(s) of a substrate support can be smooth and substantially planar. The surface(s) of the substrate can also have a variety of configurations, such as raised or depressed regions, trenches, v-grooves, mesa structures, or other regular or irregular configurations. The surface(s) of the substrate can be coated with one or more modification layers. Suitable modification layers include inorganic or organic layers, such as metals, metal oxides, polymers, or small organic molecules. In one embodiment, the surface(s) of the substrate is chemically treated to include groups such as hydroxyl, carboxyl, amine, aldehyde, or sulfhydryl groups.

[0071] The discrete regions on a nucleic acid array of the present invention can be of any size, shape and density. For instance, they can be squares, ellipsoids, rectangles, triangles, circles, or other regular or irregular geometric shapes, or any portion or combination thereof. In one embodiment, each of the discrete regions has a surface area of less than 10⁻¹ cm², such as less than 10⁻², 10⁻³, 10⁻⁴, 10⁻⁵, 10⁻⁶, or 10⁻⁷ cm². In another embodiment, the spacing between each discrete region and its closest neighbor, measured from center-to-center, is in the range of from about 10 to about 400 μm. The density of the discrete regions may range, for example, between 50 and 50,000 regions/cm².

[0072] A variety of methods can be used to make the nucleic acid arrays of the present invention. For instance, the probes can be synthesized in a step-by-step manner on a substrate, or can be attached to a substrate in pre-synthesized forms. Algorithms for reducing the number of synthesis cycles can be used. In one embodiment, a nucleic acid array of the present invention is synthesized in a combinational fashion by delivering monomers to the discrete regions through mechanically constrained flowpaths. In another embodiment, a nucleic acid array of the present invention is synthesized by spotting monomer reagents onto a substrate support using an ink jet printer (such as the DeskWriter C manufactured by Hewlett-Packard). In yet another embodiment, polynucleotide probes are immobilized on a nucleic acid array by using photolithography techniques.

[0073] The nucleic acid arrays of the present invention are capable of concurrently or discriminably detecting two or more different strains of a non-viral species, such as Staphylococcus aureus or other bacterial species. In one embodiment, a nucleic acid array of the present invention includes at least two polynucleotide probes, each of which is specific to a different strain of a non-viral species. Strain-specific probes can be prepared from the singleton sequences or other expressible sequences that are unique to that strain. In another embodiment, the nucleic acid array includes at least three, four, five, six, seven, eight, nine, ten, or more polynucleotide probes, each of which is specific to a different respective strain of a non-viral species.

[0074] In yet another embodiment, a nucleic acid array of the present invention includes at least one polynucleotide probe which is common to two or more different strains of a non-viral species. The common probe(s) can hybridize under stringent or nucleic acid array hybridization conditions to each and every strain selected from the two or more different strains. In still yet another embodiment, a nucleic acid array of the present invention includes at least one probe which is common to all of the different strains that are being investigated. This type of common probe can be derived from an ORF or a consensus sequence that is highly conserved among all of the different strains.

[0075] In a further embodiment, a nucleic acid array of the present invention includes two or more different polynucleotide probes that are specific to the same strain. For instance, a nucleic acid array can contain at least 5, 10, 20, 50, 100, 200 or more different probes, each of which is specific to the same strain. These different probes can hybridize under stringent or nucleic acid array hybridization conditions to the same RNA transcript, or different RNA transcripts of the same strain. They can be positioned in the same discrete region on a nucleic acid array. They can also be positioned in different discrete regions on a nucleic acid array.

[0076] In another embodiment, a nucleic acid array of the present invention can concurrently or discriminably detect two or more Staphylococcus aureus strains. Exemplary Staphylococcus aureus strains include, but are not limited to, COL, N315, Mu50, EMRSA-16, MSSA-476, MW2, and 8325. A nucleic acid array of the present invention can include at least two probes, each of which is specific to a different respective strain selected from the above Staphylococcus aureus strains. In one embodiment, a nucleic acid array of the present invention includes at least two, three, four, five, or six probes, each of which is specific to a different respective Staphylococcus aureus strain selected from COL, N315, Mu50, EMRSA-16, MSSA-476, and 8325.

[0077] In yet another embodiment, a nucleic acid array of the present invention contains at least one probe common to two or more Staphylococcus aureus strains selected from COL, N315, Mu50, EMRSA-16, MSSA-476, and 8325. In another embodiment, the common probe(s) can hybridize under stringent or nucleic acid array hybridization conditions to each and every strain selected from COL, N315, Mu50, EMRSA-16, MSSA-476, and 8325.

[0078] In still another embodiment, a nucleic acid array of the present invention includes polynucleotide probes which can hybridize under stringent or nucleic acid array hybridization conditions to respective sequences selected from SEQ ID NOs: 1 to 7,852, or the complements thereof. In one example, the nucleic acid array includes at least 2, 5, 10, 20, 30, 40, 50, 100, 200, 500, 1,000, 2,000, 3,000, 4,000, 5,000, or more different probes, each of which can hybridize under stringent or nucleic acid array hybridization conditions to a different respective sequence selected from SEQ ID NOs: 1 to 7,852, or the complement thereof. As used herein, two polynucleotides are “different” if they have different nucleic acid sequences.

[0079] In many embodiments, a nucleic acid array of the present invention includes two sets of probes. The first set of probes can hybridize under stringent or nucleic acid array hybridization conditions to respective sequences selected from SEQ ID NOs: 1 to 3,816, or the complements thereof, and the second set of probes can hybridize under the same conditions to respective sequences selected from SEQ ID NOs: 3,817 to 7,852, or the complements thereof. Each set can include at least 1, 2, 5, 10, 25, 50, 100, 200, 300, 400, 500, 1,000, or more probes.

[0080] In one embodiment, a nucleic acid array of the present invention includes probes for at least 1, 2, 5, 10, 50, 100, 500, 1,000, 2,000, 3,000, 4,000, 5,000, or more tiling sequences selected from SEQ ID NOs: 7,704. In another embodiment, a nucleic acid array of the present invention includes at least 2, 3, 4, 5, 10, 20, 30 or more probes for each tiling sequence of interest. In still another embodiment, the nucleic acid array includes probes for each tiling sequence selected from SEQ ID NOs: 7,704. Suitable probes for a tiling sequence include those depicted in SEQ ID NOs: 15,737.

[0081] The length of a probe can be selected to achieve the desired hybridization effect. For instance, a probe can include or consist of 15, 20, 25, 30, 35, 40, 45, 50, 60, 70, 80, 90, 100, 200, 300, 400 or more consecutive nucleotides. In one embodiment, each probe consists of about 25 consecutive nucleotides.

[0082] Multiple probes for the same gene can be included in a nucleic acid array of the present invention. For instance, at least 2, 5, 10, 15, 20, 25, 30 or more different probes can be used for detecting the same gene. Each of these different probes can be attached to a different respective region on a nucleic acid array. Alternatively, two or more different probes can be attached to the same discrete region. The concentration of one probe with respect to the other probe or probes in the same region may vary according to the objectives and requirements of the particular experiment. In one embodiment, different probes in the same region are present in approximately equimolar ratio.

[0083] In many applications, probes for different genes or RNA transcripts are attached to different respective regions on a nucleic acid array. In some other applications, probes for different genes or RNA transcripts are attached to the same discrete region.

[0084] In one embodiment, a nucleic acid array of the present invention is a bead array which includes a plurality of beads. Each bead is stably associated with one or more polynucleotide probes of the present invention.

[0085] In another embodiment, a nucleic acid array of the present invention includes probes for virulence or antimicrobial resistance genes. As used herein, a probe for a gene can hybridize under stringent or nucleic acid array hybridization conditions to an RNA transcript or a genomic sequence of that gene, or the complement thereof. In many instances, a probe for a gene is incapable of hybridizing under stringent or nucleic acid array hybridization conditions to RNA transcripts or genomic sequences of other genes, the complements thereof. The virulence or resistance genes that are being detected may be unique for a particular bacterial strain, or shared by several bacterial strains. Examples of virulence genes include, but are not limited to, various toxin and pathogenicity factor genes, such as those encoding fibrinogen binding protein, fibronectin binding protein, coagulase, enterotoxins, exotoxins, leukocidins, or V8 protease. Examples of antimicrobial resistance genes include, but are not limited to, penicillin-resistance genes, tetracycline-resistance genes, streptomycin-resistance genes, methicillin-resistance genes, and glycopeptide drug-resistance genes.

[0086] The nucleic acid arrays of the present invention can also include control probes which can hybridize under stringent or nucleic acid array hybridization conditions to respective control sequences, or the complements thereof. Examples of control sequences are depicted in SEQ ID NOs: 82,806. Table 3 lists the header information of each of these control sequences. Each header includes the identification number and other information of the corresponding control sequence. Example probes for these control sequences are described in Table G and SEQ ID NOs: 280,011.

TABLE 3
Control Sequences

| SEQ ID | Header |
|---|---|
| 82738 | >control:wyeSaureus2a:AFFX-BioB-3_at; gb\|J04423; J04423 E coli bioB gene |
| | biotin synthetase (-5, -M, -3 represent transcript regions 5 prime, Middle, and 3 |
| | prime respectively) |
| 82739 | >control:wyeSaureus2a:AFFX-BioB-5_at; gb\|J04423; J04423 E coli bioB gene |
| | biotin synthetase (-5, -M, -3 represent transcript regions 5 prime, Middle, and 3 |
| | prime respectively) |
| 82740 | >control:wyeSaureus2a:AFFX-BioB-M_at; gb\|J04423; J04423 E coli bioB gene |
| | biotin synthetase (-5, -M, -3 represent transcript regions 5 prime, Middle, and 3 |
| | prime respectively) |
| 82741 | >control:wyeSaureus2a:AFFX-BioC-3_at; gb\|J04423; J04423 E coli bioC protein |
| | (-5 and -3 represent transcript regions 5 prime and 3 prime respectively) |
| 82742 | >control:wyeSaureus2a:AFFX-BioC-5_at; gb\|J04423; J04423 E coli bioC protein |
| | (-5 and -3 represent transcript regions 5 prime and 3 prime respectively) |
| 82743 | >control:wyeSaureus2a:AFFX-BioDn-3_at; gb\|J04423; J04423 E coli bioD gene |
| | dethiobiotin synthetase (-5 and -3 represent transcript regions 5 prime and 3 |
| | prime respectively) |
| 82744 | >control:wyeSaureus2a:AFFX-BioDn-5_at; gb\|J04423; J04423 E coli bioD gene |
| | dethiobiotin synthetase (-5 and -3 represent transcript regions 5 prime and 3 |
| | prime respectively) |
| 82745 | >control:wyeSaureus2a:AFFX-CreX-3_at; gb\|X03453; X03453 Bacteriophage P1 |
| | cre recombinase protein (-5 and -3 represent transcript regions 5 prime and 3 |
| | prime respectively) |
| 82746 | >control:wyeSaureus2a:AFFX-CreX-5_at; gb\|X03453; X03453 Bacteriophage P1 |
| | cre recombinase protein (-5 and -3 represent transcript regions 5 prime and 3 |
| | prime respectively) |
| 82747 | >control:wyeSaureus2a:AFFX-DapX-3_at; gb\|L38424; L38424 B subtilis dapB, |
| | jojF, jojG genes corresponding to nucleotides 1358-3197 of L38424 (-5, -M, -3 |
| | represent transcript regions 5 prime, Middle, and 3 prime respectively) |
| 82748 | >control:wyeSaureus2a:AFFX-DapX-5_at; gb\|L38424; L38424 B subtilis dapB, |
| | jojF, jojG genes corresponding to nucleotides 1358-3197 of L38424 (-5, -M, -3 |
| | represent transcript regions 5 prime, Middle, and 3 prime respectively) |
| 82749 | >control:wyeSaureus2a:AFFX-DapX-M_at; gb\|L38424; L38424 B subtilis dapB, |
| | jojF, jojG genes corresponding to nucleotides 1358-3197 of L38424 (-5, -M, -3 |
| | represent transcript regions 5 prime, Middle, and 3 prime respectively) |
| 82750 | >control:wyeSaureus2a:AFFX-LysX-3_at; gb\|X17013; X17013 B subtilis lys |
| | gene for diaminopimelate decarboxylase corresponding to nucleotides 350-1345 |
| | of X17013 (-5, -M, -3 represent transcript regions 5 prime, Middle, and 3 prime |
| | respectively) |
| 82751 | >control:wyeSaureus2a:AFFX-LysX-5_at; gb\|X17013; X17013 B subtilis lys |
| | gene for diaminopimelate decarboxylase corresponding to nucleotides 350-1345 |
| | of X17013 (-5, -M, -3 represent transcript regions 5 prime, Middle, and 3 prime |
| | respectively) |
| 82752 | >control:wyeSaureus2a:AFFX-LysX-M_at; gb\|X17013; X17013 B subtilis lys |
| | gene for diaminopimelate decarboxylase corresponding to nucleotides 350-1345 |
| | of X17013 (-5, -M, -3 represent transcript regions 5 prime, Middle, and 3 prime |
| | respectively) |
| 82753 | >control:wyeSaureus2a:AFFX-PheX-3_at; gb\|M24537; M24537 B subtilis pheB, |
| | pheA genes corresponding to nucleotides 2017-3334 of |
| | M24537 (-5, -M, -3 represent transcript regions 5 prime, Middle, and 3 prime |
| | respectively) |
| 82754 | >control:wyeSaureus2a:AFFX-PheX-5_at; gb\|M24537; M24537 B subtilis pheB, |
| | pheA genes corresponding to nucleotides 2017-3334 of M24537 (-5, -M, -3 |
| | represent transcript regions 5 prime, Middle, and 3 prime respectively) |
| 82755 | >control:wyeSaureus2a:AFFX-PheX-M_at; gb\|M24537; M24537 B subtilis pheB, |
| | pheA genes corresponding to nucleotides 2017-3334 of M24537 (-5, -M, -3 |
| | represent transcript regions 5 prime, Middle, and 3 prime respectively) |
| 82756 | >control:wyeSaureus2a:AFFX-r2-Bs-dap-3_at; gb\|L38424; L38424 B subtilis |
| | dapB, jojF, jojG genes corresponding to nucleotides 1358-3197 of L38424 (-5, -M, |
| | -3 represent transcript regions 5 prime, Middle, and 3 prime respectively) |
| 82757 | >control:wyeSaureus2a:AFFX-r2-Bs-dap-5_at; gb\|L38424; L38424 B subtilis |
| | dapB, jojF, jojG genes corresponding to nucleotides 1358-3197 of L38424 (-5, -M, |
| | -3 represent transcript regions 5 prime, Middle, and 3 prime respectively) |
| 82758 | >control:wyeSaureus2a:AFFX-r2-Bs-dap-M_at; gb\|L38424; L38424 B subtilis |
| | dapB, jojF, jojG genes corresponding to nucleotides 1358-3197 of L38424 (-5, -M, |
| | -3 represent transcript regions 5 prime, Middle, and 3 prime respectively) |
| 82759 | >control:wyeSaureus2a:AFFX-r2-Bs-lys-3_at; gb\|X17013; X17013 B subtilis lys |
| | gene for diaminopimelate decarboxylase corresponding to nucleotides 350-1345 |
| | of X17013 (-5, -M, -3 represent transcript regions 5 prime, Middle, and 3 prime |
| | respectively) |
| 82760 | >control:wyeSaureus2a:AFFX-r2-Bs-lys-5_at; gb\|X17013; X17013 B subtilis lys |
| | gene for diaminopimelate decarboxylase corresponding to nucleotides 350-1345 |
| | of X17013 (-5, -M, -3 represent transcript regions 5 prime, Middle, and 3 prime |
| | respectively) |
| 82761 | >control:wyeSaureus2a:AFFX-r2-Bs-lys-M_at; gb\|X17013; X17013 B subtilis |
| | lys gene for diaminopimelate decarboxylase corresponding to nucleotides 350-1345 |
| | of X17013 (-5, -M, -3 represent transcript regions 5 prime, Middle, and 3 |
| | prime respectively) |
| 82762 | >control:wyeSaureus2a:AFFX-r2-Bs-phe-3_at; gb\|M24537; M24537 B subtilis |
| | pheB, pheA genes corresponding to nucleotides 2017-3334 of M24537 (-5, -M, -3 |
| | represent transcript regions 5 prime, Middle, and 3 prime respectively) |
| 82763 | >control:wyeSaureus2a:AFFX-r2-Bs-phe-5_at; gb\|M24537; M24537 B subtilis |
| | pheB, pheA genes corresponding to nucleotides 2017-3334 of M24537 (-5, -M, -3 |
| | represent transcript regions 5 prime, Middle, and 3 prime respectively) |
| 82764 | >control:wyeSaureus2a:AFFX-r2-Bs-phe-M_at; gb\|M24537; M24537 B subtilis |
| | pheB, pheA genes corresponding to nucleotides 2017-3334 of M24537 (-5, -M, -3 |
| | represent transcript regions 5 prime, Middle, and 3 prime respectively) |
| 82765 | >control:wyeSaureus2a:AFFX-r2-Bs-thr-3_s_at; gb\|X04603; Bacillus subtilis |
| | /REF = X04603 /DEF = B subtilis thrC, thrB genes corresponding to nucleotides |
| | 1689-2151 of X04603 /LEN = 2073 (-5, -M, -3 represent transcript regions 5 |
| | prime, Middle, and 3 prime respectively) |
| 82766 | >control:wyeSaureus2a:AFFX-r2-Bs-thr-5_s_at; gb\|X04603; Bacillus subtilis |
| | /REF = X04603 /DEF = B subtilis thrC, thrB genes corresponding to nucleotides |
| | 1689-2151 of X04603 /LEN = 2073 (-5, -M, -3 represent transcript regions 5 |
| | prime, Middle, and 3 prime respectively) |
| 82767 | >control:wyeSaureus2a:AFFX-r2-Bs-thr-M_s_at; gb\|X04603; Bacillus subtilis |
| | /REF = X04603 /DEF = B subtilis thrC, thrB genes corresponding to nucleotides |
| | 1689-2151 of X04603 /LEN = 2073 (-5, -M, -3 represent transcript regions 5 |
| | prime, Middle, and 3 prime respectively) |
| 82768 | >control:wyeSaureus2a:AFFX-r2-Ec-bioB-3_at; gb\|J04423; J04423 E coli bioB |
| | gene biotin synthetase (-5, -M, -3 represent transcript regions 5 prime, Middle, |
| | and 3 prime respectively) |
| 82769 | >control:wyeSaureus2a:AFFX-r2-Ec-bioB-5_at; gb\|J04423; J04423 E coli bioB |
| | gene biotin synthetase (-5, -M, -3 represent transcript regions 5 prime, Middle, |
| | and 3 prime respectively) |
| 82770 | >control:wyeSaureus2a:AFFX-r2-Ec-bioB-M_at; gb\|J04423; J04423 E coli bioB |
| | gene biotin synthetase (-5, -M, -3 represent transcript regions 5 prime, Middle, |
| | and 3 prime respectively) |
| 82771 | >control:wyeSaureus2a:AFFX-r2-Ec-bioC-3_at; gb\|J04423; J04423 E coli bioC |
| | protein (-5 and -3 represent transcript regions 5 prime and 3 prime respectively) |
| 82772 | >control:wyeSaureus2a:AFFX-r2-Ec-bioC-5_at; gb\|J04423; J04423 E coli bioC |
| | protein (-5 and -3 represent transcript regions 5 prime and 3 prime respectively) |
| 82773 | >control:wyeSaureus2a:AFFX-r2-Ec-bioD-3_at; gb\|J04423; J04423 E coli bioD |
| | gene dethiobiotin synthetase (-5 and -3 represent transcript regions 5 prime and 3 |
| | prime respectively) |
| 82774 | >control:wyeSaureus2a:AFFX-r2-Ec-bioD-5_at; gb\|J04423; J04423 E coli bioD |
| | gene dethiobiotin synthetase (-5 and -3 represent transcript regions 5 prime and 3 |
| | prime respectively) |
| 82775 | >control:wyeSaureus2a:AFFX-r2-P1-cre-3_at; gb\|X03453; X03453 |
| | Bacteriophage P1 cre recombinase protein (-5 and -3 represent transcript regions |
| | 5 prime and 3 prime respectively) |
| 82776 | >control:wyeSaureus2a:AFFX-r2-P1-cre-5_at; gb\|X03453; X03453 |
| | Bacteriophage P1 cre recombinase protein (-5 and -3 represent transcript regions |
| | 5 prime and 3 prime respectively) |
| 82777 | >control:wyeSaureus2a:AFFX-ThrX-3_at; gb\|X04603; X04603 B subtilis thrC, |
| | thrB genes corresponding to nucleotides 248-2229 of X04603 (-5, -M, -3 |
| | represent transcript regions 5 prime, Middle, and 3 prime respectively) |
| 82778 | >control:wyeSaureus2a:AFFX-ThrX-5_at; gb\|X04603; X04603 B subtilis thrC, |
| | thrB genes corresponding to nucleotides 248-2229 of X04603 (-5, -M, -3 |
| | represent transcript regions 5 prime, Middle, and 3 prime respectively) |
| 82779 | >control:wyeSaureus2a:AFFX-ThrX-M_at; gb\|X04603; X04603 B subtilis thrC, |
| | thrB genes corresponding to nucleotides 248-2229 of X04603 (-5, -M, -3 |
| | represent transcript regions 5 prime, Middle, and 3 prime respectively) |
| 82780 | >control:wyeSaureus2a:AFFX-TrpnX-3_at; gb\|K01391; K01391 B subtilis TrpE |
| | protein, TrpD protein, TrpC protein corresponding to nucleotides 1883-4400 of |
| | K01391 (-5, -M, -3 represent transcript regions 5 prime, Middle, and 3 prime |
| | respectively) |
| 82781 | >control:wyeSaureus2a:AFFX-TrpnX-5_at; gb\|K01391; K01391 B subtilis TrpE |
| | protein, TrpD protein, TrpC protein corresponding to nucleotides 1883-4400 of |
| | K01391 (-5, -M, -3 represent transcript regions 5 prime, Middle, and 3 prime |
| | respectively) |
| 82782 | >control:wyeSaureus2a:AFFX-TrpnX-M_at; gb\|K01391; K01391 B subtilis TrpE |
| | protein, TrpD protein, TrpC protein corresponding to nucleotides 1883-4400 of |
| | K01391 (-5, -M, -3 represent transcript regions 5 prime, Middle, and 3 prime |
| | respectively) |
| 82783 | >control:wyeSaureus2a:BIOB3_at; Unassigned; E. coli biotin synthetase (bioB), |
| | complete cds. |
| 82784 | >control:wyeSaureus2a:BIOB5_at; Unassigned; E. coli biotin synthetase (bioB), |
| | complete cds. |
| 82785 | >control:wyeSaureus2a:BIOBM_at; Unassigned; E. coli biotin synthetase (bioB), |
| | complete cds. |
| 82786 | >control:wyeSaureus2a:BIOC3_at; Unassigned; E. coli bioC protein, complete |
| | cds. |
| 82787 | >control:wyeSaureus2a:BIOC5_at; Unassigned; E. coli bioC protein, complete |
| | cds. |
| 82788 | >control:wyeSaureus2a:BIOD3_at; Unassigned; E. coli dethiobiotin synthetase |
| | (bioD), complete cds. |
| 82789 | >control:wyeSaureus2a:BIOD5_at; Unassigned; E. coli dethiobiotin synthetase |
| | (bioD), complete cds. |
| 82790 | >control:wyeSaureus2a:CRE3_at; Unassigned; Bacteriophage P1 cre gene for |
| | recombinase protein. |
| 82791 | >control:wyeSaureus2a:CRE5_at; Unassigned; Bacteriophage P1 cre gene for |
| | recombinase protein. |
| 82792 | >control:wyeSaureus2a:DAP3_at; Unassigned; Bacillus subtilis |
| | dihydropicolinate reductase (dapB), jojF, jojG, complete cds's. |
| 82793 | >control:wyeSaureus2a:DAP5_at; Unassigned; Bacillus subtilis |
| | dihydropicolinate reductase (dapB), jojF, jojG, complete cds's. |
| 82794 | >control:wyeSaureus2a:DAPM_at; Unassigned; Bacillus subtilis |
| | dihydropicolinate reductase (dapB), jojF, jojG, complete cds's. |
| 82795 | >control:wyeSaureus2a:LYSA3_at; Unassigned; Bacillus subtilis lys gene for |
| | diaminopimelate decarboxylase (EC 4.1.1.20). |
| 82796 | >control:wyeSaureus2a:LYSA5_at; Unassigned; Bacillus subtilis lys gene for |
| | diaminopimelate decarboxylase (EC 4.1.1.20). |
| 82797 | >control:wyeSaureus2a:LYSAM_at; Unassigned; Bacillus subtilis lys gene for |
| | diaminopimelate decarboxylase (EC 4.1.1.20). |
| 82798 | >control:wyeSaureus2a:PHE3_at; Unassigned; Bacillus subtillis phenylalanine |
| | biosynthesis associated protein (pheB), and monofunctional prephenate |
| | dehydratase (pheA) genes, complete cds. |
| 82799 | >control:wyeSaureus2a:PHE5_at; Unassigned; Bacillus subtillis phenylalanine |
| | biosynthesis associated protein (pheB), and monofunctional prephenate |
| | dehydratase (pheA) genes, complete cds. |
| 82800 | >control:wyeSaureus2a:PHEM_at; Unassigned; Bacillus subtillis phenylalanine |
| | biosynthesis associated protein (pheB), and monofunctional prephenate |
| | dehydratase (pheA) genes, complete cds. |
| 82801 | >control:wyeSaureus2a:THR3_at; Unassigned; B. subtilis thrB and thrC genes |
| | for homoserine kinase and threonine synthase (EC 2.7.1.39 and EC 4.2.99.2, |
| | respectively). |
| 82802 | >control:wyeSaureus2a:THR5_at; Unassigned; B. subtilis thrB and thrC genes |
| | for homoserine kinase and threonine synthase (EC 2.7.1.39 and EC 4.2.99.2, |
| | respectively). |
| 82803 | >control:wyeSaureus2a:THRM_at; Unassigned; B. subtilis thrB and thrC genes |
| | for homoserine kinase and threonine synthase (EC 2.7.1.39 and EC 4.2.99.2, |
| | respectively). |
| 82804 | >control:wyeSaureus2a:TRP3_at; Unassigned; B. subtilis tryptophan (trp) operon, |
| | complete cds. |
| 82805 | >control:wyeSaureus2a:TRP5_at; Unassigned; B. subtilis tryptophan (trp) operon, |
| | complete cds. |
| 82806 | >control:wyeSaureus2a:TRPM_at; Unassigned; B. subtilis tryptophan (trp) |
| | operon, complete cds. |

[0087] The nucleic acid arrays of the present invention can further include mismatch probes as controls. In many instances, the mismatch residue is located near the center of a probe such that the mismatch is more likely to destabilize the duplex with the target sequence under the hybridization conditions. In one embodiment, the mismatch probe is a perfect mismatch probe. Each polynucleotide probe and its corresponding perfect mismatch probe can be stably attached to different respective regions on a nucleic acid array of the present invention.

### D. APPLICATIONS

[0088] The nucleic acid arrays of the present invention can be used for concurrent or discriminable detection of different strains of a non-viral species, such as Staphylococcus aureus or other bacterial species. The nucleic acid arrays of the present invention can also be used for detecting the presence or absence of a non-viral species, independent of the particular strain that is being investigated. Moreover, the nucleic acid arrays of the present invention can be used to monitor gene expression patterns in Staphylococcus aureus or other non-viral species. In addition, the nucleic acid arrays of the present invention can be used to type unknown strains of Staphylococcus aureus or other clinically important non-viral species. Furthermore, probes for the intergenic sequences allow for the detection of unidentified ORFs or other expressible sequences. These intergenic probes are also useful for mapping transcription factor binding sites.

[0089] In one embodiment, a nucleic acid array of the present invention contains probes specific for different Staphylococcus aureus strains (such as COL, N315, Mu50, EMRSA-16, MSSA-476, and 8325), and can be used for discriminably detecting different clinical isolates. In another embodiment, a nucleic acid array of the present invention includes probes for strain N315 intergenic regions as well as probes for predicted open reading frames. This allows for the genetic analysis of Staphylococcus aureus DNA and RNA content, including analysis of cis-acting regulatory elements. Probes for the intergenic sequences of other Staphylococcus aureus strains can also be included in a nucleic acid array of the present invention. These probes may be specific to a particular Staphylococcus aureus strain, or common to two or more Staphylococcus aureus strains.

[0090] Protocols for performing nucleic acid array analysis are well known in the art. Exemplary protocols include those provided by Affymetrix in connection with the use of its GeneChip® arrays. Samples amenable to nucleic acid array analysis include biological samples prepared from human or animal tissues, such as pus, blood, urine, or other body fluid, tissue or waste samples. In addition, food, environmental, pharmaceutical or other types of samples can be similarly analyzed using the nucleic acid arrays of the present invention.

[0091] In one embodiment, bacteria or other microbes in a sample of interest are grown in culture before being analyzed by a nucleic acid array of the present invention. In another embodiment, an originally collected sample is directly analyzed without additional culturing. In many cases, the microbes that are being analyzed are pathogens that can cause human or animal diseases.

[0092] In many embodiments, the nucleic acid array analysis involves isolation of nucleic acid from a sample of interest, followed by hybridization of the isolated nucleic acid to a nucleic acid array of the present invention. The isolated nucleic acid can be RNA or DNA (e.g., genomic DNA). In one embodiment, the isolated RNA is amplified or labeled before being hybridized to a nucleic acid array of the present invention. Various methods are available for isolating or enriching RNA. These methods include, but are not limited to, RNeasy kits (provided by QIAGEN), MasterPure kits (provided by Epicentre Technologies), and TRIZOL (provided by Gibco BRL). The RNA isolation protocols provided by Affymetrix can also be employed in the present invention.

[0093] In another embodiment, bacterial mRNA is enriched by removing 16S and 25S rRNA. Different methods are available to eliminate or reduce the amount of rRNA in a bacterial sample. For instance, the MICROBExpress kit (provided by Ambion, Inc.) uses oligonucleotide-attached beads to capture and remove rRNA. 16S and 25S rRNA can also be removed by enzyme digestions. According to the latter method, 16S and 25S rRNA are first amplified using reverse transcriptase and specific primers to produce cDNA. The rRNA is allowed to anneal with the cDNA. The sample is then treated with RNAase H, which specifically digests RNA within an RNA:DNA hybrid.

[0094] In yet another embodiment, mRNA is amplified before being subject to nucleic acid array analysis. Suitable mRNA amplification methods include, but are not limited to, reverse transcriptase PCR, isothermal amplification, ligase chain reaction, hexamer priming, and Qbeta replicase methods. The amplification products can be either cDNA or cRNA.

[0095] Polynucleotides for hybridization to a nucleic acid array can be labeled with one or more labeling moieties to allow for detection of hybridized polynucleotide complexes. Example labeling moieties can include compositions that are detectable by spectroscopic, photochemical, biochemical, bioelectronic, immunochemical, electrical, optical or chemical means. Example labeling moieties include radioisotopes, chemiluminescent compounds, labeled binding proteins, heavy metal atoms, spectroscopic markers, such as fluorescent markers and dyes, magnetic labels, linked enzymes, mass spectrometry tags, spin labels, electron transfer donors and acceptors, and the like. In one embodiment, the enriched bacterial mRNA is labeled with biotin. The 5′ end of the enriched bacterial mRNA is first modified by T4 polynucleotide kinase with γ-S-ATP. Biotin is then conjugated to the 5′ end of the modified mRNA using methods known in the art.

[0096] Polynucleotides can be fragmented before being labeled with detectable moieties. Exemplary methods for fragmentation include, but are not limited to, heat or ion-mediated hydrolysis.

[0097] Hybridization reactions can be performed in absolute or differential hybridization formats. In the absolute hybridization format, polynucleotides derived from one sample are hybridized to the probes in a nucleic acid array. Signals detected after the formation of hybridization complexes correlate to the polynucleotide levels in the sample. In the differential hybridization format, polynucleotides derived from two samples are labeled with different labeling moieties. A mixture of these differently labeled polynucleotides is added to a nucleic acid array. The nucleic acid array is then examined under conditions in which the emissions from the two different labels are individually detectable. In one embodiment, the fluorophores Cy3 and Cy5 (Amersham Pharmacia Biotech, Piscataway, N.J.) are used as the labeling moieties for the differential hybridization format.

[0098] Signals gathered from nucleic acid arrays can be analyzed using commercially available software, such as those provide by Affymetrix or Agilent Technologies. Controls, such as for scan sensitivity, probe labeling and cDNA or cRNA quantitation, may be included in the hybridization experiments. Examples of control sequences are listed in Table 3. The array hybridization signals can be scaled or normalized before being subject to further analysis. For instance, the hybridization signal for each probe can be normalized to take into account variations in hybridization intensities when more than one array is used under similar test conditions. Signals for individual polynucleotide complex hybridization can also be normalized using the intensities derived from internal normalization controls contained on each array. In addition, genes with relatively consistent expression levels across the samples can be used to normalize the expression levels of other genes.

[0099] The present invention also features protein arrays for the concurrent or discriminable detection of multiple strains of a non-viral species. Each protein array of the present invention includes probes which can specifically bind to respective proteins of a non-viral species. In one embodiment, the probes on a protein array of the present invention are antibodies. Many of these antibodies can bind to the respective proteins with an affinity constant of at least 10⁴ M⁻¹, 10⁵ M⁻¹, 10⁻⁶ M⁻¹, 10⁷ M⁻¹, or more. In many instances, an antibody for a specified protein does not bind to other proteins. Suitable antibodies for the present invention include, but are not limited to, polyclonal antibodies, monoclonal antibodies, chimeric antibodies, single chain antibodies, Fab fragments, or fragments produced by a Fab expression library. Other peptides, scaffolds, or protein-binding ligands can also be used to construct the protein arrays of the present invention.

[0100] Numerous methods are available for immobilizing antibodies or other probes on a protein array of the present invention. Examples of these methods include, but are not limited to, diffusion (e.g., agarose or polyacrylamide gel), surface absorption (e.g., nitrocellulose or PVDF), covalent binding (e.g., silanes or aldehyde), or non-covalent affinity binding (e.g., biotin-streptavidin). Examples of protein array fabrication methods include, but are not limited to, ink-jetting, robotic contact printing, photolithography, or piezoelectric spotting. The method described in MacBeath and Schreiber, SCIENCE, 289: 1760-1763 (2000) can also be used. Suitable substrate supports for a protein array of the present invention include, but are not limited to, glass, membranes, mass spectrometer plates, microtiter wells, silica, or beads.

[0101] The protein-coding sequence of a gene can be determined by a variety of methods. For instance, many protein sequences can be obtained from the NCBI or other public or commercial sequence databases. The protein-coding sequences can also be extracted from the corresponding tiling or parent sequences by using an open reading frame (ORF) prediction program. Examples of ORF prediction programs include, but are not limited to, GeneMark (provided by the European Bioinformatics Institute), Glimmer (provided by TIGR), and ORF Finder (provided by the NCBI). Where a parent or tiling sequence represents the 5′ or 3′ untranslated region of a gene, a BLAST search of the sequence against a genome database can be conducted to determine the protein-coding region of the gene.

[0102] In one embodiment, a protein array of the present invention includes at least 2, 5, 10, 20, 30, 40, 50, 100, 200, 300, 400, 500, 1,000, 2,000, 3,000, 4,000, or more probes, each of which can specifically bind to a different respective protein encoded by SEQ ID NOs: 1-7,852 or their corresponding genes.

[0103] Furthermore, the present invention contemplates a collection of polynucleotides. A polynucleotide in the collection is capable of hybridizing under stringent or nucleic acid array hybridization conditions to a sequence selected from SEQ ID NOs: 1 to 7,852, or the complement thereof. In one embodiment, the collection includes two or more different polynucleotides, each of which is capable of hybridizing under stringent or nucleic acid array hybridization conditions to a different respective sequence selected from SEQ ID NOs: 1 to 7,852, or the complement thereof. In another embodiment, the collection includes one or more parent sequences depicted in SEQ ID NOs: 1 to 7,852, or one or more tiling sequences depicted in SEQ ID NOs: 7,704, or the complement(s) thereof. In still another embodiment, the collection includes one or more oligonucleotide probes listed in SEQ ID NOs: 15,737. In yet another embodiment, the polynucleotides in a collection of the present invention are stably attached to at least one substrate support to form a nucleic acid array. The present invention also features kits including the polynucleotides or polynucleotide probes of the present invention.

[0104] It should be understood that the above-described embodiments and the following examples are given by way of illustration, not limitation. Various changes and modifications within the scope of the present invention will become apparent to those skilled in the art from the present description.

### E. EXAMPLES

### Example 1

### Nucleic Acid Array

[0105] The tiling sequences depicted in SEQ ID NOs: 7,704 were submitted to Affymetrix for custom array design. Affymetrix selected probes for each tiling sequence using its probe-picking algorithm. Probes with 25 non-ambiguous bases were selected. A maximal set of 24-34 probes were selected for each submitted ORF sequence, and a maximal set of 12-15 probes were chosen for each submitted intergenic sequence. The final set of selected probes is depicted in SEQ ID NOs: 82,374. Table G shows the header for each of these probes. These probes are perfect match probes. The perfect mismatch probe for each perfect match probe was also prepared. The perfect mismatch probe is identical to the perfect match probe except at position 13 where a single-base substitution is made. The substitutions are A to T, T to A, G to C, or C to G. The final custom nucleic acid array includes both the perfect match probes and the perfect mismatch probes. In addition, the custom array contains probe sets for control sequences. The control probes are depicted in SEQ ID NOs: 279,085. The headers for the control sequences are also illustrated in Table G.

[0106] The nucleic acid array in this Example contains probes for at least 268 virulence gene loci, 46 resistance gene loci, 2,007 perfect ORFs (such as ribosomal proteins and DNA polymerase), 2,059 imperfect ORFs (including alleles with insertions, deletions or substitutions, splice variants, and strain-specific genes), and 3,343 intergenic regions. “Perfect ORFs” are ORF clusters that contain a representative sequence from each of the six genomes listed in Table 1. “Imperfect ORFs” refer to ORFs that are not present in all of the six input genomes listed in Table 1. The tiling or parent sequences for imperfect ORFs include, but are not limited to, AB009866-cds22_x_at, AB009866-cds25_at, AB009866-cds3_at, AB009866-cds50_x_at, AB009866-cds55_x_at, AB009866-cds56_at, AB033763-cds11_at, AB033763-cds2_at, AB033763-cds20_at, AB033763-cds27_at, AB033763-cds29_at, AB033763-cds4_at, AB033763-cds46_at, AB033763-cds5_at, AB033763-cds8_at, AB037671-cds10_at, AB037671-cds11_at, AB037671-cds21_at, AB037671-cds23_at, AB037671-cds28_at, AB037671-cds30_at, AB037671-cds32_at, AB037671-cds36_at, AB037671-cds46_at, AB037671-cds47_at, AB037671-cds49_at, AB037671-cds52_at, AB037671-cds53_at, AB037671-cds54_at, AB037671-cds55_at, AB037671-cds56_at, AB037671-cds57_at, AB037671-cds59_at, AB037671-cds6_at, AB037671-cds60_at, AB037671-cds61_at, AB037671-cds62_at, AB037671-cds63_at, AB037671-cds66_at, AB037671-cds67_at, AB037671-cds68_at, AB037671-cds69_at, AB037671-cds7_at, AB037671-cds70_at, AB037671-cds80_at, AB037671-cds81_at, AB037671-cds85_at, AB037671-cds87_at, AB047088-cds7_s_at, AB047089-cds1_at, AB047089-cds3_x_at, AB047089-cds4_at, AF051916-cds2_at, AF051917-cds10_at, AF051917-cds11_at, AF051917-cds12_at, AF051917-cds13_at, AF051917-cds14_at, AF051917-cds16_at, AF051917-cds36_at, AF051917-cds38_at, AF051917-cds7_at, AF051917-cds9_at, AF053140-cds2_at, AF077865-cds1_at, AF117258-cds1_at, AFF117258-cds2_at, AF117258-cds3_at, AF117259-cds1_at, AF117259-cds2_at, AF147744-cds1_at, AF147744-cds2_at, AF147744-cds3_at, AF147744-cds4_at, AF167161-cds1_at, AF167161-cds2_at, AF167161-cds7_at, AF186237-cds1_at, AF203376-cds1_at, AF203376-cds2_at, AF203377-cds1_at, AF203377-cds2_at, AF210055-cds1_at, AF217235-cds11_at, AF217235-cds18_at, AF217235-cds19_at, AF217235-cds20_at, AF217235-cds21_at, AF217235-cds5_at, AF217235-cds6_at, AF217235-cds8_x_at, AF217235-cds9_at, AF282215-cds2_at, AF282215-cds4_at, AF288402-cds1-seg1_at, AF288402-cds1-seg2_at, AJ005646-cds1_x_at, AJ243790-cds1_at, AJ277173-cds1_at, AJ292927-cds1_at, AJ309178-cds1_at, AJ309180-cds1_at, AJ309181-cds1_at, AJ309182-cds1_at, AJ309184-cds1_at, AJ309185-cds1_at, AJ309190-cds1_at, AJ309191-cds1_x_at, AJ311975-cds1_at, AJ311976-cds1_at, AJ311977-cds1_at, AP001553-cds10_at, AP001553-cds11_at, AP001553-cds12_at, AP001553-cds14_x_at, AP001553-cds2_at, AP001553-cds21_at, AP001553-cds27_at, AP001553-cds3_at, AP001553-cds30_at, AP001553-cds31_at, AP001553-cds37_x_at, AP001553-cds38_at, AP001553-cds39_at, AP001553-cds40_at, AP001553-cds41_at, AP001553-cds42_at, AP001553-cds43_at, AP001553-cds44_at, AP001553-cds45_at, AP001553-cds46_at, AP001553-cds47_at, AP001553-cds48_at, AP001553-cds49_at, AP001553-cds5_at, AP001553-cds50_at, AP001553-cds51_at, AP001553-cds52_at, AP001553-cds53_at, AP001553-cds54_at, AP001553-cds55_at, AP001553-cds56_at, AP001553-cds57_at, AP001553-cds6_at, AP001553-cds61_at, AP001553-cds64_at, AP001553-cds65_at, AP001553-cds8_at, AP001553-cds9_at, AY029184-cds1_at, D83951-cds2_at, J01763-cds1_at, J03947-cds1_at, L43082-cds1_at, M17348-cds1_at, M17990-cds1_at, M18086-cds1_s_at, M21319-cds1_at, M32470-cds1_at, M32470-cds2_at, M63917-cds1_at, U10927-cds1_at, U10927-cds10_at, U10927-cds11_at, U10927-cds12_at, U10927-cds13_at, U10927-cds2_at, U10927-cds3_at, U10927-cds4_at, U10927-cds5_at, U10927-cds6_at, U10927-cds7_at, U10927-cds8_at, U10927-cds9_at, U31979-cds4_at, U35036-cds4_at, U38429-cds3_at, U50077-cds2_x_at, U73025-cds1_at, U73026-cds1_at, U73027-cds1_at, U82085-cds1_at, U93688-cds1_x_at, U93688-cds10_at, U93688-cds12_at, U93688-cds15_at, U93688-cds8_at, U93688-cds9_at, U96610-cds1_s_at, WAN008YT9-seg1-x_at, WAN008YT9-seg2_x_at, WAN0144LN-seg1_s_at, WAN014A7L-5_at, WAN014A7L-M_at, WAN014A7M-seg1_x_at, WAN014A7M-seg2_at, WAN014A7N-seg1_at, WAN014A7N-seg2_at, WAN014A7O-seg1_at, WAN014A7O-seg2_at, WAN014A7P-seg1_at, WAN014A7P-seg2_at, WAN014A7Q-seg1_at, WAN014A7Q-seg2_at, WAN014A7R-seg1_at, WAN014A7R-seg2_s_at, WAN014A7S-5_at, WAN014A7S-M_at, WAN014A7T-5_at, WAN014A7T-M_at, WAN014A7U-3_at, WAN014A7U-M_at, WAN014A7V-5_at, WAN014A7V-M_at, WAN014A7W-5_at, U81980-cds2_at, WAN014A7W-M_at, WAN014A7X-5_at, WAN014A7X-M_at, WAN014A80-seg1_x_at, J04551-cds1_at, WAN014A7Y-seg1_at, WAN014A7Y-seg2_at, WAN014A7Z-seg1_x_at, WAN014A7Z-seg2_x_at, WAN014A80-seg2_x_at, WAN014A81-5_at, WAN014A81-M_at, WAN014A82-seg2_at, U19459-cds1_at, WAN014A83-5_at, WAN014A83-M_at, WAN014FR7_at, WAN014FR8_at, WAN014FRB_at, WAN014FRE_at, WAN014FRF_at, WAN014FRG_at, WAN014FRH_at, WAN014FRK_at, WAN014FRL_at, WAN014FRM_at, WAN014FRO_at, WAN014FRP_at, WAN014FRR_at, WAN014FRU_at, WAN014FRW_at, WAN014FRX_at, WAN014FRY_at, WAN014FRZ_at, WAN014FS0_at, WAN014FS3_at, WAN014FS4_at, WAN014FS5_at, WAN014FS6_at, WAN014FS9_at, WAN014FSB_at, WAN014FSC_at, WAN014FSD_at, WAN014FSE_at, WAN014FSI_at, WAN014FSJ_at, WAN014FSK_at, WAN014FSL_at, WAN014FSM_at, WAN014FSP_at, WAN014FSQ_at, WAN014FSR_at, WAN014FSZ_at, WAN014FT0_at, WAN014FT1_at, WAN014FT2_at, WAN014FT3_at, WAN014FT5_at, WAN014FT7_at, WAN014FTD_at, WAN014FTH_at, WAN014FTI_at, WAN014FTJ_at, WAN014FTK_at, WAN014FT0_at, WAN014FTR_at, WAN014FTT_at, WAN014FTV_at, WAN014FTX_at, WAN014FTY_at, WAN014FTZ_at, WAN014FU0_at, WAN014FU_at, WAN014FU2_at, WAN014FU3_at, WAN014FU6_at, WAN014FU9_at, WAN014FUA_at, WAN014FUB_at, WAN014FUC_at, WAN014FUF_at, WAN014FUI_at, WAN014FUJ_at, WAN014FUK_at, WAN014FUL_at, WAN014FUM_at, WAN014FUS_at, WAN014FUV_at, WAN014FV5_at, WAN014FVP_at, WAN014FWI_at, WAN014FW9_at, WAN014FWE_at, WAN014FWL_at, WAN014FWM_at, WAN014FWN_at, WAN014FW0_at, WAN014FWS_at, WAN014FWT_at, WAN014FWU_at, WAN014FWW_at, WAN014FWX_at, WAN014FWZ_at, WAN014FX0_at, WAN014FXF-5_at, WAN014FXF-M_at, WAN014FXG_at, WAN014FY1_at, WAN014FY2_at, WAN014FYA_at, WAN014FYB_at, WAN014FYC_at, WAN014FYH_at, WAN014FYP_at, WAN014FZ0_at, WAN014FZ5_at, WAN014FZE_at, WAN014FZI_at, WAN014FZK_at, WAN014FZM_at, WAN014FZN_at, WAN014FZ0_at, WAN014FZP_at, WAN014FZU_at, WAN014FZW_at, WAN014G09_at, WAN014G0A_at, WAN014G0B_at, WAN014G0E_at, WAN014G0F_at, WAN014G0H_at, WAN014G0I_at, WAN014G0J_at, WAN014G0O_at, WAN014G0Q_at, WAN014G0S_at, WAN014G0T_at, WAN014G12_at, WAN014G16_at, WAN014G17_at, WAN014G18_at, WAN014G19_at, WAN014G1A_at, WAN014G1B_at, WAN014G1C_at, WAN014G1D_at, WAN014G1F_at, WAN014G1G_at, WAN014G1H_at, WAN014G1I_at, WAN014G1J_at, WAN014G1K_at, WAN014G1L_at, WAN014G1M_at, WAN014G1N_at, WAN014G1O_at, WAN014G1R_s_at, WAN014G20_at, WAN014G21_at, WAN014G2A_at, WAN014G2B_at, WAN014G2E_at, WAN014G2F_at, WAN014G2H_at, WAN014G2N_at, WAN014G2P_at, WAN014G2Q_at, WAN014G32_at, WAN014G34_at, WAN014G35_at, WAN014G36_at, WAN014G37_s_at, WAN014G38_at, WAN014G39_at, WAN014G3B_at, WAN014G3I_at, WAN014G3J_x_at, WAN014G3L_at, WAN014G3M_at, WAN014G3N_at, WAN014G3O_at, WAN014G3Q_at, WAN014G3V_at, WAN014G3W_at, WAN014G3X_x_at, WAN014G43_at, WAN014G4C_at, WAN014G4D_at, WAN014G4E_at, WAN014G4F_at, WAN014G4G_x_at, WAN014G4H_at, WAN014G4K_at, WAN014G4L_at, WAN014G4O_at, WAN014G4P_at, WAN014G4S_at, WAN014G4U_at, WAN014G4V_at, WAN014G4W_at, WAN014G4Y_x_at, WAN014G51_at, WAN014G54_at, WAN014G57_at, WAN014G5F₁₃ at, WAN014G5G_at, WAN014G5I_at, WAN014G5K_at, WAN014G5M_at, WAN014G5O_at, WAN014G5Y_at, WAN014G61_at, WAN014G63_at, WAN014G66_at, WAN014G67_at, WAN014G6D_at, WAN014G6E_at, WAN014G6I_at, WAN014G6J_at, WAN014G6V_at, WAN014G6W_at, WAN014G6X_at, WAN014G6Y_at, WAN014G73_x_at, WAN014G74_x_at, WAN014G7H_at, WAN014G7L_at, WAN014G7P_at, WAN014G7Q_at, WAN014G7V_at, WAN014G7W_at, WAN014G7X_at, WAN014G7Y_at, WAN014G7Z_at, WAN014G84_at, WAN014G85_at, WAN014G87_at, WAN014G8A_at, WAN014G8I_at, WAN014G8O_at, WAN014G8R_at, WAN014G90_at, WAN014G9H_at, WAN014G9K_at, WAN014G9L_at, WAN014G9M_at, WAN014G9P_at, WAN014G9X_at, WAN014GA2_at, WAN014GA3_at, WAN014GA4_at, WAN014GA5_at, WAN014GA6_at, WAN014GA9_at, WAN014GAA_at, WAN014GAC_at, WAN014GAD_at, WAN014GAH_at, WAN014GAI_at, WAN014GAJ_at, WAN014GAN_at, WAN014GAQ_x_at, WAN014GAS_at, WAN014GAT_at, WAN014GAU_at, WAN014GAW_x_at, WAN014GAY_at, WAN014GAZ_x_at, WAN014 GB0_x_at, WAN014 GB1_at, WAN014 GB2_at, WAN014 GB3_at, WAN014 GB7_at, WAN014 GB8_at, WAN014 GBF_at, WAN014 GBL_at, WAN014 GBM_at, WAN014 GBU_at, WAN014GC2_at, WAN014GC4_at, WAN014GC9_at, WAN014GCB_at, WAN014GCJ_at, WAN014GCM_at, WAN014GCN_at, WAN014GCP_at, WAN014GCR_at, WAN014GCT_at, WAN014GCV_at, WAN014GCW_at, WAN014GCX_at, WAN014GD6_at, WAN014GDD_at, WAN014GDG_x_at, WAN014GDL_at, WAN014GDM_at, WAN014GDN_at, WAN014GDP_at, WAN014GDY_at, WAN014GDZ_at, WAN014GE4_at, WAN014GE6_at, WAN014GE8_at, WAN014GEA_at, WAN014GEB_at, WAN014GEC_x_at, WAN014GET_at, WAN014GEW_at, WAN014GEY_at, WAN014GF1_at, WAN014GF2_at, WAN014GF4_at, WAN014GF6_at, WAN014GF9_at, WAN014GFA_at, WAN014GFB_at, WAN014GFC_at, WAN014GFH_at, WAN014GFJ_at, WAN014GFK_at, WAN014GFN_at, WAN014GFO_at, WAN014GFP_at, WAN014GFS_at, WAN014GFT_at, WAN014GFU_x_at, WAN014GFV_at, WAN014GFW_at, WAN014GFY_at, WAN014GG1_at, WAN014GG2_at, WAN014GG3_at, WAN014GG4_at, WAN014GG5_at, WAN014GG8_at, WAN014GG9_at, WAN014GGA_at, WAN014GGB_at, WAN014GGC_at, WAN014GGE_at, WAN014GGH_at, WAN014GGJ_at, WAN014GGK_at, WAN014GGL_at, WAN014GGM_at, WAN014GGN_at, WAN014GGO_at, WAN014GGP_at, WAN014GGQ_at, WAN014GGR_at, WAN014GGS_at, WAN014GGT_at, WAN014GGU_at, WAN014GGV_at, WAN014GGW_at, WAN014GGX_x_at, WAN014GGY_x_at, WAN014GGZ_at, WAN014 GH1_at, WAN014 GH2_at, WAN014 GH3_at, WAN014 GH4_at, WAN014 GH6_at, WAN014 GH7_at, WAN014 GH8_at, WAN014 GHA_at, WAN014 GHB_at, WAN014 GHC_at, WAN014 GHD_at, WAN014 GHE_at, WAN014 GHH_at, WAN014 GHJ_x_at, WAN014 GHM_x_at, WAN014 GHN_at, WAN014 GHO_at, WAN014 GHR_at, WAN014 GHS_at, WAN014 GHU_at, WAN014 GHW_at, WAN014 GHZ_at, WAN014GI0_at, WAN014GI1_at, WAN014GI6_at, WAN014GI9_x_at, WAN014GIA_at, WAN014GIB_at, WAN014GID_at, WAN014GIF_at, WAN014GII_at, WAN014GIJ_at, WAN014GIK_at, WAN014GIL_at, WAN014GIM_at, WAN014GIN_at, WAN014GIO_x_at, WAN014GIR_at, WAN014GIS_at, WAN014GIT_at, WAN014GIY_at, WAN014GIZ_at, WAN014GJ0_at, WAN014GJ1_at, WAN014GJ2_at, WAN014GJ5_at, WAN014GJ6_at, WAN014GJ7_at, WAN014GJ8_at, WAN014GJC_at, WAN014GJD_at, WAN014GJF_at, WAN014GJG_at, WAN014GJH_at, WAN014GJJ_at, WAN014GJK_at, WAN014GJU_at, WAN014GJW_at, WAN014GJX_at, WAN014GKO_at, WAN014GK4_at, WAN014GK5_at, WAN014GK6_at, WAN014GK7_at, WAN014GKA_x_at, WAN014GKD_at, WAN014GKE_at, WAN014GKF_at, WAN014GKG_at, WAN014GKH_at, WAN014GKI_at, WAN014GKK_at, WAN014GKM_at, WAN014GKN_at, WAN014GKO_at, WAN014GKP_at, WAN014GKQ_at, WAN014GKU_x_at, WAN014GKW_at, WAN014GKY_at, WAN014GKZ_at, WAN014GL0_at, WAN014GL1_at, WAN014GL2_at, WAN014GL3_at, WAN014GL4_at, WAN014GL7_at, WAN014GL8_at, WAN014GL9_at, WAN014GLA_s_at, WAN014GLB_at, WAN014GLC_at, WAN014GLD_at, WAN014GLE_at, WAN014GLF_at, WAN014GLG_at, WAN014GLH_at, WAN014GLI_at, WAN014GLJ_at, WAN014GLK_at, WAN014GLL_at, WAN014GLM_at, WAN014GLO_at, WAN014GLP_at, WAN014GLQ_at, WAN014GLR_at, WAN014GLS_at, WAN014GLT_at, WAN014GLU_at, WAN014GLV_at, WAN014GLW_at, WAN014GLX_at, WAN014GLY_at, WAN014GLZ_at, WAN014GM2_at, WAN014GM6_at, WAN014GM7_at, WAN014GM8_at, WAN014GMB_at, WAN014GMC_at, WAN014GMD_at, WAN014GME_at, WAN014GMF_at, WAN014GMG_at, WAN014GMH_at, WAN014GMK_at, WAN014GML_at, WAN014GMM_at, WAN014GMN_at, WAN014GMQ_at, WAN014GMS_at, WAN014GMT_at, WAN014GMU_at, WAN014GMV_at, WAN014GMX_at, WAN014GMZ_at, WAN014GNO_at, WAN014GN1_at, WAN014GN2_at, WAN014GN4_at, WAN014GNC_at, WAN014GNK_at, WAN014GNM_at, WAN014GNN_at, WAN014GNP_at, WAN014GNT_at, WAN014GNV_at, WAN014GNX_at, WAN014GNY_at, WAN014GO0_at, WAN014GO3_x_at, WAN014GO4_x_at, WAN014GO6_at, WAN014GO8_at, WAN014GO9_x_at, WAN014GOA_at, WAN014GOB_at, WAN014GOD_at, WAN014GOF_at, WAN014GOG_at, WAN014GOI_at, WAN014GOK_at, WAN014GOL_at, WAN014GON_x_at, WAN014GOO_x_at, WAN014GOP_at, WAN014GOT_at, WAN014GOW_at, WAN014GOX_at, WAN014GOY_at, WAN014GOZ_at, WAN014GP2_at, WAN014GP9_at, WAN014GPB_at, WAN014GPD_at, WAN014GPE_at, WAN014GPF_at, WAN014GPH_at, WAN014GPL_at, WAN014GPS_at, WAN014GPT_at, WAN014GPV_at, WAN014GPX_at, WAN014GPY_at, WAN014GQ2_at, WAN014GQ4_at, WAN014GQ9_at, WAN014GQA_at, WAN014GQE_at, WAN014GQF_at, WAN014GQG_at, WAN014GQH_s_at, WAN014GQJ_at, WAN014GQK_at, WAN014GQL_at, WAN014GQM_at, WAN014GQN_at, WAN014GQO_at, WAN014GQP_at, WAN014GQQ_at, WAN014GQR_at, WAN014GQU_x_at, WAN014GQX_at, WAN014GQZ_at, WAN014GR3_at, WAN014GR5_at, WAN014GR9_at, WAN014GRC_at, WAN014GRF_at, WAN014GRG_s_at, WAN014GRI_at, WAN014GRM_at, WAN014GRN_at, WAN014GRW_at, WAN014GRY_at, WAN014GRZ_at, WAN014GS4_at, WAN014GS5_at, WAN014GS6_at, WAN014GSB_at, WAN014GSD_at, WAN014GSF_at, WAN014GSK_at, WAN014GSL_at, WAN014GSO_at, WAN014GSP_at, WAN014GSS_at, WAN014GST_at, WAN014GSU_at, WAN014GSV_at, WAN014GSW_at, WAN014GSZ_x_at, WAN014GT0_x_at, WAN014GT1_at, WAN014GT2_at, WAN014GT6_at, WAN014GT8_x_at, WAN014GTB_at, WAN014GTC_at, WAN014GTD_at, WAN014GTF_at, WAN014GTW_at, WAN014GTY_at, WAN014GUD_at, WAN014GUL_at, WAN014GUM_at, WAN014GUN_at, WAN014GUS_at, WAN014GUU_at, WAN014GUV_at, WAN014GUX_at, WAN014GV0_at, WAN014GV1_at, WAN014GV6_at, WAN014GV7_at, WAN014GVA_at, WAN014GVC_at, WAN014GVE_at, WAN014GVH_at, WAN014GVN_at, WAN014GVO_at, WAN014GVW_at, WAN014GW1_at, WAN014GW3_at, WAN014GW6_at, WAN014GW8_at, WAN014GW9_at, WAN014GWB_x_at, WAN014GWD_x_at, WAN014GWE_at, WAN014GWJ_at, WAN014GWK_at, WAN014GWM_at, WAN014GWN_at, WAN014GWP_at, WAN014GWT_s_at, WAN014GWW_at, WAN014GWY_at, WAN014GWZ_at, WAN014GX4_s_at, WAN014GX5_at, WAN014GX6_at, WAN014GXC_x_at, WAN014GXX_at, WAN014GY1_at, WAN014GY3_at, WAN014GY6_at, WAN014GY9_at, WAN014GYH_at, WAN014GYT_at, WAN014GYU_at, WAN014GZO_at, WAN014GZC_at, WAN014GZN_at, WAN014GZX_at, WAN014H0K_at, WAN014H0L_at, WAN014H16_at, WAN014H17_at, WAN014H1B_at, WAN014H1N_at, WAN014H1S_at, WAN014H2A_at, WAN014H2E_at, WAN014H2G_at, WAN014H2J_at, WAN014H2K_x_at, WAN014H2L_x_at, WAN014H2M_at, WAN014H2W_at, WAN014H36_at, WAN014H39_at, WAN014H3G_at, WAN014H3M_at, WAN014H4K_at, WAN014H40_at, WAN014H4Q_at, WAN014H4S_at, WAN014H4U_at, WAN014H4V_at, WAN014H4W_at, WAN014H4X_at, WAN014H4Y_at, WAN014H4Z_at, WAN014H50_at, WAN014H51_at, WAN014H52_at, WAN014H53_at, WAN014H54_at, WAN014H55_at, WAN014H56_at, WAN014H57_at, WAN014H5A_at, WAN014H₅B_at, WAN014H₅C_at, WAN014H5D_at, WAN014H5E_at, WAN014H₅F_at, WAN014H5G_at, WAN014H5I_at, WAN014H5K_at, WAN014H5M_at, WAN014H5U_at, WAN014H67_at, WAN014H6K_at, WAN014H6R_at, WAN014H6U_at, WAN014H6X_at, WAN014H71_at, WAN014H74_at, WAN014H77_s_at, WAN014H₇B_at, WAN014H70_at, WAN014H7_at, WAN014H8P_at, WAN014H96_at, WAN014H9E_at, WAN014H₉F_at, WAN014H9H_at, WAN014HAT_at, WAN014HAU_at, WAN014HB8_at, WAN014HBN_at, WAN014HBP_at, WAN014HBS_at, WAN014HC8_at, WAN014HC9_at, WAN014HCB_at, WAN014HCK_at, WAN014HCS_at, WAN014HD0_at, WAN014HDK_at, WAN014HEC_at, WAN014HEI_at, WAN014HEK_at, WAN014HEL_at, WAN014HEW_at, WAN014HF9_at, WAN014HFJ_at, WAN014HFM_at, WAN014HFO_at, WAN014HFP_at, WAN014HFQ_at, WAN014HFR_at, WAN014HFS_at, WAN014HFU_at, WAN014HFV_at, WAN014HFW_at, WAN014HFX_at, WAN014HFZ_at, WAN014HG0_at, WAN014HG1_at, WAN014HG2_at, WAN014HG4_x_at, WAN014HG5_at, WAN014HG9_at, WAN014HGA_x_at, WAN014HGB_x_at, WAN014HGC_at, WAN014HGD_x_at, WAN014HGF_x_at, WAN014HGI_at, WAN014HGJ_at, WAN014HGK_at, WAN014HGL_at, WAN014HGN_at, WAN014HGQ_at, WAN014HGS_at, WAN014HGT_at, WAN014HGU_at, WAN014HGV_at, WAN014HGW_at, WAN014HGX_at, WAN014HGZ_at, WAN014HH1_at, WAN014HH2_at, WAN014HH5_at, WAN014HH7_at, WAN014HHA_at, WAN014HHB_at, WAN014HHC_at, WAN014HHF_at, WAN014HHG_at, WAN014HHH_at, WAN014HHI_at, WAN014HHJ_at, WAN014HHM_at, WAN014HHN_at, WAN014HHQ1 at, WAN014HHR_at, WAN014HHS_at, WAN014HHT_at, WAN014HHU_at, WAN014HHV_at, WAN014HHY_at, WAN014HI1_at, WAN014HI2_at, WAN014HI3_at, WAN014HI5_at, WAN014HI6_at, WAN014HI7_at, WAN014HI8_at, WAN014HI9_at, WAN014HIA_at, WAN014HIB_at, WAN014HIC_at, WAN014HID_at, WAN014HIE_at, WAN014HII_at, WAN014HIJ_at, WAN014HIK_at, WAN014HIL_at, WAN014HIN_at, WAN014HIO_at, WAN014HIQ_at, WAN014HIR_at, WAN014HIS_at, WAN014HIT_at, WAN014HIV_at, WAN014HIW_at, WAN014HIX_at, WAN014HIY_at, WAN014HJ1₁₃ at, WAN014HJ2_at, WAN014HJ3_at, WAN014HJ6_at, WAN014HJB_at, WAN014HJC_at, WAN014HJF_at, WAN014HJG_at, WAN014HJJ_at, WAN014HJM_at, WAN014HJR_at, WAN014HJU_at, WAN014HK2_at, WAN014HK3_at, WAN014HK4_at, WAN014HK5_at, WAN014HKA_at, WAN014HKB_at, WAN014HKG_s_at, WAN014HKK_at, WAN014HKN_at, WAN014HKP_at, WAN014HKQ_at, WAN014HKT_at, WAN014HKY_at, WAN014HL0_at, WAN014HL1_at, WAN014HL5_at, WAN014HL6_at, WAN014HL8_at, WAN014HL9_at, WAN014HLA_at, WAN014HLB_at, WAN014HLC_at, WAN014HLD_at, WAN014HLF_at, WAN014HLG_at, WAN014HLH_at, WAN014HLM_at, WAN014HLN_at, WAN014HLO_at, WAN014HLQ_at, WAN014HLR_at, WAN014HLS_at, WAN014HLT_at, WAN014HLV_at, WAN014HLW_at, WAN014HLX_at, WAN014HLY_at, WAN014HLZ_at, WAN014HM1_at, WAN014HM2_at, WAN014HM4_at, WAN014HM6_at, WAN014HM7_at, WAN014HM9_at, WAN014HMA_at, WAN014HMC_at, WAN014HMD_at, WAN014HME_at, WAN014HMG_at, WAN014HMH_at, WAN014HMI_s_at, WAN014HMJ_at, WAN014HML_at, WAN014HMM_at, WAN014HMQ_at, WAN014HMR_at, WAN014HMS_at, WAN014HMT_at, WAN014HMW_at, WAN014HN4_at, WAN014HN5_at, WAN014HN6_at, WAN014HN8_at, WAN014HNB_at, WAN014HNG_at, WAN014HNK_at, WAN014HNL_at, WAN014HNM_at, WAN014HNO_x_at, WAN014HNP_at, WAN0144HNQ_at, WAN014HNT_at, WAN014HNU_at, WAN014HNV_at, WAN014HNW_at, WAN014HNX_at, WAN014HO0_at, WAN014HOC_at, WAN014HOD_at, WAN014HOG_at, WAN014HOH_at, WAN014HOI_at, WAN014HOJ_x_at, WAN014HOR_at, WAN014HOS_at, WAN014HOT_at, WAN014HOU_at, WAN014HOX_at, WAN014HOY_at, WAN014HOZ_at, WAN014HP0_at, WAN014HP2_at, WAN014HP3_at, WAN014HP4_at, WAN014HP6_at, WAN014HP7_at, WAN014HP8_at, WAN014HPA_at, WAN014HPO_at, WAN014HPS_at, WAN014HPV_at, WAN014HPW_at, WAN014HPX_at, WAN014HPY_at, WAN014HPZ_at, WAN014HQQ_at, WAN014HQ3_at, WAN014HQ4_at, WAN014HQ5_at, WAN014HQ6_at, WAN014HQ7_at, WAN014HQ9_at, WAN014HQD_at, WAN014HQI_at, WAN014HQN_at, WAN014HQP_at, WAN014HQQ_at, WAN014HQR_at, WAN014HQS_at, WAN014HQV_at, WAN014HQY_at, WAN014HQZ_at, WAN014HRO_at, WAN014HR5_x_at, WAN014HR7_at, WAN014HRA_at, WAN014HRG_at, WAN014HRJ_at, WAN014HRM_at, WAN014HRP_at, WAN014HRQ_at, WAN014HRR_at, WAN014HRS_at, WAN014HRX_at, WAN014HS8_at, WAN014HSF_at, WAN014HSK_at, WAN014HSL_at, WAN014HSM_at, WAN014HSN_at, WAN014HSO_at, WAN014HSP_at, WAN014HSQ_at, WAN014HST_at, WAN014HSU_at, WAN014HSV_at, WAN014HSW_at, WAN014HSX_at, WAN014HT0_at, WAN014HT1_at, WAN014HT2_at, WAN014HT8_at, WAN014HTI_at, WAN014HTN_at, WAN014HTW_at, WAN014HTX_at, WAN014HTY_at, WAN014HTZ_at, WAN014HU0_at, WAN014HU5_at, WAN014HU6_at, WAN014HU7_at, WAN014HU8_at, WAN014HUG_at, WAN014HUM_at, WAN014HUN_at, WAN014HUP_at, WAN014HUR_at, WAN014HUS_at, WAN014HUT_at, WAN014HUU_at, WAN014HUV_at, WAN014HUX_at, WAN014HUY_at, WAN014HUZ_at, WAN014HV0_at, WAN014HV1_at, WAN014HV2_at, WAN014HV3_at, WAN014HV4_at, WAN014HV5_at, WAN014HV7_at, WAN014HV8_at, WAN014HV9_at, WAN014HVB_at, WAN014HVC_at, WAN014HVF_at, WAN014HVG_at, WAN014HVJ_at, WAN014HVM_at, WAN014HVN_at, WAN014HVW_at, WAN014HW1_at, WAN014HW6_at, WAN014HW9_at, WAN014HWA_at, WAN014HWD_at, WAN014HWE_at, WAN014HWF_at, WAN014HWK_at, WAN014HWO_at, WAN014HWZ_at, WAN014HX2_at, WAN014HX3_at, WAN014HX4_at, WAN014HX5_at, WAN014HX9_at, WAN014HXE_at, WAN014HXG_at, WAN014HXH_at, WAN014HXI_at, WAN014HXJ_at, WAN014HXK_at, WAN014HXL_at, WAN014HXM_at, WAN014HXO_at, WAN014HXP_at, WAN014HXR_at, WAN014HXS_at, WAN014HXU_at, WAN014HXW_at, WAN014HXX_at, WAN014HY1_at, WAN014HY4_at, WAN014HYB_at, WAN014HYH_at, WAN014HYI_at, WAN014HYK_x_at, WAN014HYR_at, WAN014HYS_at, WAN014HYV_at, WAN014HYX_at, WAN014 HZ0_at, WAN014 HZ3_at, WAN014 HZ6_at, WAN014 HZ7_at, WAN014 HZ8_at, WAN014 HZ9_at, WAN014 HZK_at, WAN014 HZL_at, WAN014 HZM_at, WAN014 HZP_s_at, WAN014I06_at, WAN14I0D_at, WAN014I0Q_at, WAN014I0Z_at, WAN014I13_at, WAN014I14_at, WAN014I1Z_at, WAN014I21_at, WAN014I24_at, WAN014I2E_at, WAN014I2G_at, WAN014I21_at, WAN014I2K_at, WAN014I2L_at, WAN014I2M_at, WAN014I2R_at, WAN014I2T_at, WAN014I3B_at, WAN014I3E_at, WAN014I3G_at, WAN014I3K_at, WAN014I4O_at, WAN014I41_at, WAN014I4E_at, WAN014I4K_at, WAN04I4L_at, WAN014I4N_at, WAN014I4O_at, WAN014I4Q_at, WAN014I4V_at, WAN014I4W_at, WAN014I4X_at, WAN014I4Z_at, WAN014I52_at, WAN014I54_at, WAN014I56_at, WAN014I59_at, WAN014I5T_at, WAN014I6E_at, WAN014I6M_at, WAN014I6P_at, WAN014I6Q_at, WAN014I6U_at, WAN01416Z_x_at, WAN014I7K-seg1_at, WAN014I7K-seg2_at, WAN014I7K-seg3_at, WAN014I7K-seg4_at, WAN014I7K-seg5_x_at, WAN014IKC_x_at, WAN014IKD_x_at, WAN014IKE_x_at, WAN014IKF_x_at, WAN014IKG_x_at, WAN014IKH_x_at, WAN014IKI_at, WAN014IKJ_at, WAN014IKK_x_at, WAN014IKL_x_at, WAN014IKM_x_at, WAN014IKN_at, WAN014IKO_at, WAN014IKP_at, WAN014IKQ_at, WAN014IKR_at, WAN014IKS_at, WAN014IKT_at, WAN014IKU_at, WAN014IKV_at, WAN014IKW_at, WAN014IKX_at, WAN014IKY_x_at, WAN014IKZ_x_at, WAN014IL0_x_at, WAN014IL1_at, WAN014IL2_x_at, WAN014IL3_at, WAN014IL6_x_at, WAN014IL7_at, WAN014IL8_at, WAN014IL9_at, WAN014ILA_at, WAN014ILB_at, WAN014ILC_x_at, WAN014ILD_x_at, WAN014ILF_at, WAN014ILG_at, WAN014ILH_at, WAN014ILI_x_at, WAN014ILJ_at, WAN014ILK_at, WAN014ILL_x_at, WAN014ILM_at, WAN014ILO_x_at, WAN014ILT_x_at, WAN014ILU_x_at, WAN014ILV_at, WAN014ILW_x_at, WAN014ILX_at, WAN014ILY_x_at, WAN014ILZ_at, WAN014IM0_x_at, WAN014IM1_x_at, WAN014IM2_x_at, WAN014IM3_x_at, WAN014IM4_x_at, WAN014IM5_x_at, WAN014IM7_x_at, WAN014IM8_x_at, WAN014IMA_x_at, WAN014IMB_at, WAN014IMC_x_at, WAN014IMD_x_at, WAN014IME_x_at, WAN014IMF_x_at, WAN014IMH_x_at, WAN014IMI_at, WAN014IMJ_at, WAN014IMK_at, WAN014IML_at, WAN014IMM_at, WAN014IMN_at, WAN014IMO_x_at, WAN014IMP_at, WAN014IMQ_x_at, WAN014IMR_x_at, WAN014IMS_at, WAN014IMT_x_at, WAN014IMU_at, WAN014IMV_at, WAN014IMW_at, WAN014IMX_at, WAN014IMY_at, WAN014IMZ_at, WAN014IN0_at, WAN014IN1_x_at, WAN014IN2_at, WAN014IN6_x_at, WAN014IN7_x_at, WAN014IN9_at, WAN014INB_x_at, WAN014INC_x_at, WAN014INE_at, WAN014ING_x_at, WAN014INH_at, WAN014INI_at, WAN014INJ_at, WAN014INK_at, WAN014INO_at, WAN014INP_at, WAN014INQ_at, WAN014INR_x_at, WAN014INS_at, WAN014INT_x_at, WAN014INU_x_at, WAN014INV_at, WAN014INW_x_at, WAN014INX_at, WAN014INY_at, WAN014INZ_at, WAN014IO0_at, WAN014IO1_at, WAN014IO2_at, WAN014IO3_at, WAN014IO4_at, WAN014IO5_at, WAN014IO6_at, WAN014IO7_at, WAN014IO8_at, WAN014IO9_at, WAN014IOA_at, WAN014IOB_x_at, WAN014IOC_at, WAN014IOD_at, WAN014IOE_at, WAN014IOF_at, WAN014IOH_x_at, WAN014IOI_at, WAN014IOJ_at, WAN014IOK_at, WAN014IOL_at, WAN014IOM_at, WAN014ION_at, WAN014IOO_at, WAN014IOP_x_at, WAN014IOQ_x_at, WAN014IOR_at, WAN014IOS_at, WAN014IOV-seg1_at, WAN014IOW-seg2_at, WAN014IOX-seg3_at, WAN014IOY-seg4_x_at, WAN014IOZ-seg1_x_at, WAN014IP0-seg2_x_at, WAN014IP1-seg3_x_at, WAN014IP2_at, WAN014IP3_at, WAN014IP5_at, WAN014IP6_at, WAN014IP7_at, WAN014IP8_x_at, WAN014IP9_at, WAN014IPA_at, WAN014IPB_s_at, WAN014IPC_at, WAN014IPD_at, WAN014IPE_at, WAN014IPF_at, WAN014IPG_at, WAN014IPH_at, WAN014IPI_at, WAN014IPJ_at, WAN014IPK_at, WAN014IPL_at, WAN014IPM_at, WAN014IPN_at, WAN014IPO_at, WAN014IPP_x_at, WAN014IPQ_x_at, WAN014IPR_at, WAN014IPS_x_at, WAN014IPT_at, WAN014IPU_at, WAN014IPV_at, WAN014IPW_at, WAN014IPX_at, WAN014IPY_at, WAN014IPZ_at, WAN014IQ0_at, WAN014IQ1_at, WAN014IQ2_at, WAN014IQ3_at, WAN014IQ4_at, WAN014IQ5 at, WAN014IQ6_at, WAN014IQ7_at, WAN014IQ8_at, WAN014IQ9_at, WAN014IQA_at, WAN014IQB_at, WAN014IQC_at, WAN014IQD_at, WAN014IQE_at, WAN014IQF_at, WAN014IQG_at, WAN014IQH_at, WAN014IQI_at, WAN014IQJ_at, WAN014IQK_at, WAN014IQL_at, WAN014IQM_at, WAN014IQN_at, WAN014IQO_at, WAN014IQP_at, WAN014IQQ_at, WAN014IQR_at, WAN014IQS_at, WAN014IQT_at, WAN014IQU_at, WAN014IQV_at, WAN014IQW_at, WAN014IQX_at, WAN014IQY_at, WAN014IQZ_at, WAN014IR0_at, WAN014IR1_x_at, WAN014IR2_at, WAN014IR3_at, WAN014IR4_at, WAN014IR5_at, WAN014IR6_at, WAN014IR7_at, WAN014IR8_at, WAN014IR9_at, WAN014IRA_at, WAN014IRB_at, WAN014IRC_at, WAN014IRD_at, WAN014IRE_at, WAN014IRF_at, WAN014IRG_at, WAN014IRH_at, WAN014IRI_at, WAN014IRJ_at, WAN014IRK_at, WAN014IRL_at, WAN014IRM_at, WAN014IRN_at, WAN014IRO_at, WAN014IRP_at, WAN014IRQ_at, WAN014IRR_at, WAN014IRS_at, WAN014IRT_at, WAN014IRU_at, WAN014IRV_at, WAN014IRW_at, WAN014IRX_at, WAN014IRY_at, WAN014IRZ_at, WAN014ISO_at, WAN014IS1_at, WAN014IS2_at, WAN014IS3_at, WAN014IS4_at, WAN014IS5_at, WAN014IS6_at, WAN014IS7_at, WAN014IS8_at, WAN014IS9_at, WAN014ISA_at, WAN014ISB_at, WAN014ISC_at, WAN014ISD_at, WAN014ISE_at, WAN014ISF_at, WAN014ISG_at, WAN014ISH_at, WAN014ISI_at, WAN014ISJ_at, WAN014ISK_at, WAN014ISL_at, WAN014ISM_at, WAN014ISN_at, WAN014ISO_at, WAN014ISP_at, WAN014ISQ at, WAN014ISR-seg2_at, WAN014ISS-seg1_at, WAN014IST_at, WAN014ISU_at, WAN014ISV_at, WAN014ISW_at, WAN014ISX_at, WAN014ISY_at, WAN014ISZ_at, WAN014ITO_at, WAN014IT1_at, WAN014IT2_at, WAN014IT3_at, WAN014IT4_at, WAN014IT5_at, WAN014IT6_at, WAN014IT7_at, WAN014IT8_at, WAN014IT9_at, WAN014ITA_at, WAN014ITB_at, WAN014ITC_at, WAN014ITD_at, WAN014ITE_at, WAN014ITF_at, WAN014ITG_at, WAN014ITH_at, WAN014ITI_at, WAN014ITJ_at, WAN014ITK_at, WAN014ITL_at, WAN014ITM_at, WAN014ITN_at, WAN014ITO_s_at, WAN014ITP_s_at, WAN014ITQx_at, WAN014ITR_x_at, WAN014ITS_at, WAN014ITT_at, WAN014ITU_at, WAN014ITV_at, WAN014ITW_at, WAN014ITX_at, WAN014ITY_at, WAN014ITZ_at, WAN014IU0_at, WAN014IU1_at, WAN014IU2_at, WAN014IU3_at, WAN014IU4_at, WAN014IU5_at, WAN014IU6_at, WAN014IU7_at, WAN014IU8_at, WAN014IU9_at, WAN014IUA_at, WAN014IUB_at, WAN014IUC_at, WAN014IUD_at, WAN014IUE_at, WAN014IUF_at, WAN014IUG_at, WAN014IUH_at, WAN014IUI_at, WAN014IUJ_at, WAN014IUK_at, WAN014IUL_at, WAN014IUM_at, WAN014IUN_at, WAN014IUO_at, WAN014IUP_at, WAN014IUQ_at, WAN014IUR_at, WAN014IUS_at, WAN014IUT_at, WAN014IUU_at, WAN014IUV_at, WAN014IUW_at, WAN014IUX_at, WAN014IUY_at, WAN014IUZ_at, WAN014IV0_at, WAN014IV1_at, WAN014IV2_at, WAN014IV3_at, WAN014IV4 at, WAN014IV5_at, WAN014IV6 at, WAN014IV7_at, WAN014IV8_at, WAN014IV9_at, WAN014IVA_at, WAN014IVB_at, WAN014IVC_at, WAN014IVD_at, WAN014IVE_at, WAN014IVF_at, WAN014IVG_at, WAN014IVH_at, WAN014IVI_at, WAN014IVJ_at, WAN014IVK_at, WAN014IVL_at, WAN014IVM_at, WAN014IVN_at, WAN014IVO_at, WAN014IVP_at, WAN014IVQ_at, WAN014IVR_at, WAN014IVS_at, WAN014IVT_at, WAN014IVU_at, WAN014IVV_at, WAN014IVW_at, WAN014IVX_at, WAN014IVY_at, WAN014IVZ_at, WAN014IW0_at, WAN014IW1_at, WAN014IW2_at, WAN014IW3_at, WAN014IW4_at, WAN014IW5_at, WAN014IW6_at, WAN014IW7_at, WAN014IW8_at, WAN014IW9_at, WAN014IWA_at, WAN014IWB_at, WAN014IWC_at, WAN014IWD_at, WAN014IWE_at, WAN014IWF_at, WAN014IWG_at, WAN014IWH_at, WAN014IWI_at, WAN014IWJ_s_at, WAN014IWK_at, WAN014IWL_at, WAN014IWM_at, WAN014IWN_at, WAN014IWO_at, WAN014IWP_at, WAN014IWQ_at, WAN014IWR_at, WAN014IWS_at, WAN014IWT_at, WAN014IWU_at, WAN014IWV_at, WAN014IWW_at, WAN014IWX_at, WAN014IWY_at, WAN014IWZ_at, WAN014IX0_at, WAN014IX1_at, WAN014IX2_at, WAN014IX3_at, WAN014IX4_at, WAN014IX5_at, WAN014IX6_at, WAN014IX7_at, WAN014IX8_at, WAN014IX9_at, WAN014IXA_at, WAN014IXB_at, WAN014IXC_at, WAN014IXD_at, WAN014IXE_at, WAN014IXF_at, WAN014IXG_at, WAN014IXH_at, WAN014IXI_at, WAN014IXJ_s_at, WAN014IXK_at, WAN014IXL_at, WAN014IXM_x_at, WAN014IXN_s_at, WAN014IXO_at, WAN014XP_at, WAN014IXQ_at, WAN014IXR_s_at, WAN014IXS_at, WAN014IXT_at, WAN014IXU_at, WAN014IXV_at, WAN014IXW_at, WAN014IXX_at, WAN014IXY_at, WAN014IXZ_at, WAN014IY0_at, WAN014IY1_at, WAN014IY2_at, WAN014IY3_at, WAN014IY6_at, WAN014IY7_at, WAN014IY8_at, WAN014IY9_at, WAN014IYB_at, WAN014IYC_x_at, WAN014IYD_x_at, WAN014IYE_at, WAN014IYF_at, WAN014IYG_at, WAN014IYH_at, WAN014IYI_at, WAN01A4RB_at, WAN01A54A_sat, WAN01A54B_s_at, WAN01A54F_s_at, WAN01A54R_s_at, WAN01A551_x_at, WAN01A55C_at, WAN01A57W_x_at, WAN01A57X_x_at, WAN01A584_s_at, WAN01A5FE_x_at, WAN01A5HF_x_at, WAN01A5HH_x_at, WAN01A5HS_x_at, WAN01A6DL_at, WAN01A6G9_at, WAN01A6VJ_at, WAN01A72A_at, WAN01A72C_x_at, WAN01A72E_at, WAN01A72I_s_at, WAN01A72V_at, WAN01A72W_x_at, WAN01A72X_s_at, WAN01A732_s_at, WAN01A733_at, WAN01A736_at, WAN01A737_at, WAN01A738_x_at, WAN01A73B_at, WAN01A73E_x_at, WAN01A73K_x_at, WAN01A73Q_at, WAN01A73T_x_at, WAN01A76C_at, WAN01A771_x_at, WAN01A775_x_at, WAN01A776_at, WAN01A7HG_at, WAN01A7HH_at, WAN01A717_x_at, WAN01A719_x_at, WAN01A71H_at, WAN01A71J_x_at, WAN01A71M_x_at, WAN01A71N_x_at, WAN01A71Y_x_at, WAN01A7JA_at, WAN01A7QZ4x_at, WAN01A7RO_x_at, WAN01A7WT_at, WAN01A89R_at, WAN01A8BV_at, WAN01A8BX_s_at, WAN01A8MR_at, WAN01A8OD_at, WAN01A8SB_at, WAN01AATG_at, WAN01AAVO_at, WAN01AAVT_at, WAN01AAWB_s_at, WAN01AAZI_x_at, WAN01AAZK_at, WAN01ABOB_x_at, WAN01AB31_at, WAN01AB5H_at, WAN01ABG2_at, WAN01ABK6_at, WAN01ABL8_at, WAN01AC23_at, WAN01AC35_x_at, WAN01AC7M_at, WAN01ACHS_at, WAN01ACOT_at, WAN01ACQQ_at, WAN01BOTN_at, WAN01BOU7_at, WAN01BOU8_at, WAN01BOUE_x_at, WAN01BOUQ_at, WAN01BOVS_at, WAN01BOYW_at, WAN01BOZO_at, WAN01BOZB_at, WAN01BOZO_at, WAN01BP0A_at, WAN01BP10_x_at, WAN01BP1C_x_at, WAN01BP1M_at, WAN01BP23_at, WAN01BP26_at, WAN01BP4M_at, WAN01BP56_at, WAN01BP5E_at, WAN01BP62_at, WAN01BP6C_at, WAN01BP6R_at, WAN01BP71_at, WAN01BP7X_at, WAN01BPA1_x_at, WAN01BPBH_at, WAN01BPBU_at, WAN01BPDF_at, WAN01BPEU_x_at, WAN01BPFR_at, WAN01BPG8_x_at, WAN01BPH1_at, WAN01BPHD_at, WAN01BPJS_at, WAN01BPJZ_at, WAN01BPLH_at, WAN01BPNF_x_at, WAN01BPO9_at, WAN01BPPG_x_at, WAN01BPPH_at, WAN01BPPM_at, WAN01BPPN_x_at, WAN01BPPQ_at, WAN01BPRV_at, WAN01BPTC_at, WAN01BPTJ_at, WAN01BPTV_at, WAN01BPU8_at, WAN01BPUL_at, WAN01BPXK_at, WAN01BPXQ_x_at, WAN01BPXY_at, WAN01BPY8_at, WAN01BPY9_at, WAN01BPZ6_at, WAN01BQ08_at, WAN01BQ3K_at, WAN01BQ50_at, WAN01BQ7Q_at, WAN01BQ8D x_at, WAN01BQ8G_at, WAN01BQ81_x_at, WAN01BQ80_at, WAN01BQ99_at, WAN01BQ9B_at, WAN01BQ9Z_at, WAN01BQA0_at, WAN01BQBV_at, WAN01BQCP_at, WAN01BQCT_at, WAN01BQD3_at, WAN01BQDB_at, WAN01BQE8_at, WAN01BQGT_at, WAN01BQHM_at, WAN01BQHQ_at, WAN01BQI0_s_at, WAN01BQI1_at, WAN01BQJG_at, WAN01BQJM_x_at, WAN01BQKQ_at, WAN01BQM2_at, WAN01BQM5_x_at, WAN01BQMM_at, WAN01BQMO_at, WAN01BQMY_at, WAN01BQNF_at, WAN01BQNJ_at, WAN01BQNW_at, WAN01BQOB_at, WAN01BQP1_at, WAN01BQP3_at, WAN01BQPE_at, WAN01BQPQ_at, WAN01BQPV_at, WAN01BQPW_at, WAN01BQPX_x_at, WAN01BQQ3_at, WAN01BQQ7_at, WAN01BQQ8_at, WAN01BQQK_at, WAN01BQQN_at, WAN01BQSX_at, WAN01BQT6_at, WAN01BQU6_s_at, WAN01BQUF_at, WAN01BQUP_at, WAN01BQV7x_at, WAN01BQVN_at, WAN01BQWZ_at, WAN01BQX0_at, WAN01BRCD_at, WAN01BSDG_at, WAN01BSSD_at, WAN01BSVG_at, WAN01BSVJ_at, WAN01BSY9_at, WAN01BSYF_at, WAN01BSYQ_at, WAN01BSZN_at, WAN01BT0Y_at, WAN01BT18_at, WAN01BT1B_at, WAN01BT25_x_at, WAN01BT2I_at, WAN01BT2Z_at, WAN01BT3F_at, WAN01BT4Z_at, WAN01BT5N_at, WAN01BT5R_x_at, WAN01BT6H_at, WAN01BT6X_at, WAN01BT6Y_x_at, WAN01BT76_x_at, WAN01BT7O_at, WAN01BT7P_at, WAN01BT7U_at, WAN01BT7Y_at, WAN01BT82_at, WAN01BT83_at, WAN01BT8N_at, WAN01BTAO_at, WAN01BTC0_at, WAN01BTC1_at, WAN01BTCM_at, WAN01BTCY_at, WAN01BTCZ_x_at, WAN01BTD4_at, WAN01BTDR_at, WAN01BTDV_at, WAN01BTE0_at, WAN01BTFI_at, WAN01BTFS_at, WAN01BTG2_at, WAN01BTG6_at, WAN01BTHU_at, WAN01BTHY_at, WAN01BTIA_at, WAN01BTJF_at, WAN01BTJK_at, WAN01BTL8_at, WAN01BTNH_at, WAN01BTO3_at, WAN01BTOS_at, WAN01BTPO_at, WAN01BTQB_at, WAN01BTQS_at, WAN01BTRL_at, WAN01BTRQ_at, WAN01BTRU_x_at, WAN01BTRZ_at, WAN01BTU3_at, WAN01BTUI_at, WAN01BTWH_at, WAN01BTWI_at, WAN01BTWN_at, WAN01BTWO_at, WAN01BTWP_at, WAN01BTWV_at, WANO1BTX7_x_at, WAN01BTZH_at, WAN01BU0Q-seg1_at, WAN01BU0Q-seg2_at, WAN01BU0Q-seg3_at, WAN01BU0Q-seg4_at, WAN01BU0Q-seg6_s_at, WAN01BU2B_s_at, WAN01BU2V_at, WAN01BU2W_x_at, WAN01BU30_at, WAN01BU33_x_at, WAN01BU34_at, WAN01BU35_at, WAN01BU38_x_at, WAN01BU3A_at, WAN01BU3M_at, WAN01BU3T_at, WAN01BU6J_at, WAN01BUAR_at, WAN01BUB0_at, WAN01BUBB_s_at WAN01BUBL_at WAN01BUBX_at, WAN01BUCD_at, WAN01BUCI_at, WAN01BUCJ_at, WAN01BUCK_at, WAN01BUCL_at, WAN01BUD8_at, WAN01BUDD_at, WAN01BUDN_at, WAN01BUDO_at, WAN01BUDP_at, WAN01BUDS_at, WAN01BUDU_at, WAN01BUDW_at, WAN01BUE4_at, WAN01BUE7_at, WAN01BUEG_at, WAN01BUFT_x_at, WAN01BUHJ_at, WAN01BUHO_x_at, WAN01BUID_at, WAN01BUIE_at, WAN01BUIJ_x_at, WAN01BUIN_at, WAN01BUIS_x_at, WAN01BUIU_x_at, WAN01BUIV_x_at, WAN01BUJ8_at, WAN01BUJD_at, WAN01BUJF_at, WAN01BUJG_at, WAN01BUJK_at, WAN01BULB_at, WAN01BULO_x_at, WAN01BUM7_at, WAN01BUMI_at, WAN01BUNG_at, WAN01BUNO_at, WAN01BUNR_at, WAN01BUON_at, WAN01BUOX_at, WAN01BUOY_at, WAN01BUQI_at, WAN01BURL_at, WAN01BUSX_at, WAN01BUT1_s_at, WAN01BUTL_at, WAN01BUUF_at, WAN01BUUJ_at, WAN01BUUK_at, WAN01BUV3_at, WAN01BUVL_at, WAN01BUVW_at, WAN01BUVX_at, WAN01BUWT_at, WAN01BUWU_at, WAN01BUWX_x_at, WAN01BUX0_at, WAN01BUX3_at, WAN01BUX4_at, WAN01BUXC_at, WAN01BUYQ_at, WAN01BUYZ_at, WAN01BUZL_at, WAN01BV0F_at, WAN01BV10_x_at, WAN01BV1J_at, WAN01BV1L_at, WAN01BV1S_at, WAN01BV21_at, WAN01BV3G_at, WAN01BVDE_at, WAN01BVEQ_at, WAN01BW3M_x_at, WAN01BWRZ_at, WAN01BWZ7_at, WAN01BX0L_at, WAN01BX0Q_at, WAN01BX0R_at, WAN01BX0W_at, WAN01BX10_at, WAN01BX13_at, WAN01BX1B_x_at, WAN01BX1F_x_at, WAN01BX2C_at, WAN01BX4S_at, WAN01BX6J_x_at, WAN01BX7O_at, WAN01BX7T_at, WAN01BX9C_x_at, WAN01BXA6_at, WAN01BXAD_at, WAN01BXAO_at, WAN01BXAQ_at, WAN01BXAS_at, WAN01BXAT_at, WAN01BXAU_at, WAN01BXBA_x_at, WAN01BXBJ_at, WAN01BXC6_x_at, WAN01BXDL_at, WAN01BXE3_x_at, WAN01BXFG_at, WAN01BXFK_at, WAN01BXGF_x_at, WAN01BXL3_at, WAN01BXQ2_at, WAN01BXQC_x_at, WAN01BXQZ_at, WAN01BXSQ_x_at, WAN01BXTO_at, WAN01BXVP_at, WAN01BXY7_at, WAN01BY06_at, WAN01BY0E_at, WAN01BY0M_x_at, WAN01BY26_at, WAN01BY31_at, WAN01BY3W_at, WAN01BY5D_at, WAN01BY5G_at, WAN01BY84_x_at, WAN01BY8K_at, WAN01BYE7_x_at, WAN01BYEP_at, WAN01BYF1_at, WAN01BYHK_at, WAN01BYK5_at, WAN01BYLK_at, WAN01BYLU_at, WAN01BYLV_x_at, WAN01BYNC_x_at, WAN01BYP5_at, WAN01BYTK_at, WAN01BYTU_x_at, WAN01BYU4_at, WAN01BYV4_at, WAN01BYWV_x_at, WAN01BYWW_at, WAN01BYWY_x_at, WAN01BYX5_at, WAN01BYXJ_at, WAN01BYXK_at, WAN01BYZP_x_at, WAN01BZ3A_at, WAN01BZ3H_at, WAN01BZ41_at, WAN01BZ42_at, WANO1BZ43_at, WAN01BZ44_at, WAN01BZ45_at, WAN01BZ47_at, WAN01BZ48_at, WAN01BZ49_at, WAN01BZ4A_at, WAN01BZ4R_at, WAN01BZ50_at, WAN01BZ51_at, WAN01BZ52_at, WAN01BZ54_at, WAN01BZ55_at, WAN01BZVA_at, WAN01BZZL_at, WAN01COR1_x_at, WAN01C0U3_at, WAN01C0YK_at, WAN01C1E4_at, WAN01C1EJ_at, WAN01C1PZ_at, WAN01C1RL_x_at, WAN01C1RM_at, WAN01C1SB_x_at, WAN01C1ST_s_at, WAN01C26O_at, WAN01C28I_at, WAN01C299_at, WAN01C2H9_at, WAN01C2HO_at, WAN01C2TP_at, WAN01C2V3_at, WAN01C2V7_at, WAN01C3B5_at, WAN01C3MI_at, WAN01C3NL_at, WAN01C3XV_at, WAN01C3ZF_at, WAN01C3ZO_at, WAN01C401_x_at, WAN01C45G_at, WAN01C4TN_at, WAN01C4UE_at, WAN01C4UG_at, WAN01C4US_at, WAN01C4UT_at, WAN01C4VF_at, WAN01C4VG_at, WAN01C52T_at, WAN01C5GK_at, WAN01C5GL_s_at, WAN01C617_at, WAN01C7GQ_at, WAN01C7NC_at, WAN01C7X8_x_at, WAN01C8DX_x_at, WAN01C8MO_at, WAN01C8OH_x_at, WAN01C8OY_at, WAN01C8P0_at, WAN01C8P5_at, WAN01C8TY_at, WAN01C903_at, WAN01C₉₀H_x_at, WAN01C9HD_x_at, WAN01C9JL_at, WAN01C9JM_at, WAN01C9JR_at, WAN01C9 KB_at, WAN01C9S6_x_at, WAN01C9TR_at, WAN01CA3W_s_at, WAN01CA8O_at, WAN01CAIK_at, WAN01CASJ_s_at, WAN01CASK_x_at, WAN01CAT8_at, WAN01CAWM_at, WAN01CAX8_x_at, WAN01CAX9_x_at, WAN01CAXC_x_at, WAN01CAXD_x_at, WAN01CAXO_at, WAN01CAXQ_x_at, WAN01CAXR_at, WAN01CAYD_at, WAN01CAYE_at, WAN01CAYF_x_at, WAN01CAYG_x_at, WAN01CAYH_s_at, WAN01CAYJ_at, WAN01CAYO_x_at, WAN01CAZ2_at, WAN01CB8G_at, WAN01CB96_x_at, WAN01CBBB_x_at, WAN01CBBC_x_at, WAN01CBBM_at, WAN01CBE2_x_at, WAN01CBER_s_at, WAN01CBET_s_at, WANO1CBEU_s_at, X03216-cds7_at, X06627-cds4_at, X16298-cds2_at, X53096-cds1_at, X53096-cds2_at, X55185-cds1_x_at, X58434-cds1_at, X75439-cds1_at, X75439-cds3_at, Y07536-cds4_x_at, Y07739-cds1_at, Y07739-cds2_at, Y07740-cds1_at, Y09594-cds1_at, Y13600-cds4_at, Y13766-cds1_at, Y18637-cds2_at, Y18641-cds1_at, Y18653-cds1_x_at, WAN01417K-seg6_x_at, AP001553-cds19_x_at, AB009866-cds37_x_at, AF327733-cds5_at, and Z48003-cds1_at.

[0107] The tiling or parent sequences for virulence genes include, but are not limited to, AB037671-cds10_at, AB047089-cds4_at, AF053140-cds2_at, AF210055-cds1_at, AF282215-cds2_at, AF282215-cds4_at, AF288402-cds1-seg1_at, AF288402-cds1-seg2_at, AJ277173-cds1_at, M 7348-cds1_at, AJ309178-cds1_at, AJ309180-cds1_at, AJ309181-cds1_at, AJ309182-cds1_at, AJ309184-cds1_at, AJ309185-cds1_at, AJ309190-cds1_at, AJ311975-cds1_at, AJ311976-cds1_at, AJ311977-cds1_at, AY029184-cds1_at, U10927-cds10_at, M63917-cds1_at, U10927-cds1_at, WAN014A7P-seg1_at, U10927-cds11_at, U10927-cds12_at, U10927-cds13_at, U10927-cds2_at, U10927-cds3_at, U10927-cds4_at, U10927-cds5_at, U10927-cds6_at, U10927-cds7_at, U10927-cds8_at, U10927-cds9_at, M21319-cds1_at, WAN014A7P-seg2_at, WAN014A7Q-seg1_at, WAN014A7Q-seg2_at, WAN014A7R-seg1_at, WAN014A7Y-seg1_at, WAN014A7Y-seg2_at, WAN014FR8_at, WAN014FRP_at, WAN014FRU_at, WAN014FSL_at, WAN014FTD_at, WAN014FT0_at, WAN014FU6_at, WAN014FUA_at, WAN014FUF_at, WAN014FV5_at, WAN014FVP_at, WAN014FW9_at, WAN014FWE_at, WAN014FX0_at, WAN014FZ0_at, WAN014G2B_at, WAN014G2E_at, WAN014G2F_at, WAN014G32_at, WAN014G34_at, WAN014G3L_at, WAN014G3M_at, WAN014G3N_at, WAN014G3O_at, WAN014G5F_at, WAN014G7H_at, WAN014G7Q_at, WAN014G7Z_at, WAN014GAU_at, WAN014GAY_at, WAN014 GB1_at, WAN014 GB2_at, WAN014 GB3_at, WAN014GC9_at, WAN014GCB_at, WAN014GCM_at, WAN014GCN_at, WAN014GCP_at, WAN014GCR_at, WAN014GCT_at, WAN014GCV_at, WAN014GD6_at, WAN014GF4_at, WAN014GF6_at, WAN014GF9_at, WAN014GFA_at, WAN014GFB_at, WAN014GK5_at, WAN014GKK_at, WAN014GKN_at, WAN014GKO_at, WAN014GKP_at, WAN014GKQ_at, WAN014GL0_at, WAN014GMS_at, WAN014GQ9_at, WAN014GQG_at, WAN014GQJ_at, WAN014GSO_at, WAN014GSP_at, WAN014GST_at, WAN014GSW_at, WAN014GT1_at, WAN014GUS_at, WAN014GVE_at, WAN014GVO_at, WAN014GW1_at, WAN014GW6_at, WAN014GWE_at, WAN014GWN_at, WAN014GY1_at, WAN014GY3_at, WAN014H5U_at, WAN014HD0_at, WAN014HFQ_at, WAN014HGT_at, WAN014HGV_at, WAN014HGZ_at, WAN014HH1_at, WAN014HH2_at, WAN014HH7_at, WAN014HHS_at, WAN014HHY_at, WAN014HIS_at, WAN014HIT_at, WAN014HJ1_at, WAN014HJJ_at, WAN014HJU_at, WAN014HK2_at, WAN014HK3_at, WAN014HK4_at, WAN014HK5_at, WAN014HKA_at, WAN014HKY_at, WAN014HL5_at, WAN014HLM_at, WAN014HLS_at, WAN014HLW_at, WAN014HM2_at, WAN014HMA_at, WAN014HMJ_at, WAN014HML_at, WAN014HMQ_at, WAN014HMR_at, WAN014HMS_at, WAN014HMT_at, WAN014HQV_at, WAN014HQY_at, WAN014HQZ_at, WAN014HUM_at, WAN014HUN_at, WAN014HVC_at, WAN014HVM_at, WAN014HVN_at, WAN014HVW_at, WAN014HXE_at, WAN014HYX_at, WAN014I06_at, WAN014I2M_at, WAN014I2T_at, WAN014I3E_at, WAN014I40_at, WAN014I4K_at, WAN014I59_at, WAN014I5T_at, WAN014I6E_at, WAN014I7K-seg1_at, WAN014I7K-seg2_at, WAN014I7K-seg3_at, WAN014I7K-seg4_at, WAN014IMJ_at, WAN014IMK_at, WAN014INH_at, WAN014INI_at, WAN014IOV-seg1_at, WAN014IOW-seg2_at, WAN014IOX-seg3_at, WAN014IP2_at, WAN014IP3_at, WAN014IP5_at, WAN014IP6_at, WAN014IP7_at, WAN014IPC_at, WAN014IPD_at, WAN014IPE_at, WAN014IPF_at, WAN014IPG_at, WAN014IPH_at, WAN014IPI_at, WAN014IPJ_at, WAN014IPR_at, WAN014IPZ_at, WAN014IQ0_at, WAN014IQ1_at, WAN014IQ2_at, WAN014IQZ_at, WAN014IR0_at, WAN014IRW_at, WAN014ITM_at, WAN014ITN_at, WAN014ITV_at, WAN014ITW_at, WAN014IU3_at, WAN014IUC_at, WAN014IUU_at, WAN014IUV_at, WAN014IUW_at, WAN014IV4_at, WAN014IVU_at, WAN014IW4_at, WAN014IWK_at, WAN014IWL_at, WAN014IWM_at, WAN014IWN_at, WAN014IWO_at, WAN014IWP_at, WAN014IWQ_at, WAN01BQD3_at, WAN01BQGT_at, WAN01BQUP_at, WAN01BTJK_at, WAN01BUDN_at, WAN01BUDO_at, WAN01BUDP_at, WAN01BUE4_at, WAN01BUNR_at, WAN01BUXC_at, WAN01BV1J_at, WAN01BX2C_at, WAN01BYXJ_at, WAN01BYXK_at, WAN01CAT8_at, D83951-cds2_at, and WANO1CAZ2_at.

[0108] The tiling or parent sequences for antimicrobial resistance genes include, but are not limited to, AB037671-cds52_at, J03947-cds1_at, J04551-cds1_at, U19459-cds1_at, WAN014FWE_at, WAN014FZ0_at, WAN014FZG_at, WAN014FZI_at, WAN014G3R_at, WAN014G8O_at, WAN014 GBD_at, WAN014GCI_at, WAN014GCU_at, WAN014GNE_at, WAN014GOC_at, WAN014GUL_at, WAN014GWR_at, WAN014GYZ_at, WAN014HA5_at, WAN014HG1_at, WAN014HGN_at, WAN014HIL_at, WAN014HIQ_at, WAN014HIR_at, WAN014HJ1_at, WAN014HJ2_at, WAN014HJ3_at, WAN014HJ6_at, WAN014HJC_at, WAN014HLT_at, WAN014HMW_at, WAN014HNL_at, WAN014HSN_at, WAN014HSO_at, WAN01416F_at, WAN014IRB_at, WAN014ISL_at, WAN014ITG_at, WAN01BQM2_at, WAN01BQX0_at, WAN01BTG6_at, WAN01C5GK_at, and U82085-cds1_at.

[0109] The tiling or parent sequences for genes encoding ribosomal proteins include, but are not limited to, AF327733-cds5_at, WAN014A7W-3_at, WAN014A7W-5_at, WAN014A7W-M_at, WAN014A7X-3_at, WAN014A7X-5_at, WAN014A7X-M_at, WAN014A81-3_at, WAN014A81-5_at, WAN014A81-M_at, WAN014FRA_at, WAN014FRC_at, WAN014FRD_at, WAN014FRF_at, WAN014FT7_at, WAN014FT9_at, WAN014FXU_at, WAN014FYL_at, WAN014G6L_at, WAN014GES_at, WAN014GUP_at, WAN014GVF_at, WAN014GVM_at, WAN014H0O_at, WAN014H1V_at, WAN014H29_at, WAN014H₂C_at, WAN014H2D_at, WAN014H₂F_at, WAN014H2O_at, WAN014H2Q_at, WAN014H2S_at, WAN014H6M_at, WAN014H7Z_at, WAN014H85_at, WAN014H8Z_at, WAN014H9O_at, WAN014HBQ_at, WAN014HBR_at, WAN014HBV_at, WAN014HDA_at, WAN014HDC_at, WAN014HKO_at, WAN014HVK_at, WAN014I0S_at, WAN014I2E_at, WAN014I2L_at, WAN014I3I_at, WAN014I4A_at, WAN014I4I_at, WAN014I58_at, WAN014I5B_at, WAN014I5K_at, WAN014I5O_at, WAN014I5Q_at, WAN014I61_at, WAN014I63_at, WAN014I65_at, WAN014I67_at, WAN014I69_at, WAN014I6B_at, WAN014I6D_at, WAN014I6G_at, WAN014I6I_at, WAN014I6K_at, WAN014I6L_at, WAN014I6O_at, WAN014I6S_at, WAN014I6T_at, WAN014I6W_at, WAN014I6Y_at, and WAN014I70_at.

[0110] Table 4 lists exemplary tiling or parent sequences for multilocus sequence typing (MLST) genes, leukotoxin genes, and agrB genes.

TABLE 4
Tiling Sequences for MLST, Leukotoxin, and AgrB Genes

| MLST Gene | Leukotoxin | AgrB |
|---|---|---|
| WAN014GB6_at | WAN014GAU_at | AF210055-cds1_at |
| WAN014GV5_at | WAN014GAY_at | AF282215-cds2_at |
| WAN014H4H_at | WAN014GB3_at | WAN014IPZ_at |
| WAN014H91_at | WAN014HH1_at | WAN014IQ0_at |
| WAN014HDV_at | WAN014HH2_at | WAN014IQ1_at |
| WAN014I0O_at | WAN014HL5_at | WAN014IQ2_at |
| WAN014I60_at | WAN014HMJ_at | |
| | WAN014HML_at | |
| | WAN014HUM_at | |
| | WAN014IUC_at | |

### Example 2

### Analysis of the Accuracy of the Nucleic Acid Array of Example 1

[0111] An analysis was conducted to confirm the performance of the nucleic acid array of Example 1 with respect to seven sequenced Staphylococcus aureus genomes, i.e., COL, N315, Mu50, EMRSA-16, MSSA-476, 8325, and MW2. Each tiling sequence in Table C was derived from the transcript(s) or intergenic sequence(s) of one or more Staphylococcus aureus strains. As used herein, if all of the oligonucleotide probes for a tiling sequence are present in the genome of a Staphylococcus aureus strain, then the tiling sequence is theoretically predicted to be “present” in the genome. The theoretical predictions were compared to the actual results of DNA hybridization experiments. Table 5 compares the results of the theoretical predictions for the seven sequenced Staphylococcus aureus strains to the results of actual hybridization experiments using the nucleic acid array of Example 1.

TABLE 5
Comparison of Theoretical and Actual Calls

| | Number of Theoretical | Number of Theoretical Presents |
|---|---|---|
| Strain | Present Calls | Called Absent or Marginal |
| EMRSA-16 | 3,570 | 9 |
| MSSA-476 | 4,275 | 6 |
| 8325 | 4,394 | 7 |
| Mu50 | 6,214 | 6-7 |
| N315 | 6,218 | 8 |
| MW2 | 4,140 | 6 |
| COL | 4,380 | 251 |

[0112] Among the seven sequenced Staphylococcus aureus strains, six strains (except COL) showed fewer than 0.25% “absent” or “marginal” calls compared to the predictions. Predicted “present” calls were higher for N315 and Mu50 because the intergenic regions on the nucleic acid array were derived from N315 only. The genome of Mu50 is similar to that of N315.

[0113] COL (NARSA 0) was found to have 251 tiling sequences called “absent” or “marginal” but theoretically predicted to be “present.” However, when COL was obtained from other sources, it was found to behave as expected. See Table 6. NARSA 0 was the original strain tested. NARSA 1 and NARSA 2 are derived from individual colonies of a second sample of the COL strain from NARSA. The number of “absent” and “marginal” calls for NARSA 1 was similar to that of NARSA 0, while NARSA 2 has only few “absent” or “marginal” calls. Likewise, other COL colonies (Tomasz, Foster, and Novick) have few “absent” or “marginal” calls. This result suggested that the NARSA O and NARSA 1 colonies were contaminated with non-COL strain(s). This was subsequently confirmed by the strain repository. The NARSA 1 strain was the contaminant, and the NARSA 0 strain included a mixture of two strains, COL and NARSA 1. Thus, the nucleic acid array of Example 1 can be used to detect strain contamination.

TABLE 6
Number of Theoretical Presents Called Absent or Marginal
for Different COL Colonies

| | Number of Theoretical Presents |
|---|---|
| Source | Called Absent or Marginal |
| NARSA 0 | 251 |
| NARSA 1 | 230 |
| NARSA 2 | 6 |
| Tomasz | 5 |
| Foster | 5 |
| Novick | 5 |

[0114] The nucleic acid array of Example 1 also includes a substantial number of false positive probe sets which produce significant cross-hybridization of alleles. Table 7 shows excess “present” calls for each strain listed in Table 1 as well as strain MW2. Cross hybridization adds considerable utility for strain typing. This is because the signal obtained in a DNA hybridization experiment is expected to be proportional to the degree of sequence similarity to the probe(s). Thus, the nucleic acid array of Example 1 can potentially distinguish strains with perfectly matched sequence from strains containing single or multiple nucleotide substitutions for any particular gene.

TABLE 7
Excess “Present” Calls

| Strain | Excess Present Calls |
|---|---|
| COL | 2,301 |
| MRSA | 2,664 |
| MSSA | 2,244 |
| 8325 | 2,075 |
| MW2 | 2,336 |
| Mu50 | 675 |
| N315 | 545 |

### Example 3

### Sample Preparation for Monitoring Gene Expression

[0115] Total Staphylococcus aureus RNA is isolated from a control condition or a test condition. Under the test condition, bacterial cells have been either differentially treated or have a divergent genotype. cDNA is synthesized from total RNA of the control or test sample as follows. 10 μg total RNA is incubated at 70° C. with 25 ng/μl random hexamer primers for 10 min followed by 25° C. for 10 min. Mixtures are then chilled on ice. Next, 1×cDNA buffer (Invitrogen), 10 mM DTT, 0.5 mM dNTP, 0.5 U/μl SUPERase-In (Ambion), and 25U/μl SuperScript II (Invitrogen) are added. For cDNA synthesis, mixtures are incubated at 25° C. for 10 min, then 370C for 60 min, and finally 42° C. for 60 min. Reactions are terminated by incubating at 70° C. for 10 min and are chilled on ice. RNA is then chemically digested by adding 1N NaOH and incubation at 65° C. for 30 min. Digestion is terminated by the addition of 1N HCl. cDNA products are purified using the QIAquick PCR Purification Kit in accordance with the manufacturer's instructions. Next, 5 μg of cDNA product is fragmented by first adding 1× One-Phor-All buffer (Amersham Pharmacia Biotech) and 3U DNase I (Amersham Pharmacia Biotech) and then incubating at 37° C. for 10 min. DNase I is then inactivated by incubation at 98° C. for 10 min. Fragmented cDNA is then added to 1× Enzo reaction buffer (Affymetrix), 1×CoCl₂, Biotin-ddUTP and 1× Terminal Transferase (Affymetrix). The final concentration of each component is selected according to the manufacturer's recommendations. Mixtures are incubated at 37° C. for 60 min and then stopped by adding 2 μl of 0.5 M EDTA. Labeled fragmented cDNA is then quantitated spectrophotometrically and 1.5 μg labeled material is hybridized to the nucleic acid array at 45° C. for 15 hr.

[0116] Staphylococcus aureus mRNA or cRNA can also be used for nucleic acid hybridization. Staphylococcus aureus mRNA or cRNA can be enriched, fragmented, and labeled according to the prokaryotic sample and array processing procedure described in Genechip® Expression Analysis Technical Manual (Affymetrix, Inc. 2002).

### Example 4

### Sample Preparation for Genotyping Staphylococcus aureus

[0117] Staphylococcus aureus strains are grown overnight in a 2-ml trypticase soy broth culture. Cells are harvested and lysed in a Bio101 FastPrep bead-beater (2×20 s cycles). Chromosomal DNA is prepared using the Qiagen DNeasy Tissue kit following the manufacturer's instructions. Approximately 10 μg of DNA is made up to a 60 μl volume in nuclease free water. 20 μl 1N NaOH is added to remove residual RNA and the mixture is incubated at 65° C. for 30 min. 20 μl of 1N HCl is added to neutralize the reaction. The DNA is concentrated by ethanol precipitation using ammonium acetate and resuspended in a 47 μl volume followed by a 5 min boiling step to denature the double-stranded DNA. The DNA is quantified by reading the absorbance at 260 nm. 40 μl of DNA is fragmented by treatment with DNase (0.6 U/μg DNA) in the presence of 1× One-Phor-All buffer (Amersham Pharmacia) in a total volume of 50 μl for 10 min at 37C followed by a 10 min incubation at 98° C. to inactivate the enzyme. 39 μl of fragmented DNA is end-labeled with biotin using the Enzo Bioarray Terminal Labeling kit (Affymetrix). 1.5 μg of labeled DNA is hybridized overnight to the custom nucleic acid array of Example 1 in a mixture containing Oligo B2 (Affymetrix), herring sperm DNA, BSA and a standard curve reagent.

### Example 5

### Hierarchical Clustering of Imperfect ORFS

[0118] DNA samples were prepared from different Staphylococcus aureus strains or isolates according to the method described in Example 4. The samples were then individually hybridized to the custom nucleic acid array of Example 1. The hybridization signals were normalized by dividing each gene's signal by the median of array intensity and the median of gene intensity across all arrays. FIG. 1 shows the color scale of each gene's distance from the mean value for that gene over all arrays. “Present” is denoted in red and “absent” in blue. Yellow indicates similar signals from all strains for a particular gene. FIG. 2 illustrates an unsupervised hierarchical clustering using normalized signals of 2,059 “imperfect ORFs.” “Imperfect ORFs” were selected for the basis of the clustering because they provide more variation than the “perfect” ORFs which have high sequence identities among all genomes in Table 1. The intergenic sequences were omitted because they were derived from a single strain, and might have biased the clustering algorithm.

[0119] Clustering was performed on 41 Staphylococcus aureus strains/clones, including the seven sequenced genomes, the variant COL strains, 21 strains from the Centers for Disease Control and Prevention, and 6 additional strains from Wyeth's collection. Some were done in duplicate. These strains/clones are listed consecutively along the horizontal axis of FIG. 2. The same set of strains/clones in the same order is used for the horizontal axis of FIGS. 3-7.

[0120] FIG. 2 shows that different strains exhibit distinguishable hybridization patterns. Isolates from the same strain, such as Col-Novick, Col-Foster, Col-Tomasz, and Col NRSA2 (i.e., NARSA 2), show similar hybridization patterns. Thus, the nucleic acid arrays of the present invention can be used for typing or identifying different Staphylococcus aureus strains. As appreciated by those skilled in the art, the 2,059 “imperfect ORFs” can be replaced by other genes to generate similar strain-specific hybridization patterns. The nucleic acid arrays of the present invention can be used to generate the complete genotype of a bacterial strain in one step.

### Example 6

### MLST and Virulence Gene Profiles

[0121] Multilocus sequence typing (MLST) is a method of characterizing bacterial isolates on the basis of the sequence fragments of seven housekeeping genes. See M. C. Enright et al., JOURNAL OF CLINICAL MICROBIOLOGY, 38: 1008-1015 (2000). These seven genes are acetyl-CoA acetyltransferase, carbamate kinase, phosphotransacetylase, shikimate 5-dehydrogenase, triosephosphate isomerase, guanylate kinase, and glycerol kinase. The tiling sequences for these seven genes are listed in Table 4. Each of these seven genes has many alleles, and different isolates are highly unlikely to have the same allelic profile by chance. FIG. 3 shows the normalized hybridization signals of the seven MLST genes. The samples were prepared using the method described in Example 4. The dendrogram tree and the horizontal axis in FIG. 3 are identical to those in FIG. 2. The yellow color indicates that a gene is present in all strains. FIG. 3 captured the conserved regions of the MLST genes. Probe sets can also be designed to capture the more variable regions in the MLST genes.

[0122] FIG. 4 illustrates the profiles of 259 virulence genes. The virulence genes in FIG. 4 include those that are present in all Staphylococcus aureus strains (yellow), and those that are present in some strains (red) but absent in others (blue). Virulence gene profiles can be used to associate particular strains with particular Staphylococcus aureus symptoms, as specific virulence genes are known to be associated with particular manifestations of disease.

### Example 7

### Panton-Valentine Leukocidin and AgrB Gene Profiles

[0123] Studies have shown that certain community-acquired methicillin-resistant Staphylococcus aureus (CA-MRSA) strains contain the Panton-Valentine leukocidin (PVL) genes. See P. Dufour et al., CID 35: 819-824 (2002). The PVL genes encode virulence factors associated with primary skin infections (e.g., furunculosis) and severe necrotizing pneumonia. The combination of methicillin-resistance and the PVL determinant creates superadapted Staphylococcus aureus strains. FIG. 5 shows the profiles of PVL genes and other leukotoxin genes. The samples were prepared using the method described in Example 4. The horizontal axis in FIG. 5 is identical to that in FIG. 2, and represents a variety of Staphylococcus aureus strains/clones. PVL genes (lukF-PV and lukS-PV) were present in only a small subset of strains (red). Other leukotoxins (such as lukF, lukM, lukS, lukD, hlgB, hlgC, and hlgA) were present in most or all strains that were being tested. It has been reported that lukE-lukD genes do not appear to be associated with any specific type of infection. See P. Dufour et al., supra.

[0124] FIG. 6 depicts the association of PVL with two types of agrB. The top row in FIG. 6 shows the profile of the constant N-terminal domain of agrB, which is present in all strains. The next five rows are qualifiers interrogating four agrB types. Type 1 is itself variable and separated into two clusters. PVL genes (lukF-PV and lukS-PV) are associated with agrB types 1 and 3. AgrB encodes a transmembrane protein which has proteolytic activity and can act on a precursor quorum sensing autoinducing peptide.

### Example 8

### Exfoliative Toxin Gene Profiles

[0125] Staphylococcal Scalded Skin Syndrome (SSSS) is a syndrome of acute exfoliation of the skin. SSSS is also known as Ritter von Ritterschein disease in newborns, staphylococcal epidermal necrolysisis, Ritter disease, or Lyell disease. It is caused by an exfoliative toxin. At least two types of exfoliative toxin are known—namely, type A (“eta”) and type B (“etb”). Type A is more prevalent in the United States. FIG. 7 illustrates the profiles of eta and etb in various Staphylococcus aureus strains/clones. The horizontal axis in FIG. 7 is identical to that in FIG. 2, and represents the same set of Staphylococcus aureus strains/clones in the same order. The “eta,” “similar to exfoliative toxin,” and “etb” genes correspond to qualifiers WAN014HKY, WAN014GVE, and M17348-cds, respectively.

[0126] As shown by the bottom row in FIG. 7, strains Clp7, Clp8, and Clp9 contain the etb gene (red). Etb gene is absent from other strains. Strains Clp7, Clp8, and Clp9 were isolated from a single patient over the course of one week. These strains cluster closely together. See FIG. 2 and the dendrogram tree.

[0127] As shown by the top row in FIG. 7, strain C269 contains the eta gene (red). The dendrogram tree shows that strains Clp7, Clp8, and Clp9 are closely related to strain C269.

[0128] The middle row in FIG. 7 illustrates the profile of a gene annotated as “similar to exfoliative toxin” in the TIGR annotation of the COL genome. This gene is present in all strains, suggesting it is not associated with SSSS. FIG. 7 indicates that the exfoliative toxin genes are rare among Staphylococcus aureus strains or isolates.

### Example 9

### Microarray-Based Analysis of the Staphylococcus aureus σ^{B}-Regulon

[0129] Microarray-based analysis of the transcriptional profiles of the genetically distinct Staphylococcus aureus strains COL, GP268, and Newman indicate that a total of 251 ORFs are influenced by σ^{B} activity. While σ^{B} was found to positively control 198 genes by a factor of ≧2 in at least two out of the three genetic lineages analyzed, 53 ORFs were repressed in the presence of σ^{B}. Gene products that were found to be influenced by σ^{B} are putatively involved in all manner of cellular processes, including cell envelope biosynthesis and turnover, intermediary metabolism, and signalling pathways. Most of the genes/operons identified as upregulated by σ^{B} were preceded by a nucleotide sequence that resembled the σ^{B} consensus promoter sequence of Bacillus subtilis. A conspicuous number of virulence-associated genes were identified as regulated by σ^{B} activity, with many adhesins upregulated and prominently represented in this group, while transcription of various exoproteins and toxins were repressed. The data presented in this Example suggest that the σ^{B} of S. aureus controls a large regulon, and is an important modulator of virulence gene expression that might act conversely to RNAIII, the effector molecule of the agr locus. This alternative transcription factor may be of importance for the invading pathogen to fine-tune its virulence factor production in response to changing host environments. Therefore, modulation of the expression or protein activity of σ^{B} or the genes downstream thereto may be used to fight or control Staphylococcus aureus infections.

Introduction

[0130] Transcription of DNA into RNA is catalyzed by RNA polymerase. In bacteria, one RNA polymerase generates nearly all cellular RNAs, including ribosomal, transfer, and messenger RNA. This enzyme consists of six subunits, α₂ββ′ωσ, with α₂ββ′ω forming the catalytically competent RNA polymerase core enzyme (E). The core is capable of elongation and termination of transcription, but it is unable to initiate transcription at specific promoter sequences. The σ subunit, which when bound to E forms the holoenzyme (E-σ), directs the multi-subunit complex to specific promoter elements and allows efficient initiation of transcription. Therefore, C factors provide an elegant mechanism in eubacteria to allow simultaneous transcription of a variety of genetically unlinked genes, provided all these genes share the same promoter specificities.

[0131] In addition to the housekeeping sigma subunit, σ⁷⁰ or σ^{A}, most bacteria produce one or more additional σ subunits, termed “alternative σ factors”, which direct the respective E-σ complex to distinct classes of promoters that contain alternative σ factor-specific sequences. At least six alternative σ factors are produced by the enteric bacterium Escherichia coli. Genomic sequence analysis suggests that many alternative σ factors also exist in a number of other pathogenic species such as Treponema palladium (4 alternative σ factors), Vibro cholerae (7 alternative σ factors), Mycobacterium tuberculosis (12 alternative σ factors), and Pseudomonas aeruginosa (23 alternative σ factors). Two alternative σ factors, σ^{B} and σ^{H}, have been identified in Staphylococcus aureus.

[0132] The S. aureus alternative transcription factor σ^{B} has been shown to be involved in the general stress response. σ^{B} also directly or indirectly influences the expression of a variety of genes, including many associated with virulence, such as α-hemolysin, clumping factor, coagulase, fibronectin-binding protein A, lipases, proteases, and thermonuclease. In addition, σ^{B} has been shown to influence the expression of several global virulence factor regulators including, SarA, SarS (syn. SarH1), and RNAIII. However, no effect of σ^{B} on S. aureus pathogenicity has been demonstrated in any in vivo model analyzed to date.

[0133] Besides its function in regulating virulence determinants, σ^{B} may play a role in mediating antibiotic resistance. Inactivation of the gene encoding for σ^{B}, sigB, in the homogeneously methicillin-resistant strain COL increases its susceptibility to methicillin, while mutations within the rsbU-defective strain BB255, leading to σ^{B}-hyperproduction, are associated with an increase in glycopeptide resistance. Moreover, σ^{B} was shown to affect pigmentation, to increase resistance to hydrogen peroxide and UV-light, as well as to promote microcolony formation and biofilm production.

[0134] The genetic organization of the S. aureus sigB operon closely resembles that of the distal part of the well-characterized homologous operon of the soil-borne gram-positive bacterium Bacillus subtilis. DNA microarray technology-based analysis of the general stress response in B. subtilis identified 127 genes controlled by σ^{B}, and heat shock studies suggest the σ^{B} regulon of this organism to comprise up to 200 genes. Because S. aureus σ^{B} seems to be a pleotrophic regulator that plays a role in a number of clinically relevant processes, a number of investigators have begun characterizing the σ^{B} regulon. Proteomic approaches have identified 27 S. aureus cytoplasmic proteins and one extracellular protein to be under the positive control of σ^{B}, while 11 proteins were found to be repressed by the factor, indicating that the σ^{B} regulon of this pathogen may comprise a much higher number of genes than known to date.

[0135] In this Example, DNA microarray-based data from three distinct genetic backgrounds were obtained. These data suggests that the S. aureus σ^{B} influences the expression of at least 251 genes. 198 of these genes are positively controlled by σ^{B}, while 53 genes are repressed in presence of the alternative a factor.

Material and Methods

[0136] Bacterial strains, media, and growth conditions: Strains and plasmids used in this Example are listed in Table 8. S. aureus was routinely cultured on sheep blood agar (SBA) or Luria-Bertani (LB) medium with rotary agitation at 200 rpm, at 35° C. Exogenous glucose was not added to the growth medium. When included, antibiotics were used at the following concentrations: ampicillin, 50 mg liter⁻¹; chloramphenicol, 40 mg liter⁻¹.

TABLE 8
Strains and Plasmids

| Strain or plasmid: | Relevant Genotype and Phenotype:^{a} | Reference: |
|---|---|---|
| Strains | | |
| E. coli | | |
| XL1Blue | recA1 endA1 gyrA96 thi-1 hsdR17 | Stratagene |
| | supE44 relA1 lac [F′ proAB | |
| | lacl^{Q} ZΔM15 Tn10 (Tc^{r})] | |
| S. aureus | | |
| BB255 | rsbU; low σ^{B}-activity | |
| COL | mec, high-Mc^{r} clinical isolate; Mc^{r} Tc^{r} | |
| Newman | Clinical isolate, high level of clumping | |
| | factor (ATCC 25904) | |
| IK181 | BB255 ΔrsbUVWsigB; Em^{r} | |
| IK183 | COL ΔrsbUVWsigB; Em^{r} Mc^{r} Tc^{r} | |
| IK184 | Newman ΔrsbUVWsigB; Em^{r} | |
| GP268 | BB255 rsbU⁺; Tc^{r} | |
| Plasmids | | |
| pAC7 | Cm^{r}, expression plasmid containing the | |
| | P_{BAD} promoter and the araC gene (68) | |
| pAC7-sigB | Cm^{r}, 767-bp PCR fragment of the sigB | |
| | ORF from strain COL into pAC7 | |
| pSB40N | Ap^{r}, promoter probe plasmid | |
| pSA0455p | Ap^{r}, 360-bp PCR fragment covering the | |
| | promoter region of the COL homologue of | |
| | ORF N315-SA0455 into pSB40N | |

^{a}Abbreviations are as follows: Ap^{r}, ampicillin resistant; Cm^{r}, chloramphenicol resistant; Em^{r}, erythromycin resistant; Mc^{r}, methicillin resistant; Tc^{r}, tetracycline resistant.

[0137] Sampling, RNA isolation, and transcriptional profiling Overnight cultures of S. aureus were diluted 1:100 into fresh pre-warmed LB medium and grown as described above. For experiment one, cultures were grown to an optical density at 600 nm (OD₆₀₀) of 2, at which time RNA samples were prepared as described below. For experiment two, cultures were grown for 9 h, and sample volumes corresponding to 10¹⁰ cells were removed after 1, 3, 5, and 8 h of growth. For RNA isolation, samples were centrifuged at 7,000×g at 4° C. for 5 min, the culture supernatants removed, and the cell-sediments snap-frozen in a dry ice-alcohol mixture. Frozen cells were resuspended in 5 ml of ice-cold acetone/alcohol (1:1), and incubated for 5 min on ice. After centrifugation at 7,000×g and 4° C. for 5 min, cells were washed with 5 ml TE buffer (10 mM TRIS, 1 mM EDTA [pH 8]), and resuspended on ice in 900 μl TE. The cell suspensions were transferred to 2-ml Lysing Matrix B tubes (Bio 101, Vista, Calif.), and the tubes were shaken in an FP120 reciprocating shaker (Bio 101) two times at 6,000 rpm for 20 s. After centrifugation at 14,000×g at 4° C. for 5 min, the supernatants were used for RNA isolation using the RNeasy Midi system (Qiagen, Inc., Valencia, Calif.) according to the manufacturer's recommendations. To remove any contaminating genomic DNA, approximately 125 μg of total RNA was treated with 20 U of DNase I (Amersham Biosciences, Piscataway, N.J.) at 37° C. for 30 min. The RNA was then purified with an RNeasy mini column (Qiagen) following the manufacturer's cleanup protocol. Integrity of the RNA preparations was analyzed by electrophoresis in 1.2% agarose-0.66 M formaldehyde gels. Reverse transcription-PCR, cDNA fragmentation, cDNA terminal labeling, and hybridization of approximately 1.5 μg of labeled cDNA to the nucleic acid arrays of Example 1 were carried out in accordance with the manufacturer's (Affymetrix Inc., Santa Clara, Calif.) instructions for antisense prokaryotic arrays. The nucleic acid arrays were scanned using the Agilent GeneArray laser scanner (Agilent Technologies, Palo Alto, Calif.). Data for biological duplicates were normalized and analyzed by using GeneSpring Version 5.1 gene expression software package (Silicon Genetics, Redwood City, Calif.). Genes that were considered to be upregulated in a σ^{B}-dependent manner were found to demonstrate >2 fold increase in RNA titers in σ^{B} producing conditions in comparison to isogenic non-σ^{B} producing cells. In addition these genes were considered to be “present” by Affymetrix algorithums in the σ^{B} producing strains and demonstrated a significant difference in expression (T-test, with a p-cutoff of at least 0.05). Genes considered downregulated in a σ^{B} dependent manner demonstrated at least a 2-fold reduction in RNA transcript titers in the wildtype as opposed to their isogenic σ^{B}-mutant background and were both considered “present” by Affymetrix criteria in mutant cells and where characterized as having significantly differing amounts of transcripts based on T-tests with a p-cutoff of at least 0.05.

[0138] Construction of plasmids pAC7-sigB and pSA0455p: A DNA fragment constituting the sigB open reading frame (ORF) of S. aureus COL was amplified by PCR using an upstream primer containing a Nde I site and a downstream primer containing a Hind III site. The resulting PCR product was digested with Nde I and Hind III and cloned into plasmid pAC7 to obtain pAC7-sigB, which was subsequently transformed by electroporation into E. coli XL1Blue (Stratagene, La Jolla, Calif.). Sequence analysis and comparison confirmed the identity of the construct. For pSA0455p, a DNA fragment representing 360-bp of the N315-SA0455 promoter region of COL was generated by PCR using an upstream primer containing a Bam HI site and a downstream primer containing an Xho I site. The PCR product was digested with Bam HI and Xho I and cloned into promoter probe plasmid pSB40N to obtain pSA0455p. Sequence analysis confirmed the identity of the insert. Plasmid pSA0455p was transformed into E. coli XL1Blue containing either compatible plasmids pAC7-sigB or pAC7.

[0139] High-resolution S1 nuclease mapping: For RNA isolation from recombinant E. coli cultures, strains were grown at 37° C. in LB supplemented with ampicillin and chloramphenicol to an OD₆₀₀ of 0.3. At this growth stage, expression of S. aureus sigB was induced by adding 0.0002% (w/v) arabinose, and cultivation was continued for additional 3 h. Isolation of total RNA and high-resolution S1 nuclease mapping were performed as described by Kormanec, METHODS MOL. BIOL., 160: 481-494 (2001). A 450-bp DNA fragment covering the SA0455 promoter region was amplified by PCR from pSA0455p, using a universal oligonucleotide primer labeled at the 5′ end with [γ-³²P]ATP, and mut80 primer. 40 μg of RNA were hybridized to 0.02 pmol of the 5′ end-labeled DNA fragment (approx. 3×10⁶ cpm/pmol of probe), and treated with 100 units of S1-nuclease. The protected DNA fragment was analyzed on a DNA sequencing gel together with G+A and T+C sequencing ladder derived from the end-labeled probe.

Results and Discussion

[0140] Identification of σ^{B}-regulated genes: Proteomic approaches and computational analyses, based on the method described by Petersohn, et al., J. BACTERIOL. 181: 5718-5724 (1999), indicate that the σ^{B} regulon of S. aureus comprises many more genes than described to date, suggesting that the regulon may be as large as that of the well-characterized homologous regulon of B. subtilis. In an effort to better define the S. aureus CB regulon, DNA microarray studies were preformed in three genetically distinct backgrounds. DNA microarray technology is a powerful tool to analyze the transcription profiles of the whole genome, provided that all genes are represented on the respective microarray. There is increasing evidence that extensive variation in gene content exists among strains of many pathogenic bacterial species. A genomic comparison of 36 S. aureus strains of divergent clonal lineage identified a very large genetic variation to be present in this pathogen, with approximately 22% of the genome being dispensable. The S. aureus nucleic acid array of Example 1 study includes probes that monitor the expression of virtually all ORFs from six S. aureus genomes, making it an ideal tool to identify almost all transcriptional changes that are caused by the alternative transcription factor σ^{B}.

[0141] Two different approaches were chosen in order to identify σ^{B}-dependent genes. In experiment one, the transcriptional profiles of three genetically distinct S. aureus strains harboring an intact sigB operon (COL, Newman, and GP268), and their isogenic ΔrsbUVWsigB mutants were analyzed. For this purpose, total bacterial RNA was obtained from cells that were grown to late exponential growth phase (OD₆₀₀=2), a time point at which σ^{B} has been shown to be active. Comparison of the transcriptional profiles of the sigB⁺ strains to their respective isogenic sigB mutants identified 229 ORFs to be influenced by σ^{B} by a factor of more than two-fold in at least two out of the three genetic backgrounds analyzed (Tables 9 and 10). While the majority of ORFs were positively influenced by σ^{B} (Table 9), as expected for a σ factor, a number of ORFs that were repressed in presence of σ^{B} were also identified (Table 10). Thirty-seven of the genes identified were shown to be regulated by σ^{B} in S. aureus. Twenty-three genes were identified to be influenced by σ^{B} in B. subtilis. This high correlation indicates that the microarray methodology used accurately identified the genes belonging to the σ^{B} regulon of the strains analyzed.

TABLE 9
Genes Upregulated by σ^{B}

| N315 | N315 | | Fold change^{b} | | | |
|---|---|---|---|---|---|---|
| ORF No.^{a} | gene^{a} | N315 description^{a} | COL | Newman | GP268 | σ^{B} consensus^{c,d} |
| N315-SA1984 | asp23 | Alkaline shock protein 23 | Up | Up | Up | yes |
| CAB75732.1 | bbp | Bone sialoprotein-binding | 3.2 | 4.5 | 4.8 | |
| | | protein Bbp | | | | |
| N315-SA2008 | budB | α-acetolactate synthase | Up | Up | Up | yes^{d} |
| N315-SA0144 | cap5A | Capsular polysaccharide | Up | Up | 12.8 | |
| | | synthesis enzyme Cap5A | | | | |
| N315-SA0145 | cap5B | Capsular polysaccharide | Up | Up | 10.8 | |
| | | synthesis enzyme Cap5B | | | | |
| N315-SA0146 | cap5C | Capsular polysaccharide | Up | Up | 8.6 | |
| | | synthesis enzyme Cap8C | | | | |
| N315-SA0147 | cap5D | Capsular polysaccharide | Up | Up | 7.3 | |
| | | synthesis enzyme Cap5D | | | | |
| N315-SA0148 | cap5E | Capsular polysaccharide | Up | Up | 7.5 | |
| | | synthesis enzyme Cap8E | | | | |
| N315-SA0149 | cap5F | Capsular polysaccharide | Up | Up | 7.5 | |
| | | synthesis enzyme Cap5F | | | | |
| N315-SA0150 | cap5G | Capsular polysaccharide | Up | Up | 6.8 | |
| | | synthesis enzyme Cap5G | | | | |
| N315-SA0151 | cap5H | Capsular polysaccharide | Up | Up | 5.1 | |
| | | synthesis enzyme Cap5H | | | | |
| N315-SA0152 | cap5I | Capsular polysaccharide | Up | Up | 5.7 | |
| | | synthesis enzyme Cap5I | | | | |
| N315-SA0153 | cap5J | Capsular polysaccharide | Up | Up | 3.5 | |
| | | synthesis enzyme Cap5J | | | | |
| N315-SA0155 | cap5L | Capsular polysaccharide | Up | Up | 5.1 | |
| | | synthesis enzyme Cap5L | | | | |
| N315-SA0156 | cap5M | Capsular polysaccharide | Up | Up | 4.5 | |
| | | synthesis enzyme Cap5M | | | | |
| N315-SA0157 | cap5N | Capsular polysaccharide | 2.7 | Up | 5.2 | |
| | | synthesis enzyme Cap5N | | | | |
| N315-SA0158 | cap5O | Capsular polysaccharide | 2.6 | Up | 4.2 | |
| | | synthesis enzyme Cap8O | | | | |
| CAA79304 | clfA | Clumping factor A | 35.7 | Up | 7.8 | yes |
| N315-SA2336 | clpL | ATP-dependent Clp proteinase | 17.3 | 13.2 | Up | yes |
| | | chain ClpL | | | | |
| N315-SA2349 | crtM | Squalene desaturase | Up | Up | Up | yes^{d} |
| N315-SA2348 | crtN | Squalene synthase | Up | Up | Up | yes^{d} |
| N315-SA1452 | csbD | HP, sigmaB-controlled gene | 37.0 | Up | Up | yes |
| | | product CsbD (Csb8) | | | | |
| COL-SA1872 | epiE | Epidermin immunity protein | Up | Up | Up | yes^{d} |
| | | EpiE | | | | |
| COL-SA1873 | epiF | Epidermin immunity protein | Up | Up | Up | yes |
| | | EpiF | | | | |
| N315-SA1634 | epiG | Epidermin immunity protein | Up | Up | Up | yes^{d} |
| | | EpiG | | | | |
| N315-SA2260 | fabG | HP, similar to glucose 1- | Up | Up | Up | yes |
| | | dehydrogenase | | | | |
| N315-SA1901 | fabZ | (3R)-hydroxymyristoyl-[acyl | 2.2 | 5.1 | 2.0 | yes^{d} |
| | | carrier protein] dehydratase | | | | |
| N315-SA2125 | hutG | HP, similar to | 3.7 | 14.6 | 2.9 | yes |
| | | formiminoglutamase | | | | |
| N315-SA1505 | lysP | Lysine-specific permease | 2.4 | 7.9 | 2.0 | |
| N315-SA1962 | mtlA | PTS system, mannitol specific | 8.5 | 17.2 | Up | yes^{d} |
| | | IIA component | | | | |
| N315-SA1963 | mtlD | Mannitol-1-phosphate 5- | 8.2 | Up | Up | yes^{d} |
| | | dehydrogenase | | | | |
| N315-SA1902 | murA | UDP-N-acetylglucosamine 1- | 2.2 | 5.1 | 2.0 | yes^{d} |
| | | carboxyvinyl transferase 1 | | | | |
| N315-SA0547 | mvaK1 | Mevalonate kinase | 2.4 | 4.5 | 1.3 | yes |
| N315-SA0548 | mvaD | Mevalonate diphosphate | 3.3 | 7.3 | 1.8 | yes^{d} |
| | | decarboxylase | | | | |
| N315-SA0549 | mvaK2 | Phosphomevalonate kinase | 3.7 | 10.6 | 2.2 | yes^{d} |
| N315-SA1987 | opuD | Glycine betaine transporter | Up | Up | Up | yes |
| | | opuD homologue | | | | |
| N315-SA1871 | rsbV | Anti-σ^{B} factor antagonist | Up | Up | Up | yes |
| N315-SA1870 | rsbW | Anti-σ^{B} factor | Up | Up | Up | yes^{d} |
| N315-SA0573 | sarA | Staphylococcal accessory | 2.9 | 3.8 | 2.0 | yes |
| | | regulator A (Csb35) | | | | |
| N315-SA0108 | sarS | Staphylococcal accessory | 2.6 | 1.1 | 2.1 | yes |
| | | regulator A homologue S | | | | |
| N315-SA0099 | sbtA | HP, similar to transmembrane | Up | Up | Up | |
| | | efflux pump protein | | | | |
| N315-SA1869 | sigB | Alternative transcription factor | Up | Up | Up | yes^{d} |
| | | σ^{B} | | | | |
| N315-SA0456 | spoVG | Stage V sporulation protein G | 4.3 | 9.8 | 3.0 | yes^{d} |
| | | homologue | | | | |
| N315-SA1114 | truB | tRNA pseudouridine 5S | 2.1 | Up | 2.3 | yes |
| | | synthase | | | | |
| N315-SA2119 | ydaD | HP, simialr to dehydrogenase | 4.8 | 33.1 | 16.9 | yes |
| | | (Csb28) | | | | |
| N315-SA0084 | | HP, similar to homo sapiens | Up | Up | 3.0 | yes |
| | | CGI-44 protein | | | | |
| N315-SA0098 | | HP, similar to aminoacylase | Up | Up | Up | |
| N315-SA0102 | | 67 kDa Myosin-crossreactive | Up | Up | Up | yes |
| | | streptococcal antigen | | | | |
| | | homologue | | | | |
| N315-SA0105 | | HP | Up | Up | Up | |
| N315-SA0163 | | HP, similar to cation-efflux | Up | Up | Up | |
| | | system membrane protein | | | | |
| | | CzcD | | | | |
| N315-SA0164 | | HP | Up | Up | Up | yes |
| N315-SA0261 | | HP, similar to rbs operon | 2.5 | Up | Up | yes |
| | | repressor RbsR | | | | |
| N315-SA0296 | | Conserved HP | 7.6 | 20.5 | 3.9 | yes |
| N315-SA0297 | | HP, similar to ABC transporter | 6.3 | 13.1 | 2.8 | yes^{d} |
| | | ATP-binding protein | | | | |
| N315-SA0317 | | HP, similar to | 11.6 | 20.7 | 3.9 | yes |
| | | dihydroflavonol-4-reductase | | | | |
| N315-SA0326 | | Conserved HP | 2.5 | 2.1 | 2.0 | yes |
| N315-SA0327 | | Conserved HP | 2.2 | 2.1 | 2.0 | yes^{d} |
| N315-SA0359 | | Conserved HP | Up | Up | Up | yes |
| N315-SA0360 | | Conserved HP | Up | Up | 77.7 | yes |
| N315-SA0372 | | HP (Csb12) | 1.6 | 3.3 | 2.0 | yes |
| N315-SA0455 | | Translation initiation inhibitor | 3.2 | 6.2 | 2.3 | yes |
| | | homologue | | | | |
| N315-SA0509 | | Conserved HP | 2.0 | 12.1 | 2.0 | |
| N315-SA0528 | | HP, similar to hexulose-6- | 1.8 | 6.8 | 2.0 | yes |
| | | phosphate synthase (Csb4) | | | | |
| N315-SA0529 | | Conserved HP (Csb4-1) | 1.9 | 8.7 | 2.0 | yes^{d} |
| N315-SA0541 | | HP, similar to cationic amino | 11.3 | 14.4 | 7.7 | yes |
| | | acid transporter | | | | |
| N315-SA0572 | | HP, similar to esterase/lipase | Up | Up | Up | yes |
| N315-SA0577 | | HP, similar to FimE | Up | Up | Up | |
| | | recombinase | | | | |
| N315-SA0578 | | HP, similar to NADH | Up | Up | Up | yes |
| | | dehydrogenase | | | | |
| N315-SA0579 | | HP, similar to Na+/H+ | Up | Up | 4.0 | yes^{d} |
| | | antiporter | | | | |
| N315-SA0580 | | HP, similar to Na+/H+ | Up | Up | Up | yes^{d} |
| | | antiporter | | | | |
| N315-SA0581 | | MnhD homologue, similar to | Up | Up | 6.0 | yes^{d} |
| | | Na+/H+ antiporter subunit | | | | |
| N315-SA0582 | | HP, similar to Na+/H+ | Up | Up | 4.0 | yes^{d} |
| | | antiporter | | | | |
| N315-SA0583 | | HP, similar to Na+/H+ | Up | Up | 4.7 | yes^{d} |
| | | antiporter | | | | |
| N315-SA0584 | | Conserved HP | Up | Up | 5.3 | yes^{d} |
| N315-SA0633 | | HP | 2.0 | 8.7 | 2.9 | yes^{d} |
| N315-SA0634 | | Conserved HP | 1.9 | 6.6 | 2.3 | yes^{d} |
| N315-SA0635 | | Conserved HP | 5.1 | 14.8 | 2.8 | yes^{d} |
| N315-SA0636 | | Conserved HP | 5.5 | 22.9 | 2.2 | yes^{d} |
| N315-SA0637 | | Conserved HP | 5.3 | 24.3 | 3.5 | yes |
| N315-SA0658 | | HP, similar to plant-metabolite | 3.0 | 10.5 | 2.5 | yes |
| | | dehydrogenases | | | | |
| N315-SA0659 | | HP, similar to CsbB stress | 3.3 | 10.4 | 2.5 | yes^{d} |
| | | response protein | | | | |
| N315-SA0665 | | Coenzyme PQQ synthesis | 2.1 | 4.5 | 1.8 | |
| | | homologue | | | | |
| N315-SA0666 | | 6-pyruvoyl tetrahydrobiopterin | 2.3 | 5.7 | 2.1 | |
| | | synthase homologue | | | | |
| N315-SA0681 | | HP, similar to multidrug | 2.4 | Up | Up | yes |
| | | resistance protein (Csb29) | | | | |
| N315-SA0721 | | Conserved HP | 4.2 | 10.3 | 2.4 | yes |
| N315-SA0722 | | Conserved HP | 3.4 | 9.4 | 1.5 | yes^{d} |
| N315-SA0724 | | HP, similar to cell-division | 2.5 | 3.8 | 2.5 | yes |
| | | inhibitor | | | | |
| N315-SA0725 | | Conserved HP | Up | Up | Up | |
| N315-SA0740 | | HP | Up | Up | Up | yes |
| N315-SA0741 | | Conserved HP | Up | Up | Up | yes^{d} |
| N315-SA0748 | | HP | 3.0 | Up | 4.8 | yes^{d} |
| N315-SA0749 | | HP | 2.5 | Up | 6.6 | yes |
| N315-SA0751 | | HP | 4.3 | 5.7 | 4.1 | |
| N315-SA0752 | | HP | Up | Up | Up | yes |
| N315-SA0755 | | HP, similar to general stress | Up | Up | Up | yes |
| | | protein 170 | | | | |
| N315-SA0768 | | Conserved HP | 2.0 | 5.6 | 4.5 | |
| N315-SA0772 | | Conserved HP | Up | Up | Up | yes |
| N315-SA0774 | | HP, similar to ABC transporter | 2.1 | 2.0 | 1.4 | yes |
| | | ATP-binding protein | | | | |
| | | homologue (Csb10) | | | | |
| N315-SA0780 | | HP, similar to hemolysin | 3.3 | Up | 2.2 | yes |
| N315-SA0781 | | HP, similar to 2-nitropropane | 2.2 | Up | 2.0 | yes^{d} |
| | | dioxygenase | | | | |
| N315-SA0933 | | HP | 13.1 | 26.9 | 7.1 | yes |
| N315-SA1014 | | Conserved HP | Up | Up | Up | yes |
| N315-SA1057 | | Conserved HP | 2.4 | 3.9 | 3.1 | yes |
| N315-SA1559 | | HP, similar to smooth muscle | 3.6 | 12.1 | 2.1 | yes^{d} |
| | | caldesmon | | | | |
| N315-SA1560 | | HP, similar to general stress | 2.8 | 8.2 | 2.2 | yes |
| | | protein homolog | | | | |
| N315-SA1573 | | HP | 5.9 | 21.0 | 3.0 | yes |
| N315-SA1590 | | HP | 2.0 | 4.3 | 2.1 | yes |
| N315-SA1657 | | Conserved HP | 2.0 | 4.5 | 2.4 | yes |
| N315-SA1671 | | HP (Csb33) | 3.0 | 9.4 | 2.1 | yes |
| N315-SA1692 | | Conserved HP (Csb3) | 1.8 | 5.6 | 4.0 | |
| N315-SA1697 | | HP, simialr to protein-tyrosine | 2.3 | 5.0 | 3.7 | yes |
| | | phosphatase | | | | |
| N315-SA1698 | | HP | 1.3 | 2.9 | 2.0 | yes^{d} |
| N315-SA1699 | | HP, simialr to transporter | 5.0 | 23.1 | 6.1 | yes^{d} |
| N315-SA1814 | | HP, similar to succinyl- | Up | Up | Up | |
| | | diaminopimelate desuccinylase | | | | |
| N315-SA1903 | | Conserved HP | 3.7 | 10.9 | 3.7 | yes^{d} |
| N315-SA1924 | | HP, simialr to aldehyde | 3.7 | 26.1 | 3.2 | yes |
| | | dehydrogenase (Csb24) | | | | |
| N315-SA1942 | | Conserved HP | 2.3 | 7.9 | 3.6 | |
| N315-SA1946 | | Conserved HP (Csb9) | Up | Up | Up | yes |
| N315-SA1961 | | HP, similar to transcription | 9.7 | 8.2 | Up | yes^{d} |
| | | antiterminator BglG family | | | | |
| N315-SA1980 | | Conserved HP | 3.4 | 4.7 | 1.1 | yes^{d} |
| N315-SA1981 | | Conserved HP | 5.7 | 7.7 | 1.6 | yes |
| N315-SA1985 | | HP | Up | Up | Up | yes^{d} |
| N315-SA1986 | | HP | Up | Up | Up | yes |
| N315-SA2006 | | HP, similar to MHC class II | Up | Up | Up | |
| | | analog | | | | |
| N315-SA2101 | | Conserved HP | 2.2 | 3.3 | 1.5 | yes^{d} |
| N315-SA2102 | | Conserved HP | 2.2 | 3.3 | 1.7 | yes |
| N315-SA2104 | | HP, similar to suppressor | 2.1 | 2.2 | 1.8 | yes |
| | | protein SuhB | | | | |
| N315-SA2158 | | HP, similar to TpgX protein | 2.2 | 3.5 | 2.5 | yes |
| N315-SA2203 | | HP, similar to multidrug | 2.1 | 3.9 | 2.2 | yes |
| | | resistance protein | | | | |
| N315-SA2219 | | Conserved HP | Up | Up | 3.0 | yes |
| N315-SA2240 | | HP, similar to para-nitrobenzyl | 1.9 | 2.0 | 2.0 | |
| | | esterase chain A | | | | |
| N315-SA2242 | | Conserved HP | Up | Up | Up | |
| N315-SA2243 | | HP, similar to ABC transporter | Up | Up | Up | |
| | | (ATP-binding protein) | | | | |
| N315-SA2262 | | Conserved HP (Csb7) | Up | Up | Up | yes |
| N315-SA2267 | | HP | 3.0 | Up | 3.9 | yes |
| N315-SA2298 | | Conserved HP | 3.4 | 30.9 | 6.1 | |
| N315-SA2309 | | Conserved HP | 2.0 | 2.5 | 2.9 | |
| N315-SA2327 | | HP, similar to pyruvate | 51.1 | Up | 17.9 | |
| | | oxidase | | | | |
| N315-SA2328 | | Conserved HP | Up | Up | Up | |
| N315-SA2350 | | Conserved HP | Up | Up | Up | yes^{d} |
| N315-SA2351 | | HP, similar to phytoene | Up | Up | Up | yes^{d} |
| | | dehydrogenase | | | | |
| N315-SA2352 | | HP | Up | Up | Up | yes |
| N315-SA2366 | | Conserved HP | 7.3 | Up | 4.5 | yes |
| N315-SA2367 | | Conserved HP | 10.4 | Up | 8.9 | yes |
| N315-SA2374 | | Conserved HP | Up | Up | Up | |
| N315-SA2398 | | HP | Up | Up | Up | yes |
| N315-SA2403 | | Conserved HP | 10.3 | Up | 8.7 | yes |
| N315-SA2440 | | HP | 2.3 | 5.9 | 1.7 | |
| N315-SA2441 | | HP, similar to | 2.5 | 6.6 | 2.0 | |
| | | lipopolysaccharide | | | | |
| | | biosynthesis protein | | | | |
| N315-SA2442 | | Preprotein translocase SecA | 3.5 | 8.5 | 2.0 | |
| | | homologue | | | | |
| N315-SA2451 | | HP | Up | Up | Up | yes |
| N315-SA2452 | | Conserved HP | Up | Up | 3.5 | |
| N315-SA2479 | | Conserved HP | Up | 4.3 | 4.6 | yes |
| N315-SA2485 | | HP | Up | Up | Up | yes |
| N315-SA2488 | | HP | Up | Up | Up | yes |
| N315-SA2489 | | HP, similar to high-affinity | Up | Up | Up | yes^{d} |
| | | nickel-transport protein | | | | |
| N315-SA2491 | | Conserved HP | Up | Up | Up | yes |
| N315-SAS023 | | HP, similar to thioredoxin | 2.1 | 4.6 | 3.2 | |
| N315-SAS049 | | HP | Up | Up | Up | yes^{d} |
| N315-SAS053 | | HP | 4.0 | 12.8 | 2.1 | yes^{d} |
| N315-SAS056 | | HP | 2.0 | 5.7 | 1.9 | yes |
| N315-SAS068 | | HP | 5.2 | 5.7 | 3.3 | yes |
| N315-SAS082 | | HP | Up | Up | Up | |
| N315-SAS083 | | HP | Up | Up | Up | |
| N315-SAS089 | | HP | 2.6 | 5.7 | 2.3 | |
| COL-SA0866 | | HP | Up | Up | Up | |
| COL-SA1046 | | HP | 6.6 | 12.0 | 9.0 | yes |
| COL-SA2012 | | HP, acetyltransferase (GNAT) | 3.8 | 2.9 | 2.0 | |
| | | family | | | | |
| COL-SA2013 | | HP | Up | Up | Up | |
| COL-SA2379 | | Conserved HP | 2.2 | 17.1 | 3.0 | |
| COL-SA2433 | | HP | 2.6 | 3.6 | 2.1 | yes^{d} |
| COL-SA2481 | | HP | Up | Up | Up | yes^{d} |
| COL-SA2595 | | HP | 2.3 | 4.1 | 2.1 | |
| COL-SA2631 | | Conserved HP | Up | Up | 3.8 | yes |
| AAB05395 | | HP, ORF 3 of the sarA locus | 11.8 | 46.6 | 6.8 | yes |
| CAB60754 | | HP | 32.1 | Up | 13.9 | yes |

^{a}Based on the published sequence of strain N315 (accession no. NC_002745). For genes not present in N315, the gene name and description given are from the COL genome, available from The Institute for Genomic Research Comprehensive Microbial Resource website (www.tigr.org), or the respective accession number. ABC, ATP binding cassette; GNAT, GCN5-related N-acetyltransferases; HP, hypothetical protein; MHC, major histocompatibility complex; PTS, phosphotransferase system.
^{b}Normalized values in the rsbU⁺V⁺W⁺sigB⁺ strain over values in the ΔrsbUVWsigB mutant. “Up” denotes genes highly downregulated in the ΔrsbUVWsigB mutant, such that the transcripts were below detectable levels and the fold change could not be accurately calculated.
^{c}Open reading frames preceded by an consensus sequence that resembles the σ^{B} consensus sequence for B. subtilis as described by Petersohn et al. (62). Only sequences deviating not more than three nucleotides from the consensus GttTww₁₂₋₁₅ gGgwAw (w = a, t) and lying within 500 bp upstream of predicted open reading frames were considered as σ^{B}-dependent promoters.
^{d}Open reading frames likely to form an operon.
^{e}References reporting an influence of σ^{B} on the respective gene or its gene product.

[0142] TABLE 10
Genes Downregulated by σ^{B}

| N315 | N315 | | Fold change^{b} | | | Regulated |
|---|---|---|---|---|---|---|
| ORF No.^{a} | gene^{a} | N315 description^{a} | COL | Newman | GP268 | by SarA^{d} |
| N315-SA2430 | aur | Zinc metalloprotease aureolysin | 7.4 | 6.1 | 9.1 | Down |
| N315-SA2411 | citM | HP, similar to magnesium citrate | Down | Down | 4.3 | |
| | | secondary transporter | | | | |
| N315-SA0820 | glpQ | Glycerophosphoryl diester | 3.6 | 2.6 | 1.9 | Down |
| | | phosphodiesterase | | | | |
| N315-SA1007 | hla | α-hemolysin precurser | 2.1 | 2.8 | 14.1 | Up |
| N315-SA2207 | hlgA | γ-hemolysin component A | 1.7 | 2.0 | 2.1 | |
| N315-SA2209 | hlgB | γ-hemolysin component B | 2.2 | 4.2 | Down | Up |
| N315-SA2208 | hlgC | γ-hemolysin component C | 2.0 | 4.7 | 4.1 | Up |
| N315-SA2463 | lip | Triacylglycerol lipase precursor | 2.0 | 6.2 | 2.0 | Up/Down |
| N315-SA0252 | lrgA | Holin-like protein LrgA | — | 5.8 | 9.4 | Up |
| N315-SA0253 | lrgB | Holin-like protein LrgB | — | 6.2 | 6.5 | Up/Down |
| N315-SA1812 | lukF | HP, similar to | 2.7 | 3.9 | Down | |
| | | synergohymenotropic toxin | | | | |
| | | precursor | | | | |
| N315-SA1813 | lukM | HP, similar to leukocidin chain | 3.8 | 4.8 | Down | |
| | | lukM precursor | | | | |
| N315-SA0746 | nuc | Staphylococcal nuclease | 29.7 | 5.1 | Down | Down |
| N315-SA0091 | plc | 1-phosphatidylinositol | Down | 3.9 | Down | Down |
| | | phosphodiesterase precurosr | | | | |
| N315-SA0963 | pycA | Pyruvate carboxylase | 2.3 | 1.9 | 2.3 | |
| N315-SA0259 | rbsD | Ribose permease | 2.9 | 2.8 | 1.5 | |
| N315-SA0258 | rbsK | Probable ribokinase | 2.8 | 2.3 | 1.3 | |
| N315-SA1758 | sak | Staphylokinase precursor | — | 2.7 | 7.0 | |
| | | (protease III) | | | | |
| N315-SA0128 | sodM | Superoxide dismutase | 4.6 | 2.0 | 2.8 | |
| N315-SA1631 | splA | Serine protease SplA | Down | 9.9 | Down | Up |
| N315-SA1630 | splB | Serine protease SplB | Down | 7.9 | Down | Up |
| N315-SA1629 | splC | Serine protease SplC | Down | Down | Down | |
| N315-SA1628 | splD | Serine protease SplD | Down | Down | Down | Up |
| COL-SA1865 | splE | Serine protease SplE | Down | Down | Down | |
| BAB95617_1 | splF | Serine protease SplF | — | Down | Down | |
| N315-SA0901 | sspA | Staphylococcal serine protease | 3.8 | 2.1 | 3.3 | Down |
| | | (V8 protease) | | | | |
| N315-SA0900 | sspB | Cysteine protease | 3.2 | 2.2 | 4.3 | Down |
| N315-SA0899 | sspC | Cysteine protease | 3.0 | 1.9 | 3.0 | Down |
| N315-SA2302 | stpC | HP, similar to ABC transporter | 6.3 | 2.3 | 4.0 | |
| N315-SA0022 | | HP, similar to 5′-nucleotidase | 2.6 | 1.8 | 3.3 | |
| N315-SA0089 | | HP, similar to DNA helicase | 2.4 | Down | 2.1 | |
| N315-SA0260 | | HP, similar to ribose transporter | 3.0 | 2.6 | 2.3 | |
| | | RbsU | | | | |
| N315-SA0270 | | HP, similar to secretory antigen | 4.6 | Down | Down | |
| | | precursor SsaA | | | | |
| N315-SA0272 | | HP, similar to transmembrane | 4.4 | Down | Down | |
| | | protein Tmp7 | | | | |
| N315-SA0276 | | Conserved HP, similar to | 3.7 | Up | — | |
| | | diarrhoeal toxin-like protein | | | | |
| N315-SA0285 | | HP | 2.6 | Down | 3.4 | |
| N315-SA0291 | | HP | 3.1 | — | 3.3 | |
| N315-SA0295 | | HP, similar to outer membrane | 4.9 | 3.6 | 10.4 | |
| | | protein precursor | | | | |
| N315-SA0368 | | HP, similar to proton/sodium- | 2.7 | 3.1 | 1.4 | |
| | | glutamate symport protein | | | | |
| N315-SA0841 | | HP, similar to cell surface protein | 5.7 | 3.4 | 2.2 | |
| | | Map-w | | | | |
| N315-SA0977 | | 29-kDa cell surface protein | 2.5 | 2.1 | 1.8 | |
| N315-SA1725 | | Staphopain, cysteine protease | 5.9 | 4.2 | 10.6 | Down |
| N315-SA1726 | | HP | 3.8 | 3.4 | 6.5 | |
| N315-SA1815 | | HP, similar to Na+/−transporting | Down | Down | Down | |
| | | ATP synthase | | | | |
| N315-SA1853 | | HP, simialr to DNA mismatch | 2.1 | Down | 4.0 | |
| | | repair protein MutS | | | | |
| N315-SA2132 | | HP, simialr to ABC transporter | 2.7 | Down | 2.3 | |
| | | (ATP-binding protein) | | | | |
| N315-SA2133 | | Conserved HP | 3.1 | Down | 3.2 | |
| N315-SA2303 | | HP, similar to membrane | Down | 1.8 | Down | |
| | | spanning protein | | | | |
| N315-SAS020 | | HP, similar to phosphoglycerate | 2.1 | 2.4 | 2.2 | |
| | | mutase | | | | |
| COL-SA0450 | | HP | 2.2 | 2.2 | 3.1 | |
| COL-SA1884 | | HP | 3.3 | Down | Down | |
| COL-SA2693 | | HP | 2.2 | 7.1 | 2.2 | |

^{a}Based on the published sequence of strain N315 (accession no. NC_002745). For genes not present in N315, the gene name and description given are from the COL genome, available from The Institut for Genomic Research Comprehensive Microbial Resource website (www.tigr.org), or the respective accession number. HP, hypothetical protein.
^{b}Normalized values in the ΔrsbUVWsigB mutant over values in the rsbU⁺V⁺W⁺sigB⁺ strain. “Down” denotes genes highly downregulated in the rsbU⁺V⁺W⁺sigB⁺ strain, such that the transcripts were below detectable levels and the fold change could not be accurately calculated.
^{c}References reporting an influence of σ^{B} on the respective gene or its gene product.
^{d}References reporting an influence of SarA on the respective gene or its gene product.

[0143] Transcriptional start point (tsp) determinations of the σ^{B}-driven sarC and clfA transcripts, coupled with σ^{B}-dependent in vitro transcription analyses of the asp23 P1 and the coa promoters, suggest that the promoter region of S. aureus σ^{B} regulated genes contains a consensus sequence that is highly similar to that of B. subtilis σ^{B} regulated genes. See Petersohn et al., supra. Similarity of the σ^{B} promoter consensus sequences of both species is further corroborated by the findings that the S. aureus asp23 P1 promoter is recognized by E-σ^{B} in B. subtilis, and that all proteins that were identified to be influenced by σ^{B} in S. aureus by a proteomic approach are encoded by genes harboring a nucleotide sequence resembling the B. subtilis σ^{B} promoter consensus. Most of the genes, identified as upregulated by σ^{B} in this study, were also preceded by nucleotide sequences resembling the σ^{B} promoter consensus of B. subtilis, either directly or as part of a putative operon. None of the genes identified to be down-regulated in a σ^{B} specific manner contained this sequence within their promoter region. Tsp determinations of several of these genes, including asp23 P1, csbD, and csb9, further validate the similarity of the σ^{B} promoter consensus.

[0144] Genes influenced by σ^{B} during early growth stages: The approach used in experiment one proved to be useful for the identification of a large number of σ^{B}-regulated genes (Tables 9 and 10). However, this strategy might miss σ^{B}-dependent genes that were expressed only during early growth stages. In a second approach, the transcriptional profiles of strain Newman and its ΔrsbUVWsigB mutant, IK184, were analyzed during several growth stages, e.g. 1, 3, 5, and 8 h after inoculation. Monitoring the transcriptional profiles during different growth stages confirmed almost all genes identified by experiment one to be σ^{B}-dependent. The experiment also enabled the identification of 23 additional ORFs to be positively regulated by σ^{B} (Table 11). The majority of these ORFs, represented by transcriptional profile type 1, were expressed primarily during early growth stages (1 and 3 h after inoculation), while no transcripts were detectable during later growth (5 and 8 h after inoculation). Members of this group include several putative virulence factors such as coa, encoding for staphylococcal coagulase, and fnb, encoding fibronectin binding protein A, which have been demonstrated to be influenced by σ^{B} and confirmed in this study. In addition, ORFs N315-SA0620, N315-SA2093, and N315-SA2332, which all are homologues of ssaA of Stapyhlococcus epidermidis, encoding the highly antigenic staphylococcal secretory antigen A were found to be influenced by σ^{B}. Most of the ORFs listed in Table 11 lacked a significant σ^{B} consensus promoter in their upstream regions, suggesting that σ^{B} indirectly regulates their transcript titers.

TABLE 11
Genes Upregulated by σ^{B} in Strain Newman During Early Growth Phase

| N315 | N315 | | Fold | σ^{B} | Expression |
|---|---|---|---|---|---|
| ORF No.^{a} | gene^{a} | N315 description^{a} | change^{b} | consensus^{c,d} | profile^{e} |
| N315-SA0222 | coa | Staphylocoagulase precursor | 2.4 | yes | 1 |
| N315-SA2291 | fnb | Fibronectin binding protein A | 2.5 | | 1 |
| N315-SA2356 | isaA | Immunodominant antigen A | 2.4 | | 1 |
| N315-SA0265 | lytM | Peptidoglycan hydrolase | 3.4 | yes | 1 |
| N315-SA2093 | ssaA | Secretory antigen precursor SsaA | 2.4 | | 1 |
| | | homolog | | | |
| COL-SA0857 | vwb | Secreted von Willebrand factor- | 2.6 | | 1 |
| | | binding protein | | | |
| N315-SA0336 | | HP | 2.1 | | 1 |
| N315-SA0612 | | Conserved HP | 3.1 | | 2 |
| N315-SA0620 | | Secretory antigen SsaA | 2.7 | | 1 |
| | | homologue | | | |
| N315-SA0903 | | Conserved HP | 2.5 | | 1 |
| N315-SA0937 | | Cytochrome D ubiquinol oxidase | 2.2 | | 1 |
| | | subunit 1 homolog | | | |
| N315-SA0938 | | Cytochrome D ubiquinol oxidase | 2.0 | | 1 |
| | | subunit II homolog | | | |
| N315-SA1275 | | Conserved HP | 2.6 | | 1 |
| N315-SA1898 | | HP, simialr to SceD precursor | Up | Yes | 1 |
| N315-SA2301 | | HP, similar to alkaline | 2.2 | | 2 |
| | | phosphatase | | | |
| N315-SA2310 | | Conserved HP | 2.0 | | 2 |
| N315-SA2321 | | HP | 2.3 | yes | 2 |
| N315-SA2332 | | HP, similar to secretory antigen | 2.8 | | 1 |
| | | precursor SsaA | | | |
| N315-SA2355 | | Conserved HP | 2.3 | Yes | 1 |
| N315-SA2378 | | Conserved HP | 2.5 | | 1 |
| N315-SA2447 | | HP, similar to streptococcal | Up | yes | 2 |
| | | hemagglutinin protein | | | |
| N315-SAS051 | | HP | 2.1 | | 2 |
| COL-SA0210 | | HP | Up | | 1 |

^{a}Based on the published sequence of strain N315 (accession no. NC_002745). For genes not present in N315, the gene name and description given are from the COL genome, available from The Institut for Genomic Research Comprehensive Microbial Resource website (www.tigr.org), or the respective accession number. ABC, ATP binding cassette; GNAT, GCN5-related N-acetyltransferases; HP, hypothetical protein; MHC, major histocompatibility complex; PTS, phosphotransferase system.
^{b}Normalized values in the Newman strain over values in the ΔrsbUVWsigB mutant IK184. “Up” denotes genes highly downregulated in IK184, such that the transcripts were below detectable levels and the fold change could not be accurately calculated.
^{c}Open reading frames preceded by an consensus sequence that resembles the σ^{B} consensus sequence for B. subtilis as described by Petersohn et at. (62). Only sequences deviating not more than three nucleotides from the consensus GttTww₁₂₋₁₅ gGgwAw (w = a, t) and lying within 400 bp upstream of predicted open reading frames were considered as σ^{B}-dependent promoters.
^{d}Open reading frames likely to form an operon.
^{e}References reporting an influence of σ^{B} on the respective gene or its gene product.

[0145] Transcript titers of a number of ORFs was not only increased in the wild-type strain during early growth (1 h after inoculation), but was found to be further enhanced during late growth (8 h after inoculation) as represented by transcription profile type 2. It is conceivable that the expression of these ORFs is again influenced indirectly by σ^{B}, for example, via regulator(s), which are mainly active during the late growth phase. The increase in expression observed for these ORFs during the early growth phase may be due to a carry-over of the regulators that were produced during late growth in the pre-culture and may be still active even one hour after inoculation.

[0146] Functional classification of ORFs influenced by σ^{B}: The ORFs influenced by σ^{B} represent all functional categories, e.g. (i) cell envelope and cellular processes, including cell wall production, transport, signal transduction, membrane bioenergetics, and protein secretion; (ii) intermediary metabolism, including carbohydrate metabolism, glycolytic pathways, TCA cycle, amino acid and lipid metabolism; (iii) information pathways, including DNA modification and repair, RNA synthesis, and regulation; (iv) other functions, such as adaptation to atypical conditions or detoxification; and (v) ORFs similar to proteins with unknown function. The latter group alone comprises 100 out of the 251 ORFs regulated by σ^{B}, representing a large reservoir of potential factors that might be responsible for phenotypic properties of S. aureus associated with σ^{B} activity, such as the development of resistance to methicillin, glycopeptides and hydrogen peroxide that have not been associated with specific genes.

[0147] Chromosomal distribution of σ^{B}-regulated genes: The ORFs that are positively controlled by σ^{B} are not evenly distributed over the S. aureus chromosome but rather are overabundant in the genomic regions that are close to the origin of replication (oriC). While 77 out of 828 ORFs (9.3%) or 69 out of 861 ORFs (8%) encoded by the genome fragments 1 and 3, corresponding to position 1 to 937,880 and 1,875,761 to 2,813,641, respectively, are influenced by σ^{B}, only 12 out of 816 (1.5%) of the ORFs encoded by genomic region 2 (position 937,880 to 1,875,760) that is most distal to oriC, are controlled by σ^{B}. The majority of genes/operons in these segments are oriented with respect to oriC in a manner that minimizes collisions between the transcribing RNA polymerase and the replication apparatus. Thus, 71.5% of all genes, and 77% of the σ^{B}-regulated ORFs, located on genome fragment 1 are encoded by the clockwise replicating strand, and 72.8% of all genes and 72.5% of the σ^{B}-regulated ORFs located on genome fragment 3 are encoded by the counterclockwise strand. It has been suggested that the location of a gene relative to oriC can affect its level of expression. Genes located near the point of origin of replication are present in higher numbers in a rapidly growing cell than those near the terminus, which may be of importance for those genes that are controlled by promoters operating near the maximum possible frequency.

[0148] Putative regulators acting downstream of σ^{B}: A significant number of ORFs (50 out of 176 of experiment one, and 17 out of 23 of experiment two) found to be upregulated by σ^{B}, were not preceded by nucleotide sequences resembling the σ^{B} promoter consensus. Some of these genes were expressed only in sigB⁺ strains. It is possible that these ORFs were transcribed by the direct action of E-σ^{B}, despite of the lack of an obvious σ^{B} promoter consensus. Alternatively, it is possible that σ^{B} controls the expression of a regulator(s), which would subsequently promote the expression of these genes. Promising candidates for such a scenario are the putative regulator homologues YabJ and SpoVG (N315-SA0455/6), which may be co-transcribed, and were found to be controlled by σ^{B} Tsp determination of the yabJ transcript by S1 mapping confirmed that yabJ-spoVG expression is driven by σ^{B}, YabJ belongs to the highly conserved family of YigF proteins, which have been suggested to influence a variety of biological processes. YabJ of B. subtilis was found to have a role in the repression of purA by adenine. spoVG, encoding the stage V sporulation protein G, was the first developmentally regulated gene that was cloned from B. subtilis, and its regulation has been investigated intensively. However, little is known about the function of this protein. A mutation in spoVG was shown to impair sporulation of B. subtilis, apparently as a result of disintegration of an immature spore cortex. More recent results suggest that SpoVG interferes with or is a negative regulator of the pathway leading to asymmetric septation. In addition to S. aureus, spoVG homologues have been found in the genomes of several bacteria, such as Archeoglobus fulgidus, Borrelia burgdorferi, Listeria monocytogenes, and S. epidermidis, none of which produce spores. Thus, the SpoVG homologues of these organisms may mediate functions other than sporulation. Inactivation of spoVG in a methicillin-resistant S. epidermidis (MRSE) drastically decreased methicillin resistance and the formation of a biofilm. Interestingly, both attributes have also been linked positively to σ^{B} activity in S. aureus (65, 80). Attempts to inactivate the S. aureus yabJ and spoVG homologues are currently ongoing in order to elucidate their roles in this organism.

[0149] Another potential regulator, acting downstream of σ^{B}, is the gene product of ORF N315-SA1961, a homologue of the BglG/SacY family of transcriptional anti-terminators (ATs). ATs are regulatory protein factors that bind to specific sites in the nascent mRNA in order to prevent premature termination of gene transcription and to stimulate elongation by RNA polymerase. Expression of N315-SA1961 was found to be highly upregulated in strains harboring an intact sigB operon (Table 9), and the ORF is preceded by a nucleotide sequence that matches the proposed σ^{B} promoter consensus, indicating that the BglG/SacY homologue is controlled directly by σ^{B}.

[0150] Influence of σ^{B} on known regulatory elements: S. aureus possesses an array of virulence factor regulatory elements, such as two-component signal transduction systems and winged-helix transcription-regulatory proteins. Presumably these elements interact to influence different networks of virulence factors on an as-needed basis, thereby providing cells with the necessary arsenal of virulence determinates to respond to environmental changes or stimuli. The data presented here indicate that three of these virulence regulators, sarA, sarS and arlRS are upregulated by σ^{B}. Transcription of other well-studied virulence regulators, such as Sae and Rot, were not significantly influenced by σ^{B} in this study.

[0151] The staphylococcal accessory regulator A, SarA, a member of the winged-helix transcription proteins is encoded by the sar locus. Although the expression of the sar locus is in-part controlled by the action of σ^{B}, it is still a matter of debate whether σ^{B} has a positive or negative effect on the overall level of SarA production. Much of what is published regarding the influence of σ^{B} on SarA expression is difficult to interpret because most of these studies were done in strains, such as RN6390 and 8325-4, that harbor mutations in rsbU, the positive activator of σ^{B}, rendering them sigB deficient. The discrepancies between the positive influence of σ^{B} on SarA production observed by Gertz, et al., J. BACTERIOL., 182: 6983-6991 (2000), in a proteomic approach and by Bischoff, et al, J. BACTERIOL. 183: 5171-5179 (2001), via reporter gene fusion experiments, versus the observed down-regulatory effect of σ^{B} on SarA production reported by Manna, et al., J. BACTERIOL., 180: 3828-3836 (1998) and Cheung, et al., INFECT. IMMUN., 67: 1331-1337 (1999) might be explained by the fact that, in the latter studies, an rsbU mutant was used as parental strain to compare it with its respective sigB mutant. However, this explanation seems not to be able to account for the findings of Horsburgh, et al., J. BACTERIOL., 184: 5457-5467 (2002), who did not observe any influence of σ^{B} on SarA production either at the transcriptional or protein level. The transcriptional profiling data presented here suggests that σ^{B} increases the expression of the sar locus (Table 9), for instance, during later growth stages (5 and 8 h after inoculation). Moreover, a direct correlation between the increase in SarA transcript levels and an increase in SarA protein is indirectly suggested by the findings that expression of four major extracellular proteases of S. aureus (staphylococcal serine protease V8 [SspA], cysteine protease [SspB], metalloprotease aureolysin [Aur], and staphopain [Scp]) is significantly decreased in sigB⁺ strains (Table 10). It was recently demonstrated that transcription of these protease genes was suppressed due to increased σ^{B}-dependent expression of SarA. This is further supported by the findings that several of the ORFs found to be downregulated by σ^{B}, such as glpQ, encoding glycerophosphoryl diester phosphodiesterase, nuc, encoding staphylococcal thermonuclease, and plc, encoding a 1-phosphatidylinositol phospodiesterase precursor, have been demonstrated to be downregulated by SarA. It is possible that the increase in expression of these genes found in the ΔrsbUVWsigB mutants is due to a decreased production of SarA. Although appealing, this assumption remains speculative, as previous studies used the rsbU defective RN6390 lineage as genetic background for their analyses, leaving it open to question what might happen with respect to the sarA regulon in strains carrying an intact sigB operon. The genetic background chosen may also explain the observed discrepancy that several of the genes listed in Table 10 were found to be downregulated by σ^{B}, but upregulated by SarA. Support for such a process is conferred by the observations that RNAIII expression of the agr locus is promoted by SarA, but decreased by σ^{B} in an unidentified way that is, however, supposed to be independent from SarA

[0152] Expression of a second winged-helix transcription protein, SarS (syn. SarH1), belonging to the family of SarA homologues, was shown to be influenced by σ^{B}. This was confirmed in two of the three backgrounds analyzed in this study (Table 9). Interestingly, no difference in sarS expression was observed when comparing strain Newman and its ΔrsbUVWsigB mutant either in the microarray experiments (Table 9) or by Northern blot analysis (data not shown), further demonstrating that strain to strain differences influence regulon constituents. Sequencing of the σ^{B} promoter regions of sarS of strains Newman and GP268 did not reveal any difference between the respective regions (which were identical with the N315 region corresponding to nucleotides 125,868 to 126,073 of GenBank accession AP003129), leaving the question open as to why expression of sarS in Newman is not affected by σ^{B}.

[0153] The third known virulence regulatory element observed to be influenced by σ^{B} was arlRS, encoding a two-component signal transduction system that influences adhesion, autolysis, and extracellular proteolytic activity of S. aureus. More recently, it was also demonstrated to decrease expression of the agr locus, while increasing the expression of SarA. The data obtained from experiment two suggest that arlRS of strain Newman is upregulated by σ^{B}. However, arlRS did not show up in experiment one as influenced by σ^{B} either in strain COL or strain GP268, and is not preceded by a σ^{B} consensus promoter.

[0154] Recent results suggest that expression of RNAIII, the effector molecule of the agr locus, is negatively influenced by σ^{B}. However, results of the two experiments presented here did not effectively corroborate these observations, as although slight differences in RNAIII transcription were detectable between wild-type strains and their respective ΔrsbUVWsigB mutants, changes in expression were not determined to be significant. RNAIII is by far the most prominent RNA molecule produced by S. aureus during later growth stages. As a result, the RNAIII transcript levels of the wild-type strains already reached amounts that saturated the RNAIII specific target oligonucleotides represented on the microarray, thus impeding the detection of differences in RNAIII transcript levels that might be present between the strain pairs analyzed.

[0155] Influence of σ^{B} on the expression of virulence determinants: Previous studies demonstrated that σ^{B} influences the expression of various factors associated with virulence and pathogenicity of S. aureus. However, in vivo studies have failed to demonstrate an effect of σ^{B} on virulence of S. aureus. Alternatively, σ^{B} may play a role in pathogenesis, however, the effects of σ^{B} mediated virulence mechanisms do not play a role in the models chosen in those experiments.

[0156] Analysis of the microarray data suggests that σ^{B} influences the expression of a large number of virulence genes in S. aureus. Many of these are reported here as genes that are altered transcriptionally by a σ^{B}. By comparing the expression profiles of these virulence genes a pattern has emerged; most of the exoenzymes and toxins produced by S. aureus were negatively influenced by σ^{B}, while expression of several adhesins were found to be increased by σ^{B}. The function of σ^{B} in virulence factor production therefore seems to be opposite to that of RNAIII, which is known to act as a negative regulator of cell wall proteins and a positive regulator of exoenzymes and toxins in a growth phase-dependent manner (Table 12). The decreased amounts of exoprotein and toxin transcripts observed in wild type strains compared to their respective mutants may in part be a consequence of lower RNAIII transcript levels that are present in strains harboring an intact sigB operon.

TABLE 12
Influence of σ^{B} on Virulence Determinants Regulated by the agr Locus

| | gene name | agr | σ^{B} |
|---|---|---|---|
| Aureolysin | aur | + | − |
| Capsular polysaccharide synthesis | cap5J | + | + |
| enzyme 5J | | | |
| Clumping factor B | clfB | + | Ø |
| Coagulase | coa | − | + |
| Cystein protease | sspC | + | − |
| Enterotoxin B | sea | + | Unknown |
| Enterotoxin C | seb | + | Unknown |
| Exotoxin 2 | set8 | + | Unknown |
| Factor effecting methicillin | femB | + | Ø |
| resistance B | | | |
| Fibronectin-binding protein A | fnbA | − | + |
| Fibronectin-binding protein B | fnbB | − | Ø |
| Glycerol ester hydrolyase | geh | + | − |
| α-hemolysin | hla | + | − |
| β-hemolysin | hlb | + | −¹ |
| γ-hemolysin | hlgBC | + | − |
| δ-hemolysin | hld | + | Ø |
| Hyaluronate lyase | hysA | + | Ø |
| Lipase | lip | + | − |
| LrgAB (holin-like proteins) | lrgAB | + | − |
| Myosin-crossreactive antigen | (N315-SA0102) | − | + |
| Phosphatidylinositol-specific | plc | + | − |
| phospolipase C | | | |
| Protein A | spa | − | Ø |
| Secretory antigen A | ssaA | − | + |
| Serine protease A, B, D, and F | splA, B, D, F | + | − |
| Staphylokinase | spc | + | − |
| TSST-1 | tst | + | Unknown |
| V8 protease | sspA | + | − |

Genes that are regulated converse by agr and σ^{B} are highlighted.
¹based on the hlb transcript levels detected in strains COL and IK183.

[0157] The finding that expression of so many virulence genes are significantly altered by σ^{B}, warrants further investigation to elucidate its role in infectivity of S. aureus in additional models of infection. To date, little is known about the expression or activity of σ^{B} during the course of infection. S. aureus is known for its ability to cause a variety of unrelated infections. It is feasible that the σ^{B}-dependent downregulation of toxins and exoenzymes, combined with the simultaneous upregulation of adhesins, may enable S. aureus to cause very specific host-pathogen interactions that have not been investigated to date. Recent results indicate that σ^{B} involved in processes that are important for biofilm formation. Therefore a comparison of the transcription profile of biofilm cells to the results obtained herein may identify genes that are essential for biofilm formation. Additionally, based on the virulence factor pattern caused by σ^{B}, it is tempting to speculate that this alternative transcription factor may also be an important player during nasal colonization, thereby promoting adherence to the host cell matrix without evoking an inflammatory response. Investigations are ongoing to address these questions. It is also quite possible that in vivo conditions leading to S. aureus stress, including those of high temperature at the site of infection, may induce the stress responsive σ^{B} factor. Under such conditions, when the host is trying to mount an immune response at the site of infection it could be more beneficial for the bacterium to produce cell surface components that are involved in camouflaging the organism from the host's defense than exoproteins.

[0158] The Example was designed to extensively characterize the genes that are regulated by the alternative sigma factor σ^{B} during standard laboratory growth conditions. Under these conditions, an X fold increase in sigB expression and >100-fold increase in the sigB regulated gene asp23 was observed. In addition, very stringent criteria were used for the identification of σ^{B} regulated genes: (1) transcripts demonstrated the same σ^{B} dependent phenotype in at least two out of the three genetic backgrounds tested, and (2) transcripts passed strict statistical cut-off values. Based on these criteria there was a high correlation between the genes identified in this Example and other recorded results. As a consequence, it is likely that the microarray methodology used accurately identified the genes belonging to the σ^{B} regulon of the strains analyzed. While defining the sigB regulon, a distinguishable pattern among virulence factors were observed. Subsequent studies that have focused on two S. aureus adhesions (clfA and fnbA) have confirmed that each gene is indeed regulated in a σ^{B} dependent manner and further validated the methodology used.

[0159] The finding that σ^{B} downregulates the transcription of secreted—but upregulates cell surface-virulence factors is in direct contrast to the observations of Kupferwasser, et al., J. CLIN. INVEST, 112: 222-233 (2003). In that study it was found that salicyclic acid mildly induces asp23 (1.9-fold) and corresponds to both the down regulation of certain cell surface adhesions and upregulation of secreted proteases. Based on the low induction rate of asp23 it is difficult to reconcile whether the virulence factor effects seen in that study are directly mediated by σ^{B} verses another salicyclic acid responsive process or a combination of the two. It also raises the question whether low to moderate levels of sigB produce a much different physiological phenotype than the levels tested here. It is also possible that salicyclic acid and other stresses that have been shown to modulate sigB activity direct the expression of portions of the sigB regulon. Having more completely characterized the σ^{B} regulon will allow subsequent experiments to fully address these questions and further understand the effects, if any, the σ^{B} regulon plays in pathogenesis.

### Example 10

### Staphylococcus aureus Nucleic Acid Arrays in Genotyping and Genetic Composition Analysis

[0160] Understanding the relatedness of strains within a bacterial species is important for monitoring reservoirs of antimicrobial resistance and for epidemiological studies. Pulsed-field gel electrophoresis (PFGE), ribotyping and multilocus sequence typing (MLST) are commonly used for this purpose. However, these techniques are either non-quantitative or provide only a limited estimation of strain relatedness. Moreover, they cannot extensively define the genes that constitute an organism. In this example, 21 oxacillin resistant Staphylococcus aureus (ORSA) isolates, representing eight major ORSA lineages, and each of the 7 strains for which complete genomic sequence is publicly available were genotyped using the nucleic acid array of Example 1. Strains were also subjected to PFGE and ribotyping analysis. The nucleic acid array results provided a higher level of discrimination among isolates than either ribotyping or PFGE, although strain clustering was similar among the three techniques. In addition, nucleic acid array signal intensity cut-off values were empirically determined to provide extensive data on the genetic composition of each isolate analyzed. Using this technology it was shown that strains could be examined for each element represented on the nucleic acid array including: virulence factors, antimicrobial resistance determinants, and agr-type. These results were validated by PCR, growth on selective media and detailed in silico analysis of each of the sequenced genomes. Therefore, nucleic acid arrays can provide extensive genotyping information for S. aureus strains and may play a major role in epidemiological studies in the future where correlating genes with particular disease phenotypes is critical.

Materials and Methods

[0161] DNA isolation and labeling. S. aureus strains were grown overnight in Brain Heart Infusion (BHI) medium in ambient air at 370C with vigorous aeration. For chromosomal isolation 1.5 ml of an overnight culture in BHI was placed in a 1.5 ml Eppendorf tube and was centrifuged for 5 min at 4° C. at high-speed in a table-top centrifuge. Supernatants were discarded and cell pellets were resuspended in an equal volume of ice-cold TE buffer (10 mM Tris, 1 mM EDTA; pH 8.0). Suspensions were then placed in 2-ml Lysing Matrix tubes (Bio 101; Vista, Calif.). Cells were lysed by shaking in a FP120 reciprocating shaker (Bio 101) two times at 6000 rpm for 20 s and cell debris was pelleted by centrifugation at high speed in a table top centrifuge for 10 min. Chromosomal and plasmid DNA was then purified from the supernatant on a Qiagen DNA tissue easy column (Valencia, Calif.), following the manufacturer recommendations for bacterial DNA purification. 2 μg of purified DNA was subjected to electrophoresis on a 0.8% native agarose gel to assess DNA integrity. For DNA labeling 5 μg of purified DNA was incubated at 90° C. for 3 min then plunged into an ice-bath followed by standard DNA fragmentation and labeling procedures according to the manufacturer's (Affymetrix Inc.,) instructions for labeling mRNA for antisense prokaryotic arrays. 1.5 μg of labeled DNA was hybridized to a nucleic acid array and was processed as per the manufacturer's protocol for GeneChip® hybridization and washing. Nucleic acid arrays were scanned, and signal intensities for elements tiled onto each nucleic acid array were normalized to account for loading errors and differences in labeling efficiencies by dividing each signal intensity by the mean signal intensity for an individual nucleic acid array. Results were analyzed using GeneSpring version 6.1 (Silicon Genetics, Calif.) and Spotfire version 7.0.

[0162] Ribotyping and PFGE: Strains were subjected to PFGE, as described in, McDougal, et al., J. CLIN. MICROBIOL., 41: 5113-5120 (2003). Ribotyping was performed using the RiboPrinter® system (Qualicon, Wilmington, Del.) according to the manufacturer's instructions. Each strain was analyzed using two restriction enzymes, EcoRI and PvuII. Computer-generated riboprints for each strain were assigned to an EcoRI or PvuII ribogroup by the software, and then visually inspected for correct assignment into ribogroups. Individual ribotypes were assigned to a strain based on identity of ribogroups for both restriction enzyme

Results

[0163] In addition to simultaneously providing an ability to obtain gene-by-gene information for a strain under investigation, the nucleic acid array of Example 1 was used to determine the relatedness of each strain that was being analyzed. This was accomplished by using hierarchical clustering to develop a dendogram that compared the normalized signal intensity of each qualifier for a given strain to the signal intensity of the same qualifier across all strains analyzed (FIG. 8A). Using this approach, strains that have similar signal intensities for all qualifiers are positioned closer together on the dendogram than strains with divergent genomic compositions (differing signal intensities for the same qualifiers).

[0164] The data were validated by several observations. First, as shown in FIG. 8A, strains 1, 10/13 (both are the same strain), COL and Mu50 were independently tested multiple times and replicates were considered more closely related than other strains analyzed. Isolates 10 and 13 are the same strain; they were included twice to serve as a control for this analysis. Second, in silico comparisons demonstrated that among sequenced strains: (1) MW2 is most closely related to MSSA-476, (2) Mu50 is closely related to N315 and moderately related to EMRSA-16, and (3) COL is closely related to NCTC 8325. Each of these relationships was detected in the dendrogram (FIG. 8A). Finally, both ribotyping and PFGE clustering agreed with the dendrogram derived from nucleic acid array data (Table 13).

TABLE 13
Ribotyping, Nucleic Acid Array and PFGE Genotyping Results

| | Nucleic | | |
|---|---|---|---|
| Strain | Acid Array | Ribotype | PFGE |
| CDC 1 | 1.1 | XII | USA300 (0.0114) |
| CDC 3 | 1.1 | XII | USA300 (0.0114) |
| CDC 4 | 1.1 | XII | USA300 (0.0114) |
| CDC 6 | 1.1 | XII | USA300 (0.0114) |
| CDC 5 | 1.1 | XII | USA300 (0.0114) |
| CDC 2 | 1.2 | XII | USA300 (0.0047) |
| CDC 19 | 1.3 | XII | USA500 TYPE (.0004) |
| NCTC 8325 | 1.4 | XIII | N.D. |
| COL (Lab 1) | 1.5 | IX | N.D. |
| COL (Lab 2) | 1.5 | N.D. | N.D. |
| COL (Repository-1) | 1.5 | N.D. | N.D. |
| COL (Lab 3) | 1.5 | N.D. | N.D. |
| CDC 10 | 2.1 | XI | USA400 (0.0051) |
| CDC 13 | 2.1 | XI | USA400 (0.0051) |
| CDC 12 | 2.2 | XI | USA400 (0.0051) |
| CDC 9 | 2.2 | XI | USA400 (0.0051) |
| MW2 | 2.3 | XI | N.D. |
| CDC 7 | 2.4 | IV | USA400 (0.0199) |
| CDC 8 | 2.5 | XI | USA400 (0.0051) |
| CDC 14 | 2.6 | X | USA400 (0.0172) |
| MSSA-476 | 2.7 | XI | N.D. |
| CDC 11 | 2.8 | XI | USA400 (0.0080) |
| CDC 21 | 2.9 | VI | USA700 TYPE (0.0097) |
| CDC 16 | 3.1 | V | USA100/800 |
| N315 | 3.2 | N.D. | N.D. |
| COL (Repository-2) | 3.3 | N.D. | N.D. |
| CDC 20 | 3.4 | II | USA600 TYPE |
| CDC 17 | 3.5 | VII | USA100-B (0.0022) |
| Mu50 (1) | 3.6 | N.D. | N.D. |
| Mu50 (2) | 3.6 | N.D. | N.D. |
| CDC 15 | 4.1 | III | USA600 (0.0121) |
| CDC 18 | 4.2 | VIII | USA200 TYPE |
| EMRSA-16 | 4.3 | I | N.D. |
| Ribotyping, GeneChip and PFGE results are shown for each strain. Strains were observed to fit into 4 major clusters by nucleic acid array analysis (FIG. 8A.). Individual strains within each of these clusters are further distinguished. For example, nucleic acid array profiles 2.2 and 2.3 are different strains within cluster number two. Strains with the same profile numbers are identical. Ribotyping results distinguished strains as belonging to one of 12 different ribogroups (I-XII). | | | |
| # PFGE results demonstrated that strains belonged to 8 different groups (USA100-USA800; 80% identity cut-off). Number in parenthesis represents the strain's identification number. Strains with same identification number are considered identical. | | | |

[0165] Despite the similarity between the three-genotyping approaches, nucleic acid array results appeared to be the most discriminative. For instance, ribotyping data indicated that 7 strains fit into ribogroup XII and 8 strains belonged to ribogroup XI. As shown in Table 13, both PFGE and nucleic acid array-based typing further distinguished members of each ribogroup into subgroups. In the case of ribogroup XII, PFGE and nucleic acid array analysis further distinguished strains into identical subgroups. However, five strains from ribogroup XI were considered identical by PFGE (isolates 8, 9, 10, 12 and 13), but were further distinguished as 3 separate strains by nucleic acid array (Table 4; FIGS. 8A and 8B). To determine which typing method provided more accurate results, adjusted-call determinations were compared for all qualifiers across these 5 strains. As shown in FIG. 8B, 36 genes including the antimicrobial resistance determinants ermA, bleO and aadA were considered to be present in strains 10 and 13, but absent from strains 9, 12, and 8. To determine if these nucleic acid array predictions were correct, strains were tested for growth on antibiotic-containing agar plates. Strains 10 and 13 formed colonies on plates containing kanamycin, whereas isolates 8, 9 and 12 did not, confirming that the five strains are not identical in genetic composition (FIG. 8C). In addition, adjusted detection call predictions indicated that 31 genes were present in strains 9 and 12 but absent from strains 10 and 13. Collectively these results suggested that nucleic acid array-based genotyping was more discriminative than both ribotyping and PFGE.

[0166] The nucleic acid array technology is expected to provide novel information about S. aureus pathogenesis, antimicrobial resistance, and vaccine tolerance. For example, studies can now be carried out to identify whether the Panton-Valentine leukocidin virulence factor genes are also present in health care institution-associated strains. Such a study will be helpful in defining whether a subset of genes can distinguish community associated—from nosocomial—ORSA strains. Defining the entire repertoire of genes that are conserved across diverse CO-ORSA strains may also clarify how the proteins that they encode influence the prevalence of ORSA within the community.

[0167] Several genes have been linked to a particular type of S. aureus infection, such as tst with toxic shock syndrome and exofoliative toxins with scaled-skin syndrome (SSS). It is expected that the nucleic acid array technology will also provide the ability to associate subsets of S. aureus genes with particular types of infections. Moreover, because nucleic acid arrays can contain alleles of many genes, the potential exists to associate a particular phenotype with a gene allele. Studies evaluating agr-types have demonstrated that allelic types do influence pathogenesis and thus their identification is important for epidemiological studies. Many clinical isolates are agr group-1. agr group-3 has been associated with CA-MRSA, group-2 has been linked to intermediate glycopeptide resistance, and group-4 has been associated with exfoliative toxin producing strains. The nucleic acid array technology can be used to analyze the association of specific agr-type(s), and other genes/alleles, with disease causing strains.

[0168] Furthermore, the nucleic acid array approach can allow for one to determine whether a group of similar strains under investigation are clonal or slightly divergent in genetic composition. This distinction is an important aspect of monitoring strain outbreaks. The technology can also be used for analyzing the acquisition of antimicrobial resistance determinants and may provide a means to evaluate whether other genetic determinants confer a predisposition, or contribute to, the development of resistance.

[0169] In many cases, MLST, ribotyping, and PFGE provide the level of discrimination needed to monitor strains circulating throughout the community and healthcare environments. These techniques are rapid, do not require extensive analysis, and can be accomplished at a fraction of the cost associated with microarrays. However, none of these methods allows one to simultaneously define the genes that constitute the organism(s) under investigation on a genome scale. In addition to the uses described above, the present invention contemplates the approach described herein to be helpful in characterizing isolates within the same ribo-, MLST- or PFGE-group, or in studies where further characterization is needed.

[0170] The foregoing description of the present invention provides illustration and description, but is not intended to be exhaustive or to limit the invention to the precise one disclosed. Modifications and variations consistent with the above teachings may be acquired from practice of the invention. Thus, it is noted that the scope of the invention is defined by the claims and their equivalents.

What is claimed is:

1. A nucleic acid array comprising a plurality of polynucleotides and a plurality of discrete regions, wherein each of said plurality of polynucleotides is stably attached to a respective discrete region selected from said plurality of discrete regions, and wherein the plurality of polynucleotides includes two or more different polynucleotides, each of which is specific to a different respective strain selected from a plurality of strains of a non-viral species.

2. The nucleic acid array according to claim 1, wherein said plurality of polynucleotides includes at least one polynucleotide probe which is common to said plurality of strains.

3. The nucleic acid array according to claim 2, wherein the non-viral species is a bacterium.

4. The nucleic acid array according to claim 3, wherein the bacterium is Staphylococcus aureus.

5. The nucleic acid array according to claim 4, wherein said plurality of strains comprises two or more Staphylococcus aureus strains selected from the group consisting of COL, N315, Mu50, EMRSA-16, MSSA-476, MW2, and 8325.

6. The nucleic acid array according to claim 4, wherein said plurality of polynucleotides includes at least 100 polynucleotides, each of which is capable of hybridizing under stringent or nucleic acid array hybridization conditions to a different respective sequence selected from SEQ ID NOs: 1 to 7,852, or the complement thereof.

7. The nucleic acid array according to claim 4, wherein said plurality of polynucleotides includes at least 1,000 polynucleotides, each of which is capable of hybridizing under stringent or nucleic acid array hybridization conditions to a different respective sequence selected from SEQ ID NOs: 1 to 7,852, or the complement thereof.

8. The nucleic acid array according to claim 4, wherein said plurality of polynucleotides includes six polynucleotides, each of which is specific to a different respective Staphylococcus aureus strain selected from the group consisting of COL, N315, Mu50, EMRSA-16, MSSA-476, and 8325.

9. The nucleic acid array according to claim 8, wherein said plurality of polynucleotides includes a first set of polynucleotides, each of which is capable of hybridizing under stringent or nucleic acid array hybridization conditions to a different respective sequence selected from SEQ ID NOs: 3,817 to 7,852, or the complement thereof, and wherein said plurality of polynucleotides further includes a second set of polynucleotides, each of which is capable of hybridizing under stringent or nucleic acid array hybridization conditions to a different respective sequence selected from SEQ ID NOs: 1 to 3,816, or the complement thereof.

10. The nucleic acid array according to claim 9, wherein each of said first and second sets comprises at least 100 polynucleotides.

11. The nucleic acid array according to claim 1, wherein said non-viral species is Staphylococcus aureus, and said plurality of polynucleotides includes at least 100 polynucleotides, each of which is capable of hybridizing under stringent or nucleic acid array hybridization conditions to a different respective sequence selected from SEQ ID NOs: 7,704, or the complement thereof.

12. The nucleic acid array according to claim 11, wherein said non-viral species is Staphylococcus aureus, and said plurality of polynucleotides includes at least 1,000 polynucleotides, each of which is capable of hybridizing under stringent or nucleic acid array hybridization conditions to a different respective sequence selected from SEQ ID NOs: 7,704, or the complement thereof.

13. The nucleic acid array according to claim 11, wherein said plurality of polynucleotides comprises at least one oligonucleotide probe selected from SEQ ID NOs: 15,737.

14. The nucleic acid array according to claim 11, wherein said plurality of polynucleotides comprises at least probe for a Staphylococcus aureus gene selected from the group consisting of a virulence gene, an antimicrobial resistance gene, a multilocus sequence typing gene, a leukotoxin gene, an agrB gene, and a gene encoding a ribosomal protein.

15. A method comprising:
preparing a nucleic acid sample from a sample of interest; and
hybridizing the nucleic acid sample to the nucleic acid array of claim 1 to detect the presence or absence of a strain of said non-viral species.

16. A method comprising:
preparing a nucleic acid sample from a sample of interest; and
hybridizing the nucleic acid sample to the nucleic acid array of claim 4 to detect or monitor gene expression of a strain of said non-viral species.

17. A method comprising:
preparing a nucleic acid sample from a sample of interest; and
hybridizing the nucleic acid sample to the nucleic acid array of claim 1 to type a strain of said non-viral species.

18. A method of making a nucleic acid array, comprising the steps of:
selecting a plurality of polynucleotides, each of which is specific to a different respective strain selected from a plurality of strains of a non-viral species; and
attaching said plurality of polynucleotides to respective regions on one or more substrate supports.

19. A polynucleotide collection comprising at least one polynucleotide capable of hybridizing under stringent or nucleic acid array hybridization conditions to a respective sequence selected from SEQ ID NOs: 1 to 7,852, or the complement thereof.

20. A protein array comprising a plurality of probes, wherein each of said probes is specific to a different respective strain selected from a plurality of strains of a non-viral species, and each of said probes is capable of binding to a different respective protein of said non-viral species.

The application's sequence listing, which the Patent Office published only in electronic form, follows.

SEQUENCE LISTING (282011 sequences)

SEQ ID NO: 1 - DNA, 1629 bp, Staphylococcus aureus
atgcaacaactcaaacaaaaacgtgtcggtatctatgttcgtgtatcaacggaaatccaaagtactgaaggctatagtatcgatggacaaatcaatcaaattcgagaatattgtgatttcaataactttgttgttgtagatgtatacgcggatagaggtatctctggaaaatctatgaaccgaccagaactacaacgtttgttaaaagatgcgaacgaaggtcagattgattctgttatggtctacaaaacaaaccgactagcacgtaacacttctgacttactcaaaattgttgaagaccttcatcgtcaaaatgtcgaattcttcagcttatctgagcgtatggaagtcaatacaagcagtggtaaattgatgctacaaattctagcgagtttttcagaatttgaaagaaataatattgtcgaaaatgtattcatgggtcaaacccgacgcgctcaagaaggctattatcaaggcaatttgccgctgggctatgacaaaataccggatagcaagcatgaactcatgataaaccaacatgaagcgaatattgtcaaatatatatttgagtcatatgctaaaggccacggatatcgtaaaattgcgaatgcactcaatcacaaaggatacgtgactaaaaaaggaaagcctttcagtattggttcagtgacctatatcttatctaatccattctatgttggtaaaattcaattcgcaaagtacaaagattggaatgaaaagcgtcgtaaagggctgaatgataaaccaataatagctgaaggtaagcattcccctattattattcaagacttatgggataaagtccaattacgtaaaaaacaagtcagtcaaaaacctcaagtccacggtaaaggaactaatctattaacaggtatcgttcattgtccacaatgtggtgcaccaatggcagctagtaacacaacgaacacattgaaagatggtaccaagaagcgaatacgttattattcttgcagtaacttccgaaacaaaggctcaaaagtatgttctgcgaatagcgttagagctgatgtgattgagaaatacgtcatggatcaaatactcgaaattgtcaaaagtgataaagtcattaaccaagtcttagaacgtgtcaatcaagaaaataaagtcgatattggtgcattgaaccacgatatcgcttataaacaacaacaatacgatgaagtcagcgggaaactccataatttagttaaaaccattgaagataatccggacctaacatctgcattgaaagcaactattcatcaatatgaaacacaactcaatgacattacaaatcaaatgaatcaactcaaacagcaacaaaatcaagagaaactatcttatgatacgaaacaaatcgctgccctattacaacgaatatttcaaaatatagaatcaatggataaagcacaactcaaagcattatatcttacagtcattgaccgtattgatattcgtaaagacggtaatcataaaaaacagttctacgttacactaaaactcaataatgaaattattaaacaacttttcaataatmcccctctcgacgaagtgctcctcagcacttcgtctttatttttgcctcaaacgctctttcttcaaatctaa

SEQ ID NO: 2 - DNA, 477 bp, Staphylococcus aureus
atgaaagaaagatatggaacagtatataaaggctctcagaggctcatagacgaggaaagtggagaagtaatagaggtagataagctataccgtaaacaaacgtctggtaactttgtaaaagcgtatatcgtccaattaataagtatgttagatatgataggcggtaaaaagctcaagattgttaattatatattagataatgtacatctaagtaataacacaatgatagcaactgttagagaaatagcagaaggaacaaatacaagcacgaaaaccgtaaatacaacgcttaaaatcttagaagaaggaaatatcattaaaagaagaactggagcattaatgctaaacccagagctactcatgagaggcgatgaccaaaaacaaaaatacctcttactcgaatttgggaactttgagcaagaggacgaccaaaagcaagaaaatgctttatcagaatattattctttcaaggagtag

SEQ ID NO: 3 - DNA, 477 bp, Staphylococcus aureus
atgaaagaaagatatggaacagtctataaaggctctcagaggctcatagacgaagaaagtggagaagtcatagaggtagacaagttataccgtaaacaaacgtctggtaacttcgtaaaggcatatatagtgcaattaataagtatgttagatatgattggcggaaaaaaacttaaaatcgttaactatatcctagataatgtccacttaagtaacaatacaatgatagctacaacaagagaaatagcaaaagctacaggaacaagtctacaaacagtaataacaacacttaaaatcttagaagaaggaaatattataaaaagaaaaactggagtattaatgttaaaccctgaactactaatgagaggcgacgaccaaaaacaaaaatacctcttactcgaatttgggaactttgagcaagaggcaaatgaaaaacaagaaaatgcattatctgattattattctttcaaggactag

SEQ ID NO: 4 - DNA, 1173 bp, Staphylococcus aureus
atgacccaagtacattttacactgaaaagcgaagagattcaaagcattattgaatattctgtaaaggatgacgtttctaaaaatattttaacaacggtatttaatcaactaatggaaaatcaacgaacagaatatattcaagcaaaagaatatgaacgaacagaaaaccgacaaagtcaacgaaatggctattatgagcgcagctttacgacacgtgtaggcacgctagaattaaaagtacccagaacacgtgatggccatttttcacccacagtgtttgaacgttatcaacgaaacgaaaaagccctcatggcttcaatgttggaaatgtatgtatcaggcgtttcaactcgtaaagtatcaaaaattgtggaagaactttgtggtaaatccgtctctaagtccttcgtttctagcttaacagaacagctagaacctatggttaacgagtggcagaatcgtttattatcagaaaaaaattatccttacttaatgaccgatgtactctatataaaagtacgagaagaaaatcgagtactctcaaaaagctgtcatatagcgattggaataaccaaagatggcgaccgtgaaattatcggcttcatgattcaaagtggcgaaagcgaagagacctggacaacattttttgaatacctaaaagaacgcggtttacaaggtacggaactcgttatttctgatgcgcacaaaggattagtctctgccattagaaaatccttcaccaacgtaagttggcaaagatgccaagttcacttcctaagaaatatctttaccaccattcctaaaaaaaattcaaaatctttcagagaagctgttaaaggaatttttaagttcacagatattaacttagcgcgtgaggctaaaaatcgattgattcatgattatatcgatcaaccaaaatattcaaaagcttgcgcatcattggatgatggattcgaagacgcctttcaatataccgtacaaggaaattcccacaatcgactaaagagtaccaatctaattgaacgactgaatcaagaagtacgcagaagagaaaagattattcgcatcttccccaatcaaacatcagccaatcgcttaattggagccgttcttatggacctacatgatgaatggatttattcttcaagaaaatacatcaattttgataagtag

SEQ ID NO: 5 - DNA, 705 bp, Staphylococcus aureus
atgaataaaaaattactaatgaawtttttyatcgtaagccctttgttgcttgcgacaatcgctacagrttttacccctgttcccttatcatctaatcaaataatcaaaactgcaaaagcatctacaaacgataatataaaggatttgctagactggtatagtagtgggtctgacrcttttacaaatagtgaagttttagataattccttaggatctatgcgtataaaaaacacagatggcagcatcagcytkataatttttccgagtccttattatagccctrcttttwcaaaaggggaaaaagttgacttaaacacaaaaagaactaaaaaaagccaacatactagcgaaggaacttrkatycatttccaaataagtggygttacaaatactgaaaaattacctactccaatagaactacctttaaaagttaaggttcatggtaaagatagyccmttaaagtattggccaaagttcgataaaaaacaattagctatatcaactttagactttgaaattcgtcatcagctaactcaaatacatggattatatcgttcaagcgataaaacgggtggttattggaaaataacaatgaatgacggatccacatatcaaagtgatttatctaaaaagtttgaatacaatactgaaaaaccacctataaatattgatgaaataaaaactatagaagcagaaattaattaa

SEQ ID NO: 6 - DNA, 1560 bp, Staphylococcus aureus
gtgaatttattaagcctcctactcattttgctggggatcattctaggagttgttggagggtatgttgttgcccgaaatttgttgcttcaaaagcaatcacaagctagacaaactgccgaagatattgtaaatcaagcacataaagaagctgacaatatcaaaaaagagaaattacttgaggcaaaagaagaaaaccaaatcctaagagaacaaactgaagcagaactacgwgaaagacgtagygaacttcaaagacaagaaacccgacttcttcaaaaagaagaaaacttagagcgyaaatctgatctattagataaaaaagatgagattttagagcaaaaagaatcaaaaattgaagaaaaacaacaacaagtagatgcaaaagagagtagtgttcaaacgttaataatgaagcatgaacaagaattagaacgcatctccggtctcactcaagaagaagctattaatgagcaacttcaaagagtwgaggaagaactgtcacaagatattgcagtacttgttaaagaaaaagaaaaagaagctaaagaaaaagttgataaaacagcaaaagaattattagctacagcagtacaaagattagcagcagatcacacaagtgaatcaacggtatcagtagttaacttacctaatgatgagatgaaaggtcgaatcattggacgwgaaggacgaaacatccgyacacttgaaactttaactggcattgatttaattattgatgacacaccagaagcrgttatattatctggttttgatccaataagaagagaaattgctagaacagcacttgttaacttagtatctgatggacgtattcatccaggyagaattgaagatatggtcgaaaaagctagaaaagaagtagacgatattatwagagaagcaggtgaacaagctacatttgaagtgaacgcacataatatgcatcctgacttagtaaaaattgtagggcgtttaaactatcgtacragttacggtcaaaatgtacttaaacattcaattgaagttgcgcatcttgctagtatgttagctgctgagctaggcgaagatgagacattagcgaaacgagctggacttttacatgatgttggtaaagcaattgatcatgaagtagaaggtagtcatgttgaaatcggtgtagaattagcgaaaaaatatggtgaaaatgaaacagttattaatgcaatccattctcaycatggtgatgttgaacctacatctattatatctatccttgttgctgctgcagatgcattgtctgcggctcgtccaggtgcaagaaaagaaacattagagaattatattcgtcgattagaacgtttagaaacgttatcagaaagttatgatggtgtagaaaaagcatttgcgattcaggcaggtagagaaatccgagtgattgtatctcctgaagaaattgatgatttaaaatcttatcgattggctagagatattaaaaatcagattgaagatgaattacaatatcctggtcatatcaaggtgacagttgttcgagagactagagcagtagaatatgcgaaataa

SEQ ID NO: 7 - DNA, 1560 bp, Staphylococcus aureus; identical to SEQ ID NO: 6

SEQ ID NO: 8 - DNA, 1560 bp, Staphylococcus aureus; identical to SEQ ID NO: 6

SEQ ID NO: 9 - DNA, 6672 bp, Staphylococcus aureus
atgtttgataagaataaccctcaraactaycaagctagrggraatgtagctgcattaggtcgtgtgaatgcaaatgattctacagatcayggtaactttaacggtatttcaaaaactgttaatgtaaaaccagattcagaattaattatcaactttactactatgcaaacgaatagtaagcaaggtgcaacaaatttagttattaaagatgctaagaaaaatactgaattagcaactgtaaatgtagctaagactggtactgcacacttatttaaagtaccaacagatgctgatcgtttagatttasaatttattcctgacaatacagcagttgctgatgcttcaagaattacaacaaataaagatggttataaatactattcattcattgataatgtaggtctattctcaggatcacatttatatgtcaaaaatagagatttagcaccgaaagcaacwaayaataaagaatwtacwattaatactgaaatcggtaacaatggtaattttggtgcttcattgaaagcagatcaatttaaatatgaagtaacattaccacaaggtgtaacttacrttaatgattcattaactacaacattccctaatggtaatgaagacagtacagtattgaaaaatatgactgtyaattatgatcaaamtgcaaataaagttacatttacaagccaaggtgtgacaacrgcacgtggtacacayackaaagaagtkttattcccagataaatctttaaaattatcatataaagttaatgttgcgaatatygatacacctaaaaatattgattttaatgaaaaattaacatatcgtactgcttcagatgttgtaattaataatgcgcaaccagaagttacactaactgcagatccattttcagtagcrgttgaaatgaacaaagatgcgttgcaacaacaagtwaactcacaagttgatratagtcattacacaacagcatcaattgcagaatacaataaacttaaacaacaagcagayactattttaaatgaagatgcgaatcatgttgaaactgcaaatcgtgcatctcaagcggatattgatggtttagtaactaaattacaagctgcattaattgataatcaagcagcaattkctgaattagatrctaaagctcaagaaaaggttacagcagcacaacaaagtaaaaaagttacgcaagatgaagttgcagcgcttgtgactaaaattaacaatgataaaaataatgcaatcgcagaaattaataaacaaacaacakcacaaggtgtcacaactgaaaaagataatggtatcgcagtgttrgaacaagatgtgattacaccaacagttaaacctcaagcgaaacaagatattatccaagcagttacaactcgtaaacaacaaattaaaaagtcaaatgcatcattacaagatgaaaaagatgtagcaaatgataaaattggtaaaattgaaacaaaggcaattaaagatattgatgcagcaacaacaaatgcacaagtagaagccattaaaacaaaagcratcaatgatattaatcaaactrcacctgctacaacagctaaagcagcagctcttgaagaatttgacgaagttgttcaagcacaaattgatcaagcacctttaaatcctgatacaacaaatgaagargtagcggaagckattgaacgtattaatgcagctaaagtttcwggtgttaaagcaattgaagcgacaacgactgcacaagatttagawagagttaaaaacgaagaaatmtymaaaattgaraatattackgactctacgcaaacaaaaatggatgcctataatgaagttaaacaagctgcwacagctagaaaagctcaaaatgctacagtttcaaatgcaacwratgaagaagtagcagaagctgatgcagcagtagawgcagctcaaaagcaaggtttacatgacatccaagttgttaaatcaaaacaggaagtkgctgatacwaaakcaaaagtattagataaaatcaatgcmattcaaacacaagcwaragttaaacctgcagckgatasagaagtagamaacgcatataatacacgtaaacaagaaatycaaaatagyaayrcttcaacwacagaagaaaaasaagckgcatatacrsaattagatrcwaaaaarcaagargcaagaacraatcttgatgctgcaaatacaaacagtgctgtaacracagctaaagacaatggtattgctgcaattaatcaagttcaagctgccacwactaagaaatcggatgctaaagcagaaatygctcaaaaagcaagtgaacgtaaaacwgcaatcgaagcaatgaatgattcgactactgaagaacaacaagcagcgaaagawaaagtkgatcaagcwgtwstkwmtgcaaacgctgatatwgataatgcygcagcaaayamwgatgtrgataatgcaaaaactacaaatgaagctacaatcgcagccattacacctgatgcaaatgttaaacctcaagcgaaacaagcaattgcagataaagtacaagckcaagaaamagcaattgatgctaataacggtkcaacaacagaagaraaarcagcwgcgaaacaacaagtycaaacwgaaaaaacgacwgctgatrcagcaatagatgswgcacatwcaaatgcrgaagttgaagcggctaaraatgcagaaattgctaaaattgaagcrattcarccagcracaacaackaaagatratgcgaaasaagcmattgctacgaaagcgaatgaacgtaaarcagcmatygctcaaacgcaagasattacwgcwgaagaaattgcagcggctaatgcgracgtagataatgcwgtracasaagcaaayarcmacattgarrctgctaatagtcaaaatgawgtwgaycaagcgaaracracaggtgaarctagtattgatcaagtracaccaacwgttaataaaaaagcwacwgcacgtaatgaaatcacwrcaatwttaaataacaarttrcaagmrattcaagctacgccagatgcaacagatgaagaraaacaagcagcwgawrcwgaagcwaatactgaaaatgstaaagcaawtcaagccatyrcagcagcwacwacwaaygcasaagtwgatgargcwaaaacwaatgcagaagcrgcrattaaygckgtaacaccaaaagttrtgaagaaacaarcrgckaaagatgaratygatcaattacaagcarcrcaaacarmkgttatyaataaygatcaraacgcwacaamtgaagaaaaagaagcrgckattcaacaaytagcaacagcagttacagacgcgaaaaataayattacagctgcaactgayrataatggtgtagatcakgckaaagaygcwggwaaraattcrattcaaagyacrcaaccagcaacakcrgttaaatcraatgckaaaaatgawgtwgatcaagctgtgacaactcaaaatcaagcaattgataatacwacwggtgcwacractgaagagaaaaatgcagcaaaagatttagtttywaaagctaaagaaaaagcrtatcaagatatyttaaatgcrcaaacractaaygatgttacrcaaattaaagatcaagcagttgctgayattcaaggtattactgcwgatacracaattaaagatgtwgckaaagatgaattagcaacaaaagcaaasgaacaaaaagcrcttattgcacaaactgcagatgcgactactgaagaaaaagaacaagcaaatcaacaagtagaygcacaattaacrcaaggtaatcaaaatattgaaaatgcamagtcaatygatgaygtaaacactgcaaaagataatgcaattcaagcmatygacccaattcaagcatcaacagatgttaaaacgaatgcaagagcggaattgctaamtgaaatgcaaaataaaataactgaaatmcttaatrataatrmgactacwaatgaagaaaaaggwaamgatatwgraccagttagagcagcatatgaagaaggtttaaataatattaatgcagcaactactacaggtgatgtaactactgctaaagatacagcagtacaaaaagttcaacaacttcatgcaaatcctgttaagaaaccagcaggtaaaamagaattagatcaagctgcagctgataagaaaacacaaatwgaacaaacaccaaatgcrtcacaacaagaaattaatgatgcaaaacaagaagttgatrcwgmrttaaatcaagcgaaaacaaatrtygatcaatcatcaacaaatgaatatgttgataatgcrgttaaagaaggraaagctaaaattaatgcagttaaaacatttagtgagtacaaaaaagatgctttagctaaaattgmagatgcatataaygctaaagtraacgaagcggataactctaacgcatcgacttcaagtgaaattgctgaagcgaaacaaaaacttgctgaattaaaacaaacwgcggatcaaaatgttaatcaagctacttctaaagatgacattgaagttcaaattcataatgacttagataatattaacgattacacaattccaacmggtaaaaaagaatcrgctacaacagatttatatgcytatgcagatcagaagaaaaataatatttyagctgacactaatgcaacacaagatgaaaarcaayaagcaattaagcaagttgaccaaaatgttcaaactgcattagaaagcattaataatggtgtggataatagtgatgttgatgatgcattaacacaaggtaaagcgacaattgatgcagttcaagtagatgctactgttaaacctaaagcaaaccaagcgattgatgctaaagcacaggaaacgaaagagtctatagaccaaagtgaccagttaactgctgaagaaaaaacggctgcattagcaacgattaaacaaattacagatcaagctaaacaaggtattactgatgcaacaacaactgctgaagttgaaaaagcgaaagctcaaggacttgaggcgtttgataacattcaaattgactcaacagaaaaacaaaaagctatcgaagaattagaaactgcactagaccagattgaagcaggagtaaatgtcgacgctgatgctacaactgaagaaaaagaagcgtttacgaatgcattagaagacattttatcaaaagcaactgaagatatttctgatcaaactacaaatgcagaaatcgctactgtcaaaaatagtgcgcttgaacaacttaaagcacaacgtattaatccagtagttaagaaaaatgctttggaagcaattagagaagtggttaacaagcaaatagaaataattgaaaatgcagatgcatcggcgaaagaaattgcacgtacagatttaggtagatattttgacagatttgctgataaattagataaaacgcaaacaaatacagaagttgatgaattacaaaatgtaacgatacctgcaattgaagcgattgtacctcagaaggatccaaatgctaatgatactaatagtggttcagataataatgatgcaacagcaaattcaaatgctaatgcaacaccagaaaatactggacaacctaatgtaactgagtcaacagataatgccaatgcagatacgtcttcaacaacgacaaataatcataatgatgcggcaactggtggaacaacagcaacatcaacagacaattcggcaacgggtaatggtacaagtgataaatcagaagtagaatcaactaataacggcacaactgataaatctgcaacagaaacagataatgcaacgccagcagaaagcgcaagaaataacaatagtacaactgcaacaaacgagaacgcaccaacaggatcaacagcaacggttccaacaacaaatgcgagcacaggtgcagcatcatctgctgatagcaaagataatgcatctgtaaatgattcaaaacaaaatgctgaagtaaataatagtgctgaatctcaatcaactaatggcaaggttgcacaaccaaaatctgaaaataaagctaaggatgaaaaagatggtagagattcaacaaatcaaagtatggttgaatcaacaactgaaacattgccttcagcagacattacagaaccaaaagtaccttctaatacagagaaagataaaaaagaaagtacgacaaatcaaacagatgctggacaacttaagtctgaaactaacgttgcatctaacgaagcagataaatctgaaggcaacgttgatactgatgtatcgaataaaccatcaacatctaaaccgtcagaagcaaaagataaagcgacttcgactgaggatagtcaaaaggctgacatggcaacatcagataaaaaagataatcaagcagcaattggtgcaactgcagatgtaaacaataaagctacgcaaaacgacggtgccaatgcatctccagctacagtttcaaatggaagcaatagtgctaatcaagatatgcttaaagtaactaacactgacaaacaccaagctaaggcaacatcagcgcaacaaggtaaagaaaataaagcaaaacaacaagctaaaactttaccagatactggtatgtcacataatgacgatttaccatatgttgaattagctctaggtgcaggtatggcattcttaattagaagattcactaagaaagaccaacaaactgaagaataa

SEQ ID NO: 10 - DNA, 6672 bp, Staphylococcus aureus; identical to SEQ ID NO: 9

SEQ ID NO: 11 - DNA, 7446 bp, Staphylococcus aureus
atgaatttattcagacaacaaaaatttagtatcagaaaatttaatgtcggtattttttcagctttaattgccactgttacttttatatctactaacccgacaacagcgtctgcagcagagcaaaatcagcctgcacaaaatcaaccagcacaaccagctgatgccaatacacagcctaacgcaaatgctggtgctcaagctaatcctgcagcacagccagcaaaccaaggtggacaggctaatccagcaggaggagcagcacaaccagctggacaaggtaatcaagctgatccgaataacgctgcacaagcacaacctggaaatcaagcagcaccggcaaaccaagcaggtcaaggaaataaccaagcaacacctaataataatgcaacaccggcaaatcaaacacagccagcgaatgctccagcagcagcgcaaccagcagcacctgtagcagcaaacgcacaaactcaagatccaaatgctagcaatactggtgaaggcagtattaatacgacattaacatttgatgatcctgccatatcaacagatgagaatagacaggatccaactgtaactgttacagataaagtaaatggttattcattaattaacaacggtaagattggtttcgttaactcagaattaagacgaagcgatatgtttgataagaataaccctcaaaactatcaagctaaaggaaacgtggctgcattaggtcgtgtgaatgcaaatgattctacagatcatggtaactttaacggtattacaaaaactgtaaatgtaaaaccagattcagaattaattattaactttactactatgcaaacgaatagtaagcaaggtgcaacaaatttagttattaaagatgctaagaaaaatactgaattagcaactgtaaatgttgctaagactggtactgcacatttatttaaagtaccaactgatgctgatcgtttagatttacaatttattcctgacaatacagcagttgctgatgcttcaagaattacaacaaataaagatggttataaatactattcattcattgataatgtaggtctattctcaggatcacatttatatgtcaaaaatagagatttagcaccgaaagcaactaacaataaagaatatactattaatactgaaatcggtaacaatggtaattttggtgcttcattaaaagcagatcaatttaaatatgaagtaacattaccacaaggtgtaacttacgttaatgattcattaactacaacattccctaatggtaatgaagacagtacagtattgaaaaatatgactgttaattatgatcaaactgcaaataaagttacatttacaagccaaggtgtgacaacggcacgtggtacacacactaaagaagttttattcccagataaatctttaaaattatcatataaagttaatgttgcgaatatcgatacacctaaaaatattgattttaatgaaaaattaacatatcgtactgcttcagatgttgtaattaataatgcgcaaccagaagttacactaactgcagatccattttcagtagcggttgaaatgaacaaagatgcgttgcaacaacaagtaaactcacaagttgataatagtcattacacaacagcatcaattgcagaatacaataaacttaaacaacaagcagacactattttaaatgaagatgcgaatcacgttgaaactgcaaatcgtgcatctcaagcggatattgacggtttagtaactaaattacaagctgcattaattgataatcaagcagcaattgctgaattagatactaaagctcaagaaaaggttacagcagcacaacaaagtaaaaaagttacgcaagatgaagttgcagcgcttgtgactaaaattaacaatgataaaaataatgcaatcgcagaaattaataaacaaacaacatcacaaggtgtcacaactgaaaaagataatggtatcgcagtgttagaacaagatgtgattacaccaacagttaaacctcaagcgaaacaagatattatccaagcagttacaactcgtaaacaacaaattaaaaagtcaaatgcatcattacaagatgaaaaagatgtagcaaatgataaaattggtaaaattgaaacaaaggcaattaaagatattgatgcagcaacaacaaatgcacaagtagaagccattaaaacaaaagcaatcaatgatattaatcaaactacacctgctacaacagctaaagcagcagctcttgaagaatttgacgaagttgttcaagcacaaattgatcaagcacctttaaatcctgatacaacaaatgaagaagtagcggaagctattgaacgtattaatgcagctaaagtttctggtgttaaagcaattgaagcgacaacgactgcacaagatttagaacgcgttaaaaacgaagaaatattcaaaattgagaatattacggattcaactcaaactaaaatggatgcttataaagaagttagacaagcagctacagctagaaaagcgcaaaatgctacagtttcaaatgcaactgatgaagaagtagcagaggcaaatgcagcagtagatgcagctcaaacagaaggtttacatgacatccaagttgttaaatcacaacaagaagtggctgatactaaagcaaaagtattagataaaatcaatgcaattcaaacacaagcaaaagttaaacctgcagctgatacagaagtagaaaacgcatataatacacgtaaacaagaaatccaaaatagcaatgcttcaactacagaagaaaaagaagctgcatatacagaattagatgctaaaaagcaagaagcaagaacaaatcttgatgctgcaaatacaaacagtgatgtaacaacagctaaagacaatggtattgctgcaattaatcaagtgcaagctgccacaactaagaaatcggatgctaaagcggaaatcgctcaaaaagcaagtgaacgtaaaactgcaattgaagcaatgaatgattcgactactgaagaacaacaagctgcaaaagataaagttgatcaagcagtagttactgcaaacgctgatatagataatgctacagcaaatacagatgtagataatgcaaaaactactaatgaagctacaatagctgcaattacgccagatgcaaatgttaaaccagcagcaaaacaagcaattgcagataaagtacaagctcaagaaacagcaattgatgctaataacggttcaacaacagaagaaaaagaagctgctaaacaacaagttcaaactgaaaaaacggctgctgatgcagcaatagatgcagctcattcaaatgtggaagttgaagcggctaaaaatgcagaaattgctaaaattgaagcgattcagccagcaacaacaactaaagataatgcgaaacaagcaattgctacgaaagcgaatgaacgtaaaacagcaatcgctcaaacgcaagatattactgctgaagaaattgcagcggctaatgcggacgtagataatgctgtgacacaagcaaatagcaacattgaagctgctaatagtcaaaatgatgtagaccaagcgaaaacgacaggtgaaactagtattgatcaagtaacaccaacagttaataaaaaagcaactgcacgtaatgaaatcacagcaattttaaataacaaattgcaagagattcaagctacaccagatgcaacagatgaagaaaaacaagcagctgatgcagaagcaaatactgaaaatggtaaagcaaatcaagccatttcagcagcaactactaacgcacaagttgatgaagcgaaagctaatgcagaagcagcaattaatgcggtaacaccaaaagttgttaagaaacaagcggctaaagatgagattgatcaattacaagcaacgcaaacaaatgttatcaataatgatcagaacgctacaaatgaagaaaaagaagcagctattcaacaattagcaacagcagttacagacgcgaaaaataatattacagctgcaactgatgataatggtgtagatacagcgaaagacgctggaaagaattcaattcaaagcacacaaccagcaacagcagttaaatcgaatgcgaaaaatgaagttgatcaagctgtgacaactcaaaatcaagcaattgataatacaactggcgctacaactgaagagaaaaatgcagcaaaagatttagttttaaaagctaaagaaaaagcgtatcaagatatcttaaatgcacaaacaactaatgatgttacgcaaattaaagatcaagcagttgctgatattcaaggtattactgcagatacaacaattaaagatgttgcgaaagatgaattagcaacaaaagcaaacgaacaaaaagcgcttattgcacaaactgcagatgcgactactgaagaaaaagaacaagcaaatcaacaagtagacgcacaattaacacaaggtaatcaaaatattgaaaatgcacagtcaatcgatgatgtaaacactgcaaaagataatgcaattcaagcaattgacccaattcaagcatcaacagatgttaaaacgaatgcaagagcagaattgctaactgaaatgcaaaataaaataactgaaatacttaataataatgagactactaatgaagaaaaaggtaacgatattggaccagttagagcagcatatgaagaaggtttaaataatattaatgcagcaactactacaggtgatgtaactactgctaaagatacagcagtacaaaaagttcaacaacttcatgcaaatcctgttaagaaaccagcaggtaaaaaagaattagatcaagctgcagctgataagaaaacacaaatagaacaaacaccaaatgcatcacaacaagaaattaatgatgcaaaacaagaagttgatactgaattaaatcaagcgaaaacaaatgtcgatcaatcatcaacaaatgaatatgttgataatgcagttaaagaaggaaaagctaaaattaatgcagttaaaacatttagtgagtacaaaaaagatgctttagctaaaattgaagatgcatataatgctaaagtaaacgaagcggataactctaacgcatcgacttcaagtgaaattgctgaagcgaaacaaaaacttgctgaattaaaacaaactgcggatcaaaatgttaatcaagctacttctaaagatgacattgaagttcaaattcataatgacttagataatattaacgattacacaattccaacaggtaaaaaagaatcagctacaacagatttatatgcttatgcagatcagaagaaaaataatatttcagctgacactaatgcaacacaagatgaaaagcaacaagcaattaagcaagttgaccaaaatgttcaaactgcattagaaaacattaataatggtgtggataatggtgacgttgatgatgcattaacacaaggtaaagcagcaattgatrctattcaagtagatgctactgttaaacctaaagcgaaccaagctattgaagytaaagcagaagatacgaaagaatcwattgatcawagtgaccagttaactgctgaagaaaaaactgaagcattagcaatgattaaacaaattacagatcaagctaaacaaggtattactgatgcaacaacaactgctgaagttgaaaaagcgaaagctcaaggacttgargcatttgataacattcaaatygactcaacagaaaaacaaaaagctatcgaagaattagaaactgcactagaccagattgaagcaggtgtaaatgtcgacgctgatgctacaactgaagaaaaagaagcgtttacgaatgctttagaagacattttatcaaaagcaactgaagatatttctgatcaaactacaaatgcagaaatcgctactgtcaaaaatagtgcgcttgaacaacttaaagcacaacgtattaatccagtagttaagaaaaatgctttggaagcaattagagaagtggttaacaagcaaatagaaataattaaaaatgcagatgcagatgcatcggcgaaagaaattgcacgtacagatttaggtagatattttgacagatttgctgataaattagataaaacacaaacaaatacagaggttgctgaattacaaaatgtaacgatacctgcaattgaagcgattgtgcctcagaatgatccagatgctaatgatactaataatggtacagataataatgatgcaacagcaaattcaaatgctaatgcaacaccagaaaacactggacaacctaacgtatctgagacgacagataatggcaaagcagacgcttctccgacaacaccaaataatagtgatgcggcaacaggtgaaacaacagtaacatcagcaactgatgatgcaaaggataaaccgcaagctaataacaattctagtgcagatgcatcaacaaacagtccgacaatggataacgatgtaactagtaaaccagaagtagaatcaactaataacggcacaactgataaacctgtaacagaaacagataatgcaacgccagcagaaagcacaacaaataacaatagtacaactacagcaacaaacgagaatgcaccaacaggatcaacarcracggctccaacaactgcgagcacagaagcagcatcatctgctgatagtaaagataatgcatctgtaaatgattcaaaacaaaatgctgaagtaaataatagtgctgaatctcaatcaactaatggcaaggttgcacaaccaaaatctgaaaataaagctaaggcagaaaaagatggtagagattcaacaaatcaaagtatggttgaatcaacaactgaaacattgccttcagcagacataacagaaccaaatgtaccttctaatacatcaaaagataaagargaaagtacgwcaaatcaaactgatgcaggacaacttaagtctgaaactaacgttgcatctaacgaagcagataaatcgccaagcaaagctgatactgaagtttcgaataaaccatcaacatctgcatcttctgaagcaaaagawaaaatgacttcaactaatgttagccaaaaagatgatacggcaacagcagatactaatgataygcaaamatcagttggcycagttgcaaacaataaagctaaagatatgcaaactaatgatacgcaaamatcagttggyycagytgcaaacaataaagctacgcaaaacgacggtgccaatgcatctccagcaacagtttcwaatggtagtcatagtatgcatcaagatatgcttaatgtaactaagmctgaagaaaacaaagcaaatgcaaaatcagaccaacaaggaaaagttaataagcctaaacaacaagctaaaactttaccagatactggtatgtcacataatgacgatttaccatatgctgaattagctctaggtgcaggtatggcattcttaattagaagattcactaagaaagaccaacaaactgaagaataa

SEQ ID NO: 12 - DNA, 7446 bp, Staphylococcus aureus; identical to SEQ ID NO: 11

SEQ ID NO: 13 - DNA, 7437 bp, Staphylococcus aureus
atgaatttattcagacaacaaaaatttagtatcagaaaatttaatgtcggtattttttcagctttaattgccactgttacttttatatctactaacccgacaacagcgtctgcagcagagcaaaatcagcctgcacaaaatcaaccagcacaaccagctgatgccaatacacagcctaacgcaaatgctggtgctcaagctaatcctacagcacagccagctgcacctgccaaccaaggacaaccagcagtacaaccagcaaaccaaggtggacaggctaatccagcaggaggagcagcacaaccaaatacacaaccagctggacaaggtratcaagctgatccgaataacgctgcacaagcacaacctggaaatcaagcaacaccggcaaaccaagcaggtcaaggaaataaccaagcaacacctaataataatgcaacaccggcaaatcaaacacagccagcgaatgctccagcagcagcgcaaccagcagcacctgtagcagcaaacgcacaaactcaagatccaaatgctagcaatactggtgaaggcagtattaatacgacattaacatttgatgatcctgccatatcaacagatgagaatagacaggatccaactgtaactgttacagataaagtaaatggttattcattaattaacaacggtaagattggtttcgttaactcagaattaagacgaagcgatatgtttgataagaataaccctcaaaactatcaagctaaaggaaacgtggctgcattaggtcgtgtgaatgcaaatgattctacagatcatggtaactttaacggtatttcaaaaactgtaaatgtaaaaccagattcagaattaattattaactttactactatgcaaacgaatagtaagcaaggtgcaacaaatttagttattaaagatgctaagaaaaatactgaattagcaactgtaaatgttgctaagactggtactgcacatttatttaaagtaccaactgatgctgatcgtttagatttacaatttattcctgacaatacagcagttgctgatgcttcaagaattacaacaaataaagatggttataaatactattcattcattgataatgtaggtctattctcaggatcacatttatatgtcaaaaatagagatttagcaccgaaagcaactaacaataaagaatatactattaatactgaaatcggtaacaatggtaattttggtgcttcattaaaagcagatcaatttaaatatgaagtaacattaccacaaggtgtaacttacgttaataattcattaactacaacattycctaatggtaatgaagacagtacagtattgaaaaatatgactgttaattatgatcaaaatgcaaataaagttacatttacaagccaaggtgtgacaacggcacgtggtacacacactaaagaagttttattcccagataaatctttaaaattatcatataaagttaatgttgcgaatatcgatacacctaaaaatattgattttaatgaaaaattaacatatcgtactgcttcagatgttgtaattaataatgcgcaaccagaagttacactaactgcagatccattttcagtagcggttgaaatgaacaaagatgcgttgcaacaacaagtaaactcacaagttgataatagtcattacacaacagcatcaattgcagaatacaataaacttaaacaacaagcagatactattttaaatgaagatgcgaatcatgttaaaactgcaaatcgtgcatctcaagcggatattgatggtttagtaactaaattacaagctgcattaattgataatcaagcagcaattgctgaattagatactaaagctcaagaaaaggttacagcagcacaacaaagtaaaaaagttacgcaagatgaagttgcagcacttgtaactaaaattaacaatgataaaaataatgcaatcgcagaaattaataaacaaactacagcacaaggtgtcacaactgaaaaagataatggtatcgcagtgttagaacaagatgtgattacaccaacagttaaacctmaagcgaamcaagatattatccaagcagttacaactcgtaaacaacaaattaaaaagtcaaatgcatcattacaagatgaaaaagatgtagcaaatgataaaattggtaaaattgaaacaaaggcaattaaagatattgatgcagcaacaacaaatgcacaagtagaagccattaaaacaaaagcaatcaatgatattaatcaaactacacctgctacaacagctaaagcagcagctcttgaagaatttgacgaagttgttcaagcacaaattgatcaagcacctttaaatcctgatacaacaaatgaagaagtagcggaagctattgaacgtattaatgcagctaaagtttctggtgttaaagcaattgaagcgacaacgactgcacargatttagaaagagttaaaaacgaagaaatctcaaaaattgaaaatattactgactctacgcaaacaaaaatggatgcctataatgaagttaaacaagctgcaacagctagaaaagctcaaaatgctacagyttcaaatgcaacaaatgaagaagtagcagaagctgatgcagcagtagatgcagctcaaaagcaaggtttacatgacatccaagttgttaaatcaaaacaggaagttgctgatacaaaatcaaaagtattagataaaatcaatgcaattcaaacacaagcaaaagttaaacctgcagctgatacggaagtagaaaacgcatataatacacgtaaacaagaaattcaaaatagcaatgcttcaactacagaagaaaaacaagctgcatatacagaattagatactaaaaagcaagaagcaagaacaaatcttgatgctgcaaatacaaacagtgatgtaacaacagctaaagacaatagtattgctgcaattaatcaagttcaagctgccacaactaagaaatcggatgcaaaagcggaaatcgctcaaaaagcaagtgaacgtaaaacagcaattgaagcaatgaatgattcgactactgaagaacaacaagcagcgaaagamaaagtkgatcaagcwgtwstkwctgcaaacgctgatatagataatgctgcagcaaayamwgatgtrgataatgcaaaaactacaaatgaagctacaatcgcagccattacacctgatgcaaatgttaaaccwsmagcraaacaagcaattgcagataaagtacaagctcaagaaamagcaattgatgswaataacggytcaacaacwgaagaaaaagcagctgckaaacaacaagtycaaactgaaaaaacracwgctgatgcmgcaatagatgcagcacatacaaatgcggaagttgaagcggctaaaaawgcagmaattgctaaaattgaagcgattcagccagcaacaacaactaaagataatgcgaaagaagcaattgctacgaaagcgaatgaacgtaaaacagcaatcgctcaaacgcaagacattactgctgaagaaattgcagcggctaatgcggacgtagataatgctgtgacacaagcaaatagcaacattgaagctgctaatagtcaaaatgatgtagaccaagcgaaaacgacaggtgaaamtagtattgatcaagtaacaccaacagttaataaaaaagcaactgcacgtaatgaaatcacagcaattttaaataacaaattgcaagagattcaagctacgccagatgcaacagatgaagaaaaacaagcagctgatgcwgaagcaaatactgaaaatggtaaagcaawtcaagccattkcagcagcaactactaacgcacaagttgatgaagctaaarcaaatgcagaagcagcgattaatgcggtaacaccaaaagttgtgaagaaacaarcggctaaagatgaaattgatcaattacaagcaacgcaaacaaatgttatcaataatgatcagaacgctacaacwgaagaaaaagaagcagctattcaacaattagcaacagcagttacagacgcgaaaaataatattacagctgcaactgatgataatggtgtagatcaggcgaaagacgctggaaagaattcaattcaaagcacgcaaccagcaacakcggttaaatcaaatgctaaaaatgatgttgatcaagctgtgacaactcaaaatcaagcaattgataatacaactggtgctacaactgaagagaaaaatgcagcaaaagatttagttttaaaagctaaagaaaaagcgtatcaagatatcttaaatgcacaaacaactaatgatgttacgcaaattaaagatcaagcagttgctgatattcaaggtattactgcagatacaacaattaaagatgttgcgaaagatgaattagcaacaaragcaaacgaacaaaaagcgcttattgcacaaactgcagatgcgactactgaagaaaaagaacaagcaaatcaacaagtagacgcacawttaacacaaggtaatcaaaatattgaaaatgcacagtcaatygatgaygtaaacactgcaaaagataatgcaattcaagcmatygacccaattcaagcatcaacagatgttaaaacgaatgcaagagcggaattgctaactgaaatgcaaaataaaataactgaaatacttaataataatgagactactaatgaagaaaaaggtaacgatattggaccagttagagcagcatatgaagaaggtttaaataatattaatgcagcaactactacaggtgatgtaactactgctaaagatacagcagtacaaaaagttcaacaacttcatgcaaatcctgttaagaaaccagcaggtaaaaaagaattagatcaagctgcagctgataagaaaacacaaatagaacaaacaccaaatgcatcacaacaagaaattaatgatgcaaaacaagaagttgatactgaattaaatcaagcgaaaacaaatgtcgatcaatcatcaacaaatgaatatgttgataatgcagttaaagaaggaaaagctaaaattaatgcagttaaaacatttagtgagtacaaaaaagatgctttagctaaaattgaagatgcatataatgctaaagtaaacgaagcggataactctaacgcatcgacttcaagtgaaattgctgaagcgaaacaaaaacttgctgaattaaaacaaactgcggatcaaaatgttaatcaagctacttctaaagatgacattgaagttcaaattcataatgacttagataatattaacgattacacaattccaacaggtaaaaaagaatcagctacaacagatttatatgcttatgcagatcagaagaaaaataatatttcagctgacactaatgcaacacaagatgaaaagcaayaagcaattaagcaagttgaccaaaatgttcaaactgcattagaaagcattaataatggtgtggataatggtgacgttgatgatgcattaacacaaggtaaagcagcaattgatgctattcaagtagatgctactgttaaacctaaagcgaaccaagctattgaagttaaagcagaagatacgaaagaatctattgatcaaagtgaccagttaactgctgaagaaaaaactgaagcattagcaatgattaaacaaattacagatcaagctaaacaaggtattactgatgcaacaacaactgctgaagttgaaaaagcgaaagctcaaggacttgaagcatttgataacattcaaatcgactcaacagaaaaacaaaaagctatcgaagaattagaaactgcactagaccagattgaagcaggtgtaaatgtcaacgctgatgctacaactgaagaaaaagaagcgtttacgaatgctttagaagacattttatcaaaagcaactgaagatatttctgatcaaactacaaatgcagaaatcgctactgtcaaaaatagtgcgcttgaacaacttaaagcacaacgtattaatcctgaagttaagaaaaatgctttggaagcaatcagagaagtggttaacaagcaaatagaaataattaaaaatgcagatgcagatgcatcggcgaaagaaattgcacgtacggatttaggtagatattttgacagatttgctgataaattagataaaacacaaacaaatgcagaagttgctgaattacaaaatgtaacgatacctgcaattgaagcgattgtgcctcagaatgatccagatgctaatgatactaataatggtatagataataatgatgcaacagcaaattcaaatgctaatgcaacaccagaaaatactggacaacctaacgtatctgagacgacagctaatggcaaagcagacgcttctccgacaacaccaaataatagtgatgcggcaacaggtgaaacaacagcaacatcagcaactgatgatgcaaatgataaaccgcaagctaataacaattctagtgtagatgcatcaacaaacagtccgacaatggataacgatgtaactagtaaaccagaagtagaatcaactaataacggcacaactgataaacctgtaacagaaactgataatgcaacgccagcagaaagcacaacaaataacaatagtacaactacagcaacaaacgagaatgcaccaacaggatcaacagcaacggctccaacaactgcgagcacagaagcagcatcatctgctgatagcaaagataatgcatctgtaaatgattcaaaacaaaatgctgaagtaaataatagtgctgaatctcaatcaactaatgacaaggttgcacaaccaaaatctgaaaataaagctaaggcagaaaaagatggtagtgattcaacaaatcaaagtatggttgaatcaacaactgaaacattgccttcagcagacataacagaaccaaatgtaccttctaatacatcaaaagataaagaagaaagtacgacaaatcaaactgatgcaggacaacttaagtctgaaactaacgttgcatctaacgaagcagataaatcgccaagcaaagctgatactgaagtttcgaataaaccatcaacatctgcatcttctgaagcaaaagaaaaaatgacttcaactaatsttagccaaaaagatgatacggcaacagcagatactaatgatacgcaammatcagttggttcagctgcaaacaataaagctacgcaaaacgacggtgccaatgcatctccagctacagtttcaaatggaagcaatagtgctaatcaagatatgcttaatgtaactaacactgacgaccaccaagctaagacaaaatcagctcaacaaggaaaagttaataaagctaaacaacaagctaaaactttaccagatactggtatgtcacataatgacgatttaccatatgctgaattagctctaggtgcaggtatggcattcttaattagaagattcactaagaaagaccaacaaactgaagaataa

SEQ ID NO: 14 - DNA, 7437 bp, Staphylococcus aureus; identical to SEQ ID NO: 13

SEQ ID NO: 15 - DNA, 6570 bp, Staphylococcus aureus
atgaatttgttaaagaaaaataaatatagtattagaaaatataaagtagggatattctctactttaatcgggacagttttattactttcaaacccaaatggtgcacaagctttaactacggatcataatgtgcaaggtggttcaaatcaagcattacctggcaactcacaaaatacaaatgccgatactaatcgagacatagtaaatgattcgcaaaatactcctaatgcacatgcaacagacaatacatcaacaaatcaagcattgactaatcatcaaaacgttgatgtggcaaatcaagtcgggcctgctccaatacagcctagcgcgtcgcctgcgcaaaataataataattctaatgctaattcaacagcaacagagccagcggcgaatacaaataataatttagcatcaaataacaatacattaaacgtgcctaataatacagataacaatgattcagcgcgtcatctgactttaaaagaaattcaagaagatgttcgtcattcgtctgataagccagagttagttgcgattgctgaagaagcatctaatagaccgaaaaagagaagcagacgtgctgcgccaacagatcctaatgcaacaccagcagatccaacggctacaccagcagatccaacggcaggaaatggtagtgcaccagttgcaattacagcgccatacacgccaacaactgatcccaatgccaataatataggacaaaatgcacctaacgaagtgctttcatttgatgataacaacattagaccaagtacgaaccgttctgtgcctacagtaactgttgttgataatttaccaggctacacactgattaatggtggtaaagtaggggtgtttagtcatgcaatggtaagaacgagcatgtttgattcaggagatgccaagaactatcaagcgcaaggcaatgtaattgcattgggtcgtattagaggaaatgatacaaatgatcatggcgattttaatggtatcgagaaaacattaacagtaaatccgaattctgaattaatctttgaatttaatactatgactactaaaaactatcaaggtatgacaaatttaatcattaaaaatgctgataacgatactgttattggtgaaaaagtagttgcttatggtccgatttggcgcttattaaaagtacctgaaaatgttagtcatctaaaaattcaatttgtacctaaaaatgacgcaataacagatgcacgtggtatttatcaattacgagatggatataaatactatgactttgtagactcaatcggtcttcattctgggtcacatgtctatgttgaaagacgtacaatggagccaacagcaacaaataataaagaatttacagttacaacgtcattaaagaataatggtaactttggcgcttcattcaatacagatgattttgtatataaaattcaattacctgaaggtgttgaatatgtaaataattcattgactaaagattttcctagcggtaattcaggtgttgatattaatgatatgaatgtgacgtatgacgcagcaaatcgaattattacaattaaaagtactggtggaggtacagggaattcgccggcacgactaatgcctgataaaatattggatttgaagtataagctacgtgtgaacaatgtgccaacaccaagaacagtaacatttaacgatacattaacgtataaaacatattcacaagattttattaattcacctgctgaaagtcatactgtaagtacaaatccatatacaattgatatcatcatgaataaagacgcattgcaagccgaagtcgatagacgaattcaacaagcggattatacatttgcatcattagatatttttaatgatcttaaaagacgcgcacaaacaattttagatgaaaaccgtaacaatgtacctttaaacaaaagagtttctcaagcagatatcgattcattagcaaatcagatgcaacatacgttaattcgcagtgttgacgctgaaaatgccgttaatagaaaagttgatgacatggaagatttagttaaccaaaatgatgaactgacagatgaagaaaaacaagcagcgattcaagtcatcgaggaacataaaaatgaaattattgggaatattggtgaccaaacgactgatgatggcgttactagaattaaagatcaaggtatacagactttaagtggagacactgcaacaccagttgttaaaccaaatgctaaacaagctatacgtgataaagcagcgaaacaaagagaaattatcaatcacacgccagatgctactcaagatgaaattcaagatgcattaaatcaattaacaacggatgaaacagatgctattgataatgttacgaatgctactaccaatgctgatgttgaaacagctaaaaataatggtattaatacaattggtgcagttgcgccacaagtgacacacaaacaagctgcaagagatgcaattaatcaagcgacagcaacgaaacgacaacaaataaatagcaatagagaagcaacacaagaagagaaaaatgcagcattgaatgaattaacgcaagccacgaaccacgcattagaacaaatcaatcaagcgacaaccaatgatgatgtagatactgccaaaggtgatggtctgaatgccattaatcctattgcgcctgtaactgttgtcaagcaagcagcaagagatgccgtatcacatgatgcacaacagcatatcgcagagatcaatgcaaatcctgatgcgactcaagaagaaagacaagcagcaatagagaaagtaaatgctgctgtagctgttgcgaatactaatatattaaatgctaataccaatgctgatgttgagcaagtaaagacaaatgcaattcaaggtatacaagccattgaaccagctacaaaggttaaaacagatgctaaaaacgctattgatcaaagtgcggaaacgcaacataatgcgatatttaataataatgatgcgaccttagaagagcaacaagcagcacaacaattgcttgatcaagctgtagccacagcgaagcaaaatattaatgcagcagatacgaatcaagaagttgcacaagcaaaagatcagggcacacaaaatatagttgtgattcaaccggcaacacaagttaaaacggatgcacgcaatgctgtaaatgaaaaagcgcgagaggcgataacaaatatcaatgctacacctggcgcgactcgagaagagaaacaagaagcgataaatcgtgtcaatacacttaaaaatagagcattaaatgatattggtgtgacgtctactactgcgatggtcaatagtattagagacgatgcagtcaatcaaatcggtgcagttcaaccgcatgtaacgaagaaacaaactgctacaggtgtattaacggacttagcaactgcaaaaaaacaagaaattaatcaaaatacaaatgcaaccactgaagaaaagcaagtagcattaaatcaagtagaccaagatttagcaacggcaattaataatataaatcaagctgatactaatgcagaagtagatcaagcacaacaattaggtacaaaagcaattaatgcgattcagccaaatattgtaaaaaaacctgcagcattagcacaaaccaatcagcattatagtgctaaattagttgaaatcaatgctacaccagatgcaacagatgatgagaaaaatgctgcgatcaatactttaaatcaagacagacaacaagctattgaaagtattaaacaagcaaatacaaatgcggaagtagaccaagctgcgacagtggcagagaataatatcgatgctgttcaagttgacgttgtaaaaaaacaagcagcgcgagataaaatcactgctgaagtagcgaagcgtattgaagcggttaaacaaacacctaatgcaactgacgaagaaaagcaggctgcagttaatcaaatcaatcaacttaaagatcaagcgtttaatcaaattaatcaaaaccaaacaaatgatcaggtagacgcaactacaaatcaagcgattaatgctatagataatgttgaagctgaagtagtaattaaaccaaaggcaattgcagatattgaaaaagctgttaaagaaaagcaacagcaaattgataatagtcttgattcaacagataatgagaaagaagttgctttacaagcattagctaaagaaaaagaaaaagcacttgcagctattgaccaagctcaaacgaatagtcaggtgaatcaagcggcaacaaatggtgtatcagcgattaaaattattcaacctgaaacaaaaattaaaccagcagcacgtgaaaaaatcaatcaaaaagcgaatgaattacgtgcgcaaattaatcaagataaagaagcgacagcagaagaaagacaagcggcgttagataaaatcaatgatttagttgctaaagctatgacaaatatcacgaatgatagaacaaatcagcaagttaatgactcaacaaatcaagcgcttgacgacattgcattagtgacgcctgaccatattgttagagcagctgctagagatgcagttaagcaacaatatgaagctaaaaagcacgaaattgagcaagcggaacatgcgactgatgaagaaaaacaagttgctttaaatcaattagcgaataatgaaaaacgtgcattacaaaacattaatcaagcaatagcgaataatgatgtgaaacgtgttgaatcaaatggtattgctacgttaaaaggcgtagaaccgcacattgtggttaaacctgaagctcaagaagccataaaagcgagcgcagataaccaagtagaatctataaaagatacaccacatgctacgacagatgaattagatgaagcaaaccaacaaataaacgacacacttaaacaaggtcaacaagatatagacaatacgacacaagatgcagctgtcaatgatgttagaaaccaaacgattaaggcaatcgaacaaattaaaccgaaagttagacgcaaacgtgcagcgttggataacattgatgaaagtaataataatcaactcgatgcaatacgaaatacgctagatacaacgcaagatgaacgaaatgttgctattgctgcgttaaataaaattgttaatgcaattaaaaatgatattgcacaaaacaaaacgaatgcagaagtggatcaaactgaggctgatggtaacaacaacatcaaagtgattttacctaaagttcaagttaaaccagcagcgcgtcaatctgtcagcgcaaaagctgaagctcaaaatgcacttattgatcaaagtgatttatctaccgaagaagaaagattagctgctaaacatttagtagaacaagcacttaatcaagctattgatcagatcaatcacgcagataagactgcgcaagttaatcaaaatagtatcgatgctcaaaatattatttcaaaaattaaaccagcgacaacagttaaagcaacagcattacaacaaattcaaaatatcgctacaaataaaattaatttaattaaagcaaataacgaagcgacagatgaagaacaaaatgctgcaatagtacaagttgaaaaagagttaattaaagctaaacaacaaattgctggtgcagtgactaatgctgatgtggcatatttattgcatgatgggaaaaacgaaattcgtgaaatcgaacctgttattaataaaaaagcaactgcgcgagaacaattaacaacattattcaacgataagaaacaagcaattgaagcgaatgttcaagcaacagtagaagaaagaaatagtattttagcacagttacaaaacatttatgacactgctattggacaaattgatcaagatcgtagcaatgcacaagttgataaaacagcaacattaaatctacaaacaatacatgatttagacgtacatcctattaaaaagccagatgctgaaaaaacgattaatgatgatcttgcacgtgttacacatttagtgcaaaattatcgaaaagtaagtgatcgtaataaggctgatgcattaaaagctataactgcattaaaattacaaatggatgaagaattaaaaacagcacgcactaatgctgatgttgatgcagttttaaaacgatttaatgttgcattaggcgatatagaagcagtaattactgaaaaagaaaatagcttactgcgcattgataacattgctcaacaaacatatgcgaaattcaaagcgatcgcaacaccagaacaattagctaaagtaaaagcattaattgatcaatatgttgcagatggcaatagaatggttgatgaagatgcgacattaaatgacatcaaaaaagatacgcaactcattattgatgaaattttagcaattaaattacctgctgaagtgataaaagcgtcaccaaaagtggggcaacctgctccaaaagtttgtacgcctattaaaaaagaagataaacaagaagtgcgaaaagttgtaaaagaacttccaaatactggttctgaagaaatggatttaccattaaaagaattagcactaattacaggcgcagcattattagctagaagacgttctaaaaaagaaaaagaatcataa

SEQ ID NO: 16 - DNA, 6570 bp, Staphylococcus aureus; identical to SEQ ID NO: 15

SEQ ID NO: 17 - DNA, 6561 bp, Staphylococcus aureus
atgaatttgttaaagaaaaataaatatagtattaggaagtataaagtaggcatattctctactttaatcggaacagttttattactttcaaacccaaatggtgcacaagccttaactacggataataatgtacaaagcgatactaatcaagccacacctgtaaattcacaagatacaaatgttgctaataatagaggtttagcaaatagtgctcagaatacacctaatcaatctgcaacaactaatcaatcaacgaatcaagcattggttaatcataataatggtagtatagcaaatcaagctacgccaacatcagtgcaatcaagtacgccttcagcacaaaacaataatcatacagatggcaatacaacagcaactgagacagtgtcaaacgctaataataaggatgtagtgtcgaataataccacattaaatgtacctaataaaacaaatgaaaatggttcaggaggacatctaactttaaaggaaattcaagaagatgttcgtcattcttcagataaaccagagctagttgcaattgctgaacaagcatctaatagaccgaaaaagagaagtagacgtgcggcaccggcagatcctaatgcaactccagcagatccagcggctgcagcggcaggaaacggtggtgcaccagtagcaattacagcgccatacacgccgacaactgatcctaatgccaataatgcaggacaaaatgcacctaacgaagtgctgtcttttgatgacaatggtattagaccaagtaccaaccgttctgtaccatcagtaacagttgttgataatttaccaggctttacacttatcaatggtggtaaagtaggtgtgtttagtcatgcgatggttagaacaagtatgtttgattcaggagatgctaagaactatcaagcacaaggaaatgtaattgcattaggtcgtattaagggaaatgatacaaatgatcatggtgattttaatggaattgaaaaatctttaacagtaaatccaaattctgaattaattttcgaatttaatacgatgactacaaaaaactatcaaggtgtgacaaatttaataattaaaaatgctgataatgatactgttattgcagaaaaatcagtagcttatggtccgatttggcgtttgtttaaagtgcctgaaaatgttagtcacttaaaaattcaatttgtacctaaaaatgatgcaataacagatgcgcgtggcatttatcaactaagagacggttataaatactatgactttgttgactcaattggtctacattctggttcgcatgtctatgttgaaagacgaacaatggaacccacagctactaataataaagaatttacagtcacaacttcattaaagaataatggtaacttcggtgcttcatttaatacagatgattttgtatataaagttcaattacctgaaggggtagaatatgttaataactcattgactaaagattttccaagcagtaattcaggtgttgatatgaatgattttaatgtgacgtatgatgcggcgaatcgagtgataacaattaaaagtactggtggaggttcaggtaactcgccggcacgattaatgcctgataaaatattggatttaaagtataagttgcgtgttaataatgtaccgacaccaagaacagtaacatttaatgatacattaacatataaaacatatacacaagattttattaattcacctgctgaaagtcatactgtaagtacaaatccatatacaatcgatatcatcatgaataaagatgcattacaagccgaggttgatagacgcattcaacaagctgattatacatttgcatcattagatatctttaatgatcttaaaagacgtgcacaaacgattttagatgaaaatcgtaacaatgtaccattaaataaaagagtttctcaagcagatattgattcattaactaatcaaatgcaacatacgttaattcgaagtgttgatgctgaaaatgcagttaataaaaaagttgaccaaatggaagatttagttaatcaaaatgatgaattgacagatgaagaaaaacaagcagcaatacaagttatcgaggaacataaaaatgaaataattggtaatattggtgaccaaacgactgatgatggcgttactagaatcaaagatcaaggtatacagaccttaagtggggatactgcaacaccggttgttaaaccaaatgctaaaaaagcaatacgtgataaagcaacgaaacaaagggaaattatcaatgcaacaccagatgctactgaagacgagattcaagatgcactaaatcaattagctacggatgaaacagatgctattgataatgttacgaatgctactacaaatgctgacgttgaaatagctaaaaataatggcatcaatactattggagcagttgttcctcaagtgacacataaacaagctgcaagagatgcaattaaccaagcaacagcaacgaaaagacaacaaataaatagtaatagagaagcaactcaggaagagaaaaatgcagcattgaacgaattaactcaagcaaccaaccatgctttagaacaaatcaatcaagcaacaacaaatgctgatgttgataacgccaaaggagatggtctaaatgccattaatccaattgctcctgtaactgttgttaagcaagctgcaagggatgctgtatcacatgatgcacaacaacatatcgcagaaatcaatgctaatcctgatgcgactcaagaagaaagacaagcagcaattgacaaagtgaatgctgctgtaactgcagcaaacacaaacattttaaacgctaataccaatgctgatgttgaacaagtaaagacaaatgcgattcaaggaatacaagcaattacaccagctacaaaagtaaaaacagatgcaaaaaatgccatcgataaaagtgcggaaacgcaacataatacgatatttaataataatgatgcgacgctcgaagaacaacaagcagcacaacaattacttgatcaagctgtagccacagcgaagcaaaatattaatgcagcagatacgaatcaagaagttgcacaagcaaaagatcagggcacacaaaatatagttgtgattcaaccggcaacacaagttaaaacggatgctcgcaatgctgtaaatgataaagctcgagaggcgataacaaatatcaatgctacacctggcgcgactcgagaagagaaacaagaagcgataaatcgtgtcaatacacttaaaaatagagcattaactgatattggtgtgacgtctactactgcgatggtcaatagtattagagacgatgcagtcaatcaaatcggcgcagttcaaccgcatgtaacgaagaaacaaactgctacaggtgtattaaatgatttagcaactgctaaaaagcaagaaattaatcaaaacacaaatgcaacaactgaagaaaagcaagtggctttaaatcaagtggatcaagagttagcaacggcaattaataatataaatcaagctgatacaaatgcggaagtagatcaagcgcaacaattaggtacaaaagcaattaatgcgattcagccaaatattgttaaaaaacctgcagcattagcacaaatcaatcagcattataatgctaaattagctgaaatcaatgctacaccagatgcaacgaatgatgagaaaaatgctgcgatcaatactttaaatcaagacagacaacaagctattgaaagtattaaacaagctaacacaaatgcagaagtagaccaagctgcgacagtagcagagaataatatcgatgctgttcaagttgatgtagtaaaaaaacaagcagcgcgagataaaatcactgctgaagtggcgaagcgtattgaagcggttaaacaaacacctaatgcaactgacgaagaaaagcaggctgctgttaatcaaatcaatcaacttaaagatcaagcaattaatcaaattaatcaaaaccaaacaaatgatcaggtagacacaactacaaatcaagcggtaaatgctatagataatgttgaagctgaagtagtaattaaaccaaaggcaattgcagatattgaaaaagctgttaaagaaaagcaacagcaaattgataatagtcttgattcaacagataatgagaaagaagttgcttcacaagcattagctaaagaaaaagaaaaagcacttgcagctattgaccaagctcaaacgaatagtcaggtgaatcaagcagcaacaaatggtgtatcagcgattaaaattattcaacctgaaacaaaagttaaaccagctgcacgtgaaaaaatcaatcaaaaagcgaatgaattacgtgctaagattaatcaggataaagaagcaacagcagaagaaagacaagtagcactagataaaatcaatgaatttgtaaatcaagccatgacagatattacgaataatagaacaaatcaacaagttgatgatacaacaagtcaagcgcttgatagcattgctttagtagcgcctgaacatattgttagagcagctgctagagatgcagtaaagcaacaatatgaggctaaaaagcaagaaatagagcaagctgaacatgcgactgatgaagaaaaacaagttgctttaaatcaattagcgaataatgaaaaacttgcattacaaaacatcaatcaagcagtaacgaataatgatgtgaaacgtgttgaaacaaatggcattgctacactaaaaggtgtacaacctcatattgtaattaagcctgaagcacaacaagcaataaaagcaactgcagaaaatcaagtagaatcaataaaagatacaccacatgcaacagttgatgaattagatgaagcgaatcaattaattagcgacacactcaaacaagcgcaacaagaaatagaaaatacaaatcaagatgctgctgttactgatgttagaaatcaaacaatcaaggcaattgagcaaataaaacctaaagtaagacgtaaacgagctgcgcttgatagcattgaagaaaataataaaaatcaactcgatgcaatccgaaatacgttggatactactcaagatgaaagagatgttgctattgatactttaaataaaattgtaaatacaattaaaaatgacattgcacaaaacaaaacgaatgcagaagtggatcgaactgagactgatggcaacgacaacatcaaagtgattttacctaaagttcaagttaaaccagcagcgcgtcaatctgttggtgtaaaagccgaagctcaaaatgcactaatcgatcaaagcgatttatcaactgaagaagaaagactagctgctaaacatttagtagaacaagcacttaatcaggctattgatcagatcaatcatgcagataagactgcccaagttaatcaagatagtatagatgctcaaaatattatttcaaaaattaaaccagcgacaacagttaaagcaacagcattacaacaaattcaaaatatcgctacaaataaaattaatttaattaaagcaaataacgaagcgacagatgaagaacaaaatattgcaatagcacaagttgaaaaagagttaattaaagctaaacaacaaattgctagtgcagtgactaatgctgatgtggcatatttattgcatgatgagaaaaacgaaattcgtgaaatcgaacctgttattaacagaaaggcgtctgctcgagaacaattgacaacattattcaacgataaaaaacaagcaattgaagcgaatattcaagcaacggtagaagaaagaaatagtatattagcacagttacaaaatatttatgacactgctattggacaaattgatcaagatcgtagcaatgcacaagttgataaaacagcatcattaaatctacaaacaatacatgatttagatgtacatcctattaaaaagccagatgctgraaaaacgattaatgatgatcttgcacgcgtcactgctttagtgcaaaattatcgaaaagtaagtaatcgtaataaggctgatgcattaaaagctataactgctttaaaattacaaatggatgaagaattaaaaacagcacgcactaatgctgatgttgatgcagttttaaaacgatttaatgttgcattaagcgatatagaagcagtaattactgaaaaagaaaatagcttactgcgaattgataacattgctcaacaaacatatgcgaaattcaaagcgatcgcaacaccagaacaattagctaaagtaaaagtattaattgatcaatatgttgcagatggcaatagaatgattgatgaagatgcgacattaaatgacatcaaacaacacacgcaattcattgttgatgaaattttagcaattaaattaccagctgaagcgacgaaagtatcaccaaaagaaattcagccagctccaaaagtttgtacgcctattaaaaaagaagagacacatgaatcgcgcaaagttgaaaaagaacttccaaatacaggttctgaaggaatggatttaccattgaaagaatttgcactgattacaggtgcggctttgttagctagaagacgtactaaaaacgaaaaagaatcataa

SEQ ID NO: 18 - DNA, 6561 bp, Staphylococcus aureus; identical to SEQ ID NO: 17

SEQ ID NO: 19 - DNA, 6561 bp, Staphylococcus aureus
atgaatttgttaaagaaaaataaatatagtattaggaagtataaagtaggcatattctctactttaatcggaacagttttattactttcaaacccaaatggtgcacaagccttaactacggataataatgtacaaagcgatactaatcaagcaacacctgtaaattcacaagataaagatgttgctaataatagaggtttagcaaatagtgcgcagaatacacctaatcaatctgcaacaaccaatcaagcaacgaatcaagcattggttaatcataataatggtagtatagtaaatcaagctacgccaacatcagtgcaatcaagtacgccttcagcacaaaacaataatcatacagatggcaatacaacagcaactgagacagtgtcaaacgctaataataatgatgtagygtcgaataataccrcattaaatgtaccaamtaaaacaaatgaaaatggttcaggaggacatctaactttaaaggaaattcaagaagatgttcgtcattcttcarataaaccagagctagttgcaattgctgaaccagcatctaatagaccgaaaaagagaagtagacgtgcggcaccggcagatcctaatgcaactccagcagatccaksggctgcagcggyaggaaacggtggtgmaccagttgcaattacagcgccatayacgccwacaactgatcctaatgccaataatgcaggacaaaatgcacctaacgaagtgctgtcatttgatgacaatrgtattagaccaagtaccaaccgttctgtrccawcagtaammgttgttrataayttrccrggcttyacactwatcaatggtggyaaagtaggkgtgytwagtcatgcratggtwagaacragyatgtttgakkcwggagakmawmagaactatcargcacaaggmaatgtamttgcattaggwcgtatamryggrackgayrckartraycatggmgattttaatggtatygaraaakcwttaacagtaaatccraattctgaattaatctttgaatttaatacaatgmcwactaaaaayggtcaaggcgcaacaaatgttattatcaaaaatgctgatactaatgatacgattgctgaaaagactgttgaaggcggtccaactttgcgtttatttaaagtacctgataatgtgagaaatctcaaaattcaatttgtacctaaaaatgacgcaataacagatgcgcgtggcatttatcaactaaaagatggttacaaatactatagctttgttgactctatcggacttcattctgggtcacatgtttwtgttgaaagacgaacaatggawccmacagcaacraataataaagartttacwgtwacaacatcaytaaaraataatggtaattctggtgcttctytagayacaratgamtttgtwtatmaarttcaattacctgaaggkgtwgaatatgtgaacaattcattgactaaagattttccaagtaacaattcaggcgttgatgttaatgatatgaatgttacatatgatgcrgcraatcgwgtgataacaattaaaagyactggwggwggyacarcraaytcwcckgcacgactwatgcctgataaaataytsgatttaarrtataarttrcgtgtwaataatgtrccgacaccaagaacagtaacatttaaygakacattaacgtataaaacatatacacaagatttcattaattcagctgcagaaagtcatactgtaagtacaaatccatatactatcgatatcatcatgaataaagatgcattacaagccgaagttgacagacgtattcaacaagctgattatacatttgcrtcattagatatctttaatgrtctkaaamracgygcacaaacrattttagmtgaaaatcgtaacaatgtaccattaaataaaagagtwtctcaagcakatattgatwcattaactaatcaratgcaacatackttaattcgaagtgttgatgctgaaaatgcagtwaatmaaaaagytgaycaaatggaagatttagttaatcaaaatgatgaaytgacagatgaagaaaaacaagcagcaatacaagttatcgaggaacataaarryrawatwattggtratattggtgaycaaacgactgatgatggcgttactagaatcaaagatcaaggtatacagaccttaagtggggatactgcaacaccggttgttaaaccaaatgctaaaaaagcaatacgtgataaagcaacgaaacaaagggaaattatcaatgcaacaccagatgytactgaagacgagattcaagatgcamtaaatcaattagctacggatgaaacagatgctattgataatgttacgaatgctactacaaatgctgacgttgaaacagctaaaaataatggcatcaatactattggakcagttgttcctcaagtracwcataaamaagctgcaagagatgcaattaaccaagcaacagcaacgaaaagacaacaaataaatagtaatagagaagcaactcaggaagagaaaaatgcagcattgaacgaattaactcaagcaaccaaccatgctttagaacaaatcaatcaagcaacaacaaatgctratgttgataacgccaaaggagatggtctaaatgccattaatccaattgctcctgtaactgttgttaagcaagctgcaagggatgccgtatcacatgatgcacaacaacatatcgcagagatcaatgctaatcctgatgcgactcaagaagaaagacaagcagcaattgacaaagtgaatgctgctgtaactgcagcaaacacaaacattttaaacgctaataccaatgctgawgtkgaacaagtraagacaaatgcgatwcaaggaatacaagcaattacaccagctacaaargtaaaaacagatgcaaaaaatgccatcgataaaagtgcggaaacgcaacataatacgatatttaataataatgatgcgacgctcgaagaacaacaagcagcacaacaattacttgatcaagctgtagccacagcgaagcaaaatattaatgcagcagatacgaatcaagaagttgcacaagcaaaagatcagggcacacaaaatatagtagtgattcaaccggcaacacaagttaaaacggatrctcgcaatgttgtaaatgataaagcgcgagaggcgataacaaatatcaatgctacamctggcgcgactcgagaagagaaacaagaagcgataaatcgtgtcaatacacttaaaaatagagcattaactgatattggtgtgacrtctactactgcgatggtcaatagtattagagacgatgcagtcaatcaaatcggcgcagttcaaccgcatgtaacgaagaaacaaactgctacaggtgtattaaatgatttagcaactgctaaaaagcaagaaattaatcaaaacacaaatgcaacaactgaagaaaagcaagtggctttaaatcaagtggatcaagagttagcaacggcaattaataatataaatcaagctgatacaaatgcggaagtagatcaagcgcaacaattaggtacaaaagcaattaatgcgattcagccaaatattgttaaaaaacctgcagcattagcacaaatcaatcagcattataatgctaaattagctgaaatcaatgctacaccagatgcaacgaatgatgagaaaaatgctgcgatcaatactttaaatcaagacagacaacaagctattgaaagtattaaacaagctaacacaaatgcagaagtagaccaagctgcgacagtagcagagaataatatcgatgctgttcaagttgaygtagtaaaaaaacaagcagcgcgagataaaatcactgctgaagtggcgaagcgtattgaagcggttaaacaaacacctaatgcaactgacgaagaaaagcaggctgctgttaatcaaatcaatcaacttaaagatcaagcawttaatcaaattaatcaaaaccaaacaaatgatcaggtagacacaactacaaatcaagcgktaaatgctatagataatgttgaagctgaagtagtaattaaamcaaaggcaattgcagatattgaaaaagctgttaaagaaaagcaacagcaaattgataatagtcttgattcaacagataatgagaaagaagttgcttcacaagcattagctaaagaaaaagaaaaagcacttgcagctattgaccaagctcaaacgaatagtcaggtgaatcaagcagcaacaaatggtgtatcagcgattaaaattattcaacctgaaacaaaagttaaaccagctgcacgtgaaaaaatcaatcaaaaagcgaatgaattacgtgctaagattaatcaggataaagaagcaacagcagaagaaagacaagtagcactagataaaatcaatgaatttgtaaatcaagccatgacagatattacgaataatagaacaaatcaacaagttgatgatacaacaagtcaagcgcttgatagcattgctttagtrrcgcctgamcatattgttagagcagctgctagagatgcagtwaagcaacaatatgargctaaaaagcrmgaaatwgagcaagckgaacatgcgactgatgaagaaaaacaagttgctttaaatcaattagcgaataatraaaaacktgcattacaaaacatcratcaagcartarcgaataatgatgtgaaacgtgttgaaacaaatggcattgctacactaaaaggtgtacaacctcatattgtaattaagcctgaagcacaacaagcaataaaagcaastgcagaaaatcaagtagaatcaataaaagatacaccacatgcaacagttgatgaattagatgaagcgaatcaattaattagcgacacactcaaacaagcgcaacaagaaatagaaaatacaaatcaagatgctgctgttactgatgttagaaatcaaacaatcaaggcaatwgagcaaataaaacctaaagtaagacgtaaacgagctgcgcttgatagcattgaagaaaataataaaaatcaactcgatgcaatccgaaatacgttggatactactcaagatgaaagagatgttgctattgatactttaaataaaattgtaaatacaattaaaaatgacattgcacaaaacaaaacgaatgcagaagtggatcgaactgagactgatggcaacgacaacatcaaagtgattttacctaaagttcaagttaaaccagcagcgcgtcaatctgttggtgtaaaagccgaagctcaaaatgcactaatcgatcaaagcgatttatcaactgaagaagaaagactagctgctaaacatttagtagaacaagcacttaatcaggctattgatcagatcaatcatgcagataagactgcccaagttaatcaagatagtataratgctcaaaatattatttcaaaaattaaaccagcgacaacagttaaagcaacagcattacaacaaattcaaaatatcgctacaaataaaattaatttaattaaagcaaataacgaagcgacagatgaagaacaaaatattgcaatagcacaagttgaaaaagagttaattaaagctaaacaacaaattgctagtgcagtgactaatgcwgatgtggcatatttattgcatgatgagaaaaacgaaattcgtgaaatcgaacctgttattarcagaaaggcgtctgctcgagaacaattgacaacattattcaacgataaaaaacaagcaattgaagcgaatattcaagcaacggtagaagaaagaaatagtatattagcacagttacaaaatatttatgacactgctattggacaaattgatcaagatcgtagcaatgcacaagttgataaaacagcatcattaaatctacaaacaatacatgatttagatgtacatcctattaaaaagccagatgctgaaaaaacgattaatgatgatcttgcacgcgtcactgctttagtgcaaaattatcgaaaagtaagtratcgtaataaggctgatgcattaaaagctataactgctttaaaattacaaatggatgaagaattaaaaacagcacgcactaatgctgatgttgatgcagttttaaaacgatttaatgttgcattaagcgatatagaagcagtaattactgaaaaagaaaatagcttactgcgmattgataacattgctcaacaaacatatgcgaaattcaaagcgatcgcaacaccagaacaattagctaaagtaaaagtattaattgatcaatatgttgcagatggcaatagaatgattgatgaagatgcgacattaaatgacatcaaacaacayacgcaattcattgttgatgaaattttagcaattaaattaccagctgaagcgaygaaagtatcaccaaaagwaattcagccagctccaaaagtttgtacgcctattaaaaaagaagagacacatgaatcgcgcaaagttgaaaaagaacttccaaatacaggttctgaagraatggatttaccattgaaagaatttgcactgattacaggtgcggctttgttagctagaagacgtactaaaaacgaaaaagaatcataa

SEQ ID NO: 20 - DNA, 6561 bp, Staphylococcus aureus; identical to SEQ ID NO: 19

SEQ ID NO: 21 - DNA, 1767 bp, Staphylococcus aureus
atgagtaagagaacaacttattgtggattagttactgargcatttttaggacaagaaattacattaaaaggatgggttaacaatcgtcgtgacctwggtggattgattttcgttgatttaagagatagagaaggaattgtacaagtygtgtttaatcctgcattttcagaagaggcattgaaaattgctgaaacagtacgttctgaatatgttgtagaagttcaaggtacagttacgaagcgtgaccctgaaacwgttaatcctaaaattaaaactggccaagttgaagtacaagttacaaatattaaagtgattaataaatctgagacaccaccattttctataaatgaagaaaatgttaacgttgatgaaaatattcgattaaaataccgttatttagatttacgtcgtcaagagttagcgcaaacatttaaaatgagacatcaaattacacgttctattcgtcaatatttggatgatgaagggttctttgacatcgaaacaccagtactaacgaagtcaacacctgagggtgcacgtgactatttagtaccatctcgtgtycatgatggtgaattttatgcattaccacaatcrccacaattatttaagcaattattgatgattagyggatttgacaaatactaccaaatygtaaaatgcttccgtgacgaagatttacgtgcagatcgtcaacctgaattyacacaagtcgatattgaaatgagttttgtagaycaagaagatgtgatgcaaatgggtgaagaaatgcttaaaaaagttgttaaagaagttaaaggcgttgaaattaatggcgctttcccacgsatgacatataaagaagcgatgcgtcgctatggttctgataaaccagatacrcgttttgaaatggaattaattgacgtttctcaattaggacgtgatatggactttaaagtatttaaagatactgttgaaaatgatggtgaaattaaagcaattgtcgctaaaggtgcagctgaacaatatacwcgtaaagatatggatgctttaacagaatttgtaaacatctatggtgctaaaggattagcrtgggttaaagttgtggaagatggtttgacaggtccaattggacgtttctttgarrcagaaaatgttgaaacattacttacattaactggtgctgaagctggtgacttagtaatgtttgttgcagacaaaccaaatgtcgttgcacaaagtttaggtgcattacgtgtcaaattagctaaagaattaggtttaatcgatgaaacaaaattaaacttcttatgggtgacagattggccattattrgaatatgatgaagatgcgaaacgttacgttgcagcacatcatccatttacatctccaaaagaagcygatattgctaagcttggcactgcgccagaagaagctgaggcaaatgcttatgacatagtattaaatggttatgaattaggtggcggttcaatcagaattcatgayggtgagttacaagaaaaaatgttcgaagttcttggatttactaaagaacaagcacargaacarttcggcttcttactagatgcatttaaatatggtgcaccaccwcatggcggtattgcattaggattagaccgattagtcatgttattgactaatagaacaaacttgagagatacaatygcattccctaaaacagcatctgctacatgtttattaacgaatgcgcctrgtgaagtttctgataaacaattagaagaactttctttgcgaattcgtcactaa

SEQ ID NO: 22 - DNA, 1767 bp, Staphylococcus aureus; identical to SEQ ID NO: 21

SEQ ID NO: 23 - DNA, 1767 bp, Staphylococcus aureus; identical to SEQ ID NO: 21

SEQ ID NO: 24 - DNA, 1230 bp, Staphylococcus aureus
atgtttttattaatcaacattattggtctaattgtatttcttggtattgcggtattattttcaagagatcgcaaaaatatccaatggcaatcaattgggatcttagttgttttaaacctgtttttagcatggttctttatttattttgattggggkcaaaaagcagtaagaggagcagccaatggtatcgcttgggtagttcagtcagcgcatgctggtacaggttttgcatttgcaagtttgacaaatgttaaaatgatggatatggctgttgcagccttattcccaatwttattaatagtgccattatttgatatcttaatgtactttaatattttaccgaaaattattggaggtattggttggttactagctaaagtaacaagacaacctaaattmgagtcattctttgggatwgaaatgatgttyttaggaaatactgaagcattagccgtatcaagtgagcaactaaaacgtatgaatgaaatgcgtgtattaacaatcgcaatgatgtcaatgagctctgtatcsggagctattgtaggtgcgtatgtacaaatggtaccaggagaactggtactaacggcaattccactaaatatcgttaacgcgattattgtgtcatgcttgttgaatccagtaagtgttgaagagaaagaagatattatttacagtcttaaaaacaatgargttgaacgtcaaccattcttctcattccttggagattctgtattagcagcaggtaaattagtattaatcatcatcgcatttgttattagttttgtagcrttagctgatctatttgatcgttttatcaatttgattacaggawtgatagsaggatggataggcataaaaggtagtttcggtttaaaccaaattttaggtgtgtttatgtatccatttgcgctattactcggtttaccttatgatgaagcgtggttggtagcacaacaaatggctaagaaaattgttacaaatgaatttgttgttatgggtgaaatttctaaagatattgcatcttatacaccacaccatcgtgcggttattacaacattcttaatttcatttgcaaacttctcaacgattggtatgattatcggtacattgaaaggmattgtwgataaaaagacatcagactttgtatctaaatatgtrcctatgatgctattatcaggtatcctagtytcattattaacagcagctttcgttggtttatttgcatggtaa

SEQ ID NO: 25 - DNA, 1230 bp, Staphylococcus aureus; identical to SEQ ID NO: 24

SEQ ID NO: 26 - DNA, 1230 bp, Staphylococcus aureus; identical to SEQ ID NO: 24

SEQ ID NO: 27 - DNA, 2403 bp, Staphylococcus aureus
atgagtttggtttatytattaattgctatactwgtrattatggcgatgataytwytaayrtctaaacgtagagcawtggctaaatatgcmggrtacatagcgytgrytgcacctgtaatwkcatctatytattttttgwtwcaartwccatcagtarytaaacwgcawtatytktctryytcyattccrtggatkamswcattagatattaatktagatttacgtttagatggtttragtttaatgttttcycttattatttcmcttattggaatygcwgtattcttctatgcaacwcaatatttatcctctcgwaaagayaatttaccaaggttttayttwtayttaacgytatttatgttyagyatgmtyggtattgtattakcwgayaatacratattratgtayrtkttttgggaaytaackagygtatcatcatttytattratttcatattggtataacaayggwgayagtcaatttggtgcgatkcartcatttatgattacagtatttggtggwttggcrttattagttggttttatyatgytgtatatyatgacaggaacgaataayatcacwgasatattaggacaagcagatcatattaagaaycatgswttrtttatcccyatgattwtyatgtttttattaggtgcatttacaaartcwgcacaattyccatttcatatttggytaccwagrgcaatggcwgcrcctacacctgtaagtgcwtatttacattcagccackatggtwaaagctggtatctttttattacttmgatttacaccwttrttaggtctwagcaatatgtayrtwtatatcgthacstttgtyggkttaataacwatgttatttggwtcaatyacagctttaaaacaatgggatttaaaaggwatcctagcrtaytcwacaatcagtcaactwggratgattatggcwatggtsggtatmggtggyggatatgctcaacaccaacaagacgcaatagcatctatttatgtatttgtrttatttgswgcrytrttycatctwatgaatcatgcmatyttyaartgtgcgcttttcatgggwgtaggkattttagatcatgaagcaggttcaagggayatacgaattttaagtggmatgcgtcaaytatttccwaaaatgaatctwgtyatgaygatwgcggckctatctatggctggwgtwccatttttaaatggatttttaagtaaagaaatgttyttagatgcwttaacacaaactggacaattrtcccaatttagtttgatttcaatgatakctatcgtrtktrtkggtgttattgckagtrtttttacattcacatatgcactwtacatggtwaaagaagtattttggacwaaatatgattctaargtktttactaaaaaaaatatccacgaaccatggttgtttagtttaccmtctcttatattaatggtgctagtacctgtaatcttttttgtrccaaatatatttgggaaggggattatcgttcyagcattaagagstgtatcaggtggtaatcatcaaattgatcmattggyaccacatgtttcgcaatggcatggatttaacataccgcttcttttaaccatcatcattattttattgggtagtgtactagcaatcaaagtagattggaaaaaagtgttcacaggtaaaattagacaratttcagtttcaaaargstaygaratggtwtaycgacawtttgaaaagtttrctacgaagcgatttaaacgtgttatgcaagatcgtttaaaycaatacattattatgacmytrggcatatttatgrtwatcatyggatayggttatattcgwatwggactwccwaaagtwcatcagttacatgtttcygaatttggrscrttagaarttatattagcaatygtwacwgtyaymattggtwtktcwttaatwtttatacgtcaacgactracmatggtcattttaaatggrgtcatcggwtttgttgtracyttattctttatagcaatgaaagcmcctgatytagcattgacwcarctwgtagttgaaacratwacgacratwytatttattgtyagyttttcaagattaccmaacgtrccaagrtctaamgytaayaaaaaamgagaaataattaaaatttcwgtatcwctywtgatggcrctkattgttgtrtcaytwattttyatyrcrcaacaarcagatggwttrkcatcratwtcwrayttttatytwaragckgayaaaytaacaggtggyaaaaayattgtraatgcgataytwggwgactttagagcattagatacattrtttgaaggwttagtrttaattattactggrytaggtatttacacattattaaattaycaagatmggaggggacaagatgaaagagaatga

SEQ ID NO: 28 - DNA, 2403 bp, Staphylococcus aureus; identical to SEQ ID NO: 27

SEQ ID NO: 29 - DNA, 2403 bp, Staphylococcus aureus; identical to SEQ ID NO: 27

SEQ ID NO: 30 - DNA, 1185 bp, Staphylococcus aureus
atggcaaaagaaaaattygatcgttctaaagaacatgccaatatcggtactatcggtcacgttgaccatggtaaaacaacattaacagcagcaatcgctactgtattagcaaaaaatggtgactcagttgcacaatcataygacatgattgacaacgctccagaagaaaaagaacgtggtatcacaatcaatacttcwcacattgagtaccaaactgacaaacgtcactacgctcacgttgactgcccaggacacgctgactaygttaaaaacatgatcactggtgctgctcaaatggacggyggtatcttagtagtatctgctgctgacggtccaatgccacaaactcgtgaacacattcttttatcacgtaacgttggtgtaccagcattagtagtattcttaaacaaagttgacatggttgacgatgaagaattattagaattagtagaaatggaagttcgtgacttattaagcgaatatgacttcccaggtgacgatgtacctgtaatcgctggttcagcattaaaagctttagaaggcgatgctcaatacgaagaaaaaatcttagaattaatggaagctgtagatacttacattccaactccagaacgtgattctgacaaaccattcatgatgccagttgaggacgtattctcaatcactggtcgtggtactgttgctacaggccgtgttgaacgtggtcaaatcaaagttggtgaagaagttgaaatcatcggtttacatgacacatctaaaacaactgttacaggtgttgaaatgttccgtaaattattagactacgctgaagctggtgacaacattggtgcattattacgtggtgttgctcgtgaagacgtacaacgtggtcaagtattagctgctcctggttcaattacaccacatactgaattyaaagcagaagtatacgtattatcaaaagacgaaggtggacgtcacactccattcttctcaaactatcgtccacaattctatttccgtactactgacgtaactggtgttgttcacttaccagaaggtactgaaatggtaatgcctggtgataacgttgaaatgacagtagaattaatcgctccaatcgcgattgaagacggtactcgtttctcaatccgygaaggtggacgtactgtaggatcaggcgttgttactgaaatcattaaataa

SEQ ID NO: 31 - DNA, 1185 bp, Staphylococcus aureus; identical to SEQ ID NO: 30

SEQ ID NO: 32 - DNA, 1185 bp, Staphylococcus aureus; identical to SEQ ID NO: 30

SEQ ID NO: 33 - DNA, 654 bp, Staphylococcus aureus
atggcttcattaaagtcaatcatccgtcaaggtaaacaaacacgttcagatcttaaacaattaagaaaatctggtaaagtaccagcagtagtatacggttacggtactaaaaacgtgtcagttaaagttgatgaagtagaattcatcaaagttatccgtgaagtakgtcgtaacggtgttatcgaattaggcgttggttctaaaactatcaaagttatggttgcagactaccaattcgatccacttaaaaaccaaattactcacattgacttcttagcaatcaatatgagtgaagaacgtactgttgaagtaccagttcaattagttggtgaagcagtaggcgctaaagaaggcggcgtagttgaacaaccattattcaacttagaagtaactgctactccagacaatattccagaagcaatcgaagtagacattactgaattaaacattaacgacagyttaactgttgctgatgttaaagtaactggcgacttcaaaatcgaaaacgattcagctgaatcagtwgtaacagtagttgctccaactgaagaaccaactgaagaagaaatcgaagctatggaaggcgaacaacaaactgaagaaccagaagttgttggcgaaagcaaagaagacgaagaraaaactgaagagtaa

SEQ ID NO: 34 - DNA, 654 bp, Staphylococcus aureus; identical to SEQ ID NO: 33

SEQ ID NO: 35 - DNA, 654 bp, Staphylococcus aureus; identical to SEQ ID NO: 33

SEQ ID NO: 36 - DNA, 279 bp, Staphylococcus aureus
atgtacatcgtacgcccaaacattgaggaagatgctaaaaaagcgttagttgaacgtttcaacggyatcttagctactgaaggtgcagaagttttagaagcaaaagactggggtaaacgtcgcctagcttatgaaatcaatgatttcaaagatggcttctacaacatcgtacgtgttaaatctgataacaacaaagctactgacgaattccaacgtctagctaaaatcagtgacgatatcattcgttacatggttattcgtgaagacgaagacaagtaa

SEQ ID NO: 37 - DNA, 279 bp, Staphylococcus aureus; identical to SEQ ID NO: 36

SEQ ID NO: 38 - DNA, 279 bp, Staphylococcus aureus; identical to SEQ ID NO: 36

SEQ ID NO: 39 - DNA, 6828 bp, Staphylococcus aureus
atgagtaaaagacagaaagaatttcatgacagcttagcaaacgaaaaaacaagagtaagactttataaatctggaaaaaattgggtaaaatccggaattaaagaaatagaaatgttcaaaattatggggctaccatttattagtcatagtttagtgagtcaagataatcaaagcattagtaaaaaaatgacgggatacggactgaaaactacggcggttattggtggtgcattcacggtaaatatgttgcatgaccagcaagcttttgcggcttctgatgcaccattaacttctgaattaaacacacaaagtgaaacagtaggtaatcaaaactcaacgacaatcgaagcatcaacatcaacagccgattccacaagtgtaacgaaaaatagtagttcggtacaaacatcaaatagtgacacagtctcaagtgaaaagtctgaaaaggtcacttcgacaactaatagtacaagcaatcaacaagaaaaattgacatctacatcagaatcaacatcctcaaagaatactacatcaagttctgatactaaatctgtagcttcaacttcaagtacagaacaaccaattaatacatcaacaaatcaaagtactgcatcaaataacacttcacaaagcacaacgccatcttcggtcaacttaaacaaaactagcacaacgtcaactagcaccgcaccagtaaaacttcgaactttcagtcgcttagctatgtcaacatttgcgtcagcagcgacgacaaccgcagtaactgctaatacaattacagttaataaagataacttaaaacaatatatgacaacgtcaggtaatgctacctatgatcaaagtaccggtattgtgacgttaacacaggatgcatacagccaaaaaggtgccattacattaggaacacgtattgactctaataagagttttcatttttctggaaaagtaaatttaggtaataaatacgaaggtaatggaaatggtggagatggtatcggctttgccttttcgccaggtgtattaggtgaaacagggttaaacggtgccgcagtaggtattggtggcttaagtaacgcatttggcttcaaattggatacgtatcacaatacatctaaaccaaattcagctgcaaaggcgaatgctgacccatctaatgtagctggtggaggtgcgtttggtgcctttgtaacaacagatagttatggtgttgcgacaacgtatacatcaagttcaacagctgataatgctgcgaagttaaaagtgcaacctacgaacaacacgttccaagattttgatattaattataatggtgatacaaaagttatgactgtaacgtatgcaggtcaaacatggacacgtaatatttcagattggattgcaaaaagtggtacgaccaacttttcattatcaatgacagcctcaacaggtggcgcgacaaatttacaacaagtacaatttggaacattcgaatatacagagtctgctgttacacaagtgagatacgttgatgtaacaacaggtaaagatattattccaccaaaaacatattcaggaaatgttgatcaagtcgtgacaatcgataatcagcaatctgcattgactgctaaaggatataactacacgtccgtcgatagttcatatgcgtcaacttataatgatacaaataaaactgtaaaaatgacgaatgctggacaatcagtgacatattattttactgatgtaaaagcaccaactgtaactgtaggcaatcaaaccattgaagtgggtaaaacaatgaatcctgttgtgttgactacaacggataatggtactgggactgtgacaaatacagttacaggattaccaagcggattaagttatgatagtgcaacgaattcaatcattgggacgccaacgaaaattggtcaatcaacagtgacagttgtgtctactgaccaagcaaacaataaatcgacgacaacttttacaataaatgttgtggatacgacagcaccaacagtgacaccaataggagatcaatcatcagaagtgtattcgccaatatcaccgattaaaattgctacgcaggacaacagtggaaatgcggtgacgaatacagtgactggattgccatctggactaacattcgatagtacaaataataccattagtggtacaccaacaaacattggtacaagtactattacaatcgtttctacagatgcgagtggtaacaaaacgacaacaacttttaaatatgaagtaacaagaaatagcatgagtgattccgtatcaacatcaggaagtacacaacaatcccaaagtgtctcaacaagtaaagctgactcacaaagtgcatcaacgagtacatcaggatcgattgtggtatctacatcagctagtacctcgaaatcgacaagtgtaagcctatctgattctgtgagtgcatctaagtcattaagcacatctgaaagtaatagtgtatcaagctcaacaagcacaagtttagtgaattcacaaagtgtatcatcaagcatgtcggattcagctagtaaatcaacatcattaagcgattctatttcaaactctagcagtactgaaaaatccgaaagtctatcaacaagtacatctgattcattgcgtacatcaacgtcactcagtgactcattaagtatgagtacatcggggagcttgtctaagtcaaaaagtctatcaacaagtacatcagaatcgtctagtacatcagcatcattaagtgacagcacatcgaatgcaatcagcacatcagaatcattgagcgagtcagctagcacctcggactctatcagtatttcaaatagcatagccaactctcaaagtgcgtcaacaagcaaatcagattcacaaagtacatcaatatcattaagtacaagtgattcaaaatcgatgagtacatcagaatcattgagcgattcgacgagcacaagtggttctgtttctggatcactaagcatagcagcatcacaaagtgtctcaacaagtacatcagactcgatgagtacttcagagatagtaagtgactctatcagtacaagtgggtcattatctgcatcagacagtaaatcaatgtctgtaagtagttcaatgagcacgtctcagtcaggtagtacatcagaatcattaagtgattcacaaagtacatctgattctgatagtaagtcattatcactaagtactagtcaatcaggttcaacaagtacatcaacgtcgacaagtgcttcagtacgtacttcggaatcacaaagtacgtctggttcaatgagtgcaagtcaatccgattcaatgagcatatcaacgtcgtttagtgattcaacgagtgatagcaaatcagcatcaactgcatcaagtgaatcaatatcacaaagtgcttctacgagcacatctggttcggtaagtacttcgacatcgttaagtacaagtaattcagaacgtacatcaacatctatgagtgattccacaagcttaagtacatcagagtctgattcaataagtgaatcaacgtcaacgagcgactctataagtgaagcaatatctgcttcagagagcacgtttatatcattaagtgaatcaaatagtactagcgattcagaatcacaaagtgcatctgcctttttaagtgaatcattaagtgaaagtacgtctgaatcaacatcagagtcagtgagtagttcgacaagtgagagtacgtcattatcagacagtacatcagaatctggtagcacatcaacatcattaagtaattcaacaagtggtagtgcgtccatttcaacatcgacaagtatcagtgaatcaacgtcaacgtttaagagcgagagtgtttcaacatcactaagtatgtcaacgagtacaagtttgtctgactctacaagtttgtcaacatcattaagtgattccacaagtgatagtaagtctgattcattaagtacatcaatgtcgacaagtgattcaatcagtacaagtaaatctgattccattagtacatccacatcattaagtggttctacaagtgaaagtgaatccgactcaacatcatcaagtgaaagtaaatccgattcaacatcaatgagcataagtatgtctcaatcaacatcaggaagtacaagtacgtcaacgagtacaagtttgtctgactcaacgagtacgtcattgtcactaagtgcatcaatgaatcaaagcggagtagactcaaactcagcaagccaaagtgcctcaaactcaacaagtacaagcacgagcgaatccgattcacaaagcacatcatcatatacaagtcagtcaacaagccaaagtgaatccacatcgacatcaacgtcactaagcgattcaacaagtatatctaaaagtacgagtcaatcaggttcggtaagcacatcagcgtcattaagtggttcagagagtgaatctgattcacaaagtatctcaacaagtgcaagtgaatcaacatcagaaagtgcgtcaacatcactcagtgactcaacaagtacaagtaactcaggatcagcaagtacgtcaacatcgctcagtaactcagcaagcgcaagtgaatccgattcgtcgtcaacatctttaagtgattcaacatctgcgtcaatgcaaagcagtgaatccgattcacaaagcacatcagcatcattaagtgattcgctaagtacatcaacttcaaaccgcatgtcgaccattgcaagtttatcaacatcggtaagtacatcagaatctggctcaacatcagaaagtacaagtgaatccgattcaacatcaacatcattaagcgattcacaaagcacatcaagaagtacaagtgcatctggatcagcaagtacatcaacatcaacaagtgactctcgtagtacatcagcttcaactagtacttcgatgcgtacaagtacaagtgattcacaaagtatgtcgctttcaacaagtacatcaacaagtatgagtgattcaacgtcattatctgatagtgttagtgattcaacatcagactcaacaagtgcgagtacatctggttcgatgagtgtgtctatatcgttaagtgattcgacaagcacatcaacatcggctagtgaagtaatgagcgcaagcatatctgattcacaaagtatgtcagaatctgtaaatgattcagaaagtgtaagcgaatctaattctgaaagtgactcaaaatcgatgagtggttcaacaagcgtaagtgattctggctcattgagcgtctcaacgtcattaagaaaatcagaaagtgtaagtgagtctagttcattgagtggctcacaatcgatgagcgattcagtaagcacaagcgattcgtcatcattaagtgtatcgacgtcactaagaagttcggaaagcgtgagtgaatctgattcattaagtgattcaaaatcgacaagtggttcgacttcaacaagtacatctggttcattgagtacctcaacatcattaagtggttcagaaagcgtaagcgagtctacctcgctaagtgattcaatatcaatgagtgattctactagtacaagtgactccgactcattaagtggatcaatatctttaagtggttccacaagtcttagcacttcggattcattaagtgattcaaaatcattgagtagctcgcaaagtatgagtggatcagaatcaacgtcaacaagtgtgagcgattcgcagtcaagctcaacaagtaatagtcaatttgactctatgagcatcagtgcatcagaaagcgactcaatgtctacaagtgattcgtctagcatcagtggatcaaattcaacgagtacatcactttcaacatctgactcaatgagcggaagcgtatcagtttcaacatcgacaagtttaagtgactcaatatcaggttcaacaagtttaagtgactcgagctcaacaagcacatctacatcattaagtgattcaatgtcacaaagccagtcaacaagtacaagtgcatctggttccttaagtacatcgatatcaacatcaatgtcaatgagtgctagtacatcgtcatcacaaagcacatcggtgtcgacatcattatcaacatcagacagtatcagtgattctacttcaataagtatcagtggttcacaaagtacagtagaatcagaatctacaagtgattcaacttctatcagtgactcagaatcattgagtacatcagattcagactcgacatcgacaagtacatcggactcaacaagtggttcaacttcaacaagcatatctgaatcattaagtacgtctggttcaggttcaacgagcgtatctgactcaacatcaatgagtgaatccgattcaacaagtgtttcaatgtcacaaagtatgtccggttcaacgtacaactcgacttcagtgagcgactcagaatcagtgtcaacaagcacatcaacgtcattgagcacatccgattcgacaagcacatccgaatcactgagtacatctatgtctggttcacaaagcatttctgactcgacatcaacaagtatgtccggctcaacaagtacatctgaatctaactcaatgcatccgtcagactcaatgagtatgcatcatactcacagcacgagcacatctcgcttatcaagtgaagcaacaacgagcacgagtgaatctcagtctacattaagtgcaacatctgaagtgactaaacataatggcacgccagcacaaagtgaaaaaagattgccagatacaggtgactcaataaaacaaaatggattactaggtggcgttatgacattattagttggtttaggtttaatgaagagaaagaaaaagaaagatgaaaatgatcaagatgattctcaagcataa

SEQ ID NO: 40 - DNA, 6828 bp, Staphylococcus aureus; identical to SEQ ID NO: 39

SEQ ID NO: 41 - DNA, 6816 bp, Staphylococcus aureus
atgagtaaaagacagaaagcatttcatgacagcttagcaaacgaaaaaacaagagtaagactttataaatctggaaaaaattgggtaaaatccggaattaaagaaatagaaatgttcaaaattatggggctaccatttattagtcatagtttagtgagtcaagataatcaaagcattagtaaaaaaatgacgggatacggactgaaaactacggcggttattggtggtgcattcacggtaaatatgttgcatgaccagcaagcttttgcggcttctgatgcaccattaacttctgaattaaacacacaaagtgaaacagtaggtaatcaaaactcaacgacaatcgaagcatcaacatcaacagccgattccacaagtgtaacgaaaaatagtagttcggtacaaacatcaaatagtgacacagtctcaagtgaaaagtctgaaaaggtcacttcgacaactaatagtacaagcaatcaacaagagaaattgacatctacatcagaatcaacatcctcaaagaatactacatcaagttctgatactaaatctgtagcttcaacttcaagtacagaacaaccaattaatacatcaacaaatcaaagtactgcatcaaataacacttcacaaagcacaacgccatcttcggtcaacttaaacaaaactagcacaacgtcaactagcaccgcaccagtaaaacttcgaactttcagtcgcttagctatgtcaacatttgcgtcagcagcgacgacaaccgcagtaactgctaatacaattacagttaataaagataacttaaaacaatatatgacaacgtcaggtaatgctacctatgatcaaagtaccggtattgtgacgttaacacaggatgcatacagccaaaaaggtgctattacattaggaacacgtattgactctaataagagttttcatttttctggaaaagtaaatttaggtaacaaatatgaagggcatggaaatggtggagatggtatcggttttgccttttcaccaggtgtattaggtgaaacagggttaaacggtgccgcagtaggtattggtggcttaagtaacgcatttggcttcaaattggatacgtatcacaatacatctaaaccaaattcagctgcaaaggcgaatgctgacccatctaatgtagctggtggaggtgcgtttggtgcatttgtaacaacagatagttatggtgttgcracaacgtatacatcaagttcaacagctgataatgctgcgaagttaaatgttcaacctacaaataacacgttccaagattttgatattaactataatggtgatacaaaggttatgactgtcaaatatgcaggtcaaacatggacacgtaatatttcagattggattgcgaaaagtggtacgaccaacttttcattatcaatgacagcctcaacaggtggcgcgacaaatttacaacaagtacaatttggaacattcgaatatacagagtctgctgttacacaagtgagatacgttgatgtaacaacaggtaaagatattattccaccaaaaacatattcaggaaatgttgatcaagtcgtgacaatcgataatcagcaatctgcattgactgctaaaggatataactacacgtccgtcgatagttcatatgcgtcaacttataatgatacaaataaaactgtaaaaatgacgaatgctggacaatcagtgacatattattttactgatgtaaaagcaccaactgtaactgtaggcaatcaaaccatagaagtgggtaaaacaatgaatcctrttgtrttgactacaacggataatggtactgggactgtgacaaatacagttacaggattaccaagcggattaagttacgatagtgcaacgaattcaatcattgggacaccaacaaaaattggtcaatcaacagtgacagttgtgtctactgaccaagcaaataacaaatcgacgacaacttttacaataaatgttgtggatacgacagcaccaacagtgacaccaataggagatcaatcatcagaagtgtattcaccaatatccccgattaaaattgctacgcaagataacagtggaaatgcggtgacgaatacagtgactggattgccatccggactaacatttgatagtacaaataatactattagtggtacaccaacaaacattggtacaagtactatatcaatcgtttctacagatgcgagcggtaacaaaacgacgacaacttttaaatatgaagtaacaagaaatagcatgagtgattccgtatcaacatcaggaagtacacaacaatctcaaagtgtstcaacaagtaaagctgactcacaaagtgcatcaacgagtacatcaggatcgattgtggtatctacatcagctagtacctcgaaatcgacaagtgtaagcctatctgattctgtgagtgcatctaagtcattaagcacatctgaaagtaatagtgtatcaagctcaacaagcacaagtttagtgaattcacaaagtgtatcatcaagcatgtcrgrttcagytagtaaatcaacatcattaagcgattckatttcraactctarcagtactgaaaaatccgaaagtctatcaacaagtacatctgattcattgcgtacatcaacatcactcagtgactcattaagtatgagtacatcaggaagcttgtctaagtcacaaagcttatcaacgagtatatcagggtcgtctagtacatcagcatcattaagtgacagtacatcgaatgcaattagtacatcaacatcattgagcgagtcagctagcacctcggactctatcagtatttcaaatagcatagccaactctcaaagtgcgtcaacaagcaaatcagattcacaaagtacatcaatatcattaagtacaagtgattcaaaatcgatgagtacatcagaatcattgagcgattcgacgagcacaagtggttctgtttctggatcactaagcatagcagcatcacaaagtgtctcaacaagtacatcagactcgatgagtacttcagagatagtaagtgactctatcagtacaagtgggtcattatctgcatcagacagtaaatcaatgtcygtaagtagttcaatgagcacgtctcagtcaggtagtacatcagaatcattaagtgattcacaaagtacatctgattctgatagtaagtcattatcacwaagtactagtcaatcaggttcaacaagtacatcaacgtcgacaagtgcttcagtacgtacttcggaatcrcaaagtacgtctggttcaatgagtgcaagtcaatccgattcaatgagcatatcaacgtcgtttagtgattcaacgagtgatagcaaatcagcatcaactgcatcaagtgaatcaatatcacaaagtgcttctacgagcacatctggttcggtaagtacttcgacatcgttaagtacaagtaattcagaacgtacatcaacatctrtgagtgattccacaagcttaagtacatcagagtctgattcaataagtgaatcaacgtcaacgagcgaytctataagtgaagcaatatctgcttcagagagcacgtytatatcattaagtgaatcaaatagtactagcgattcagaatcacaaagtgcatctgcctttttaagtgaatcattaagtgaaagtacgtctgaatcaacatcagagtcagtgagtagttcgacaagtgagagtacgtcattatcagacagtacatcagaatctggtagcacatcaacatcattaagtaattcaacaagtggtagtrcgtccatttcaacatcgacaagtatcagtgaatcaacgtcaacgtttaagagcgagagtgtttcaacatcactgagtatgtcaacgagtacaagtttgtctractctacaagtttgtcaacatcattaagtgattccacaagtgatagtaagtctgattcattaagtacatcaatgtcgacaagtgattcaatcagtacaagtaaatctgattccattagtacatcyacatcattaagtggttctacaagtgaaagtgaatccgactcaacatcatcaagtgaaagtaaatccgattcaacatcaatgagcataagtatgtctcaatcaacatcaggaagtacaagtacgtcaacgagtacaagtttgtctgactcaacgagtacrtcattgtcactaagtgcmtcaatgaatcaaagcggagtagactcaaactcagcaagccaaagtgcctcaaactcaacaagtacaagcacgagcgaatccgattcacaaagcacatcawcatatacaagtcagtcaacaagccaaagtgaatcmacatcgacatcaacgtcactaagcgattcaacaagtatatctaaaagtacgagycaatcaggttcrryaagcacatcagcrtcattaagtggttcagagagtgaatctgattcacaaagtatctcaacaagtgcaagtgartcaacatcagaaagtgcgtcaacatcactcagtgactcaacaagtacaagtaactcaggatcagcaagtacgtcaacatcgctcagtaactcagcaagcgcaagtgaatccgattygtcgtcaacatctttaagtgattcaacatctgcgtcaatgcaaagcagtgaatccgattcacaaagcacatcagcatcattaagtgattcgctaagtacatcaacttcaaaccgcatgtcgaccattgcaagtttatcwacatcggtaagtacatcagartctggctcaacatcagaaagtacaagtgaatccgattcaacatcaacatcattaagcgattcacaaagcacatcaagaagtacaagtgcatcaggatcagcaagtacatcaacatcaacaagtgactctcgtagtacatcagcttcaactagtacttcgatgcgtacaagtactagtgattcacaaagtatgtcgctttcracaagtacatcaacaagtatgagtgattcaacgtcattatctgatagtgtkagtgattcaacatcagactcaacaagtgcgagtacatctggttcgatgagtgtrtctatatcgttaagtgattcgacaagtacatcaacatcggctagtgaagtaatgagcgcaagcatatctgattcacaaagtatgtcagaatctgtaaatgattcagaaagtgtaagtgaatctaattctgaaagtgactctaaatcgatgagtggctcaacaagtgtcagtgattctggctcattgagcgtctcaacgtcattaagaaaatcagaaagtgtaagcgagtcaagttcattgagtkgctcacaatcgatgagcgattcagtaagcacaagcgattcgtcatcattaagtgtatcgacgtcactaagaagttcagaaagcgtgagtgaatctgattcattaagtgattcaaaatcaacaagtggttcgacttcaacaagtacatctggttcattgagtacctcaacatcattaagtggttcagaaagcgtaagcgagtctacctcgctaagtgattcaatatcaatgagtgattctactagtacaagtgactccgactcattaagtggatcaatatctttaagtggttccacaagtcttagcacttcggattcattaagtgattcaaaatcattgagtagctcgcaaagtatgagtggatcagaatcaacgtcaacaagtgtgagcgattcgcagtcaagctcaacaagtaatagtcaatttgactctatgagcatcagtgcatcagaaagcgactcaatgtctacaagtgattcgtctarcatcagtggatcaaattcaacgagtacatcactttcaacatctgactcaatgagcggaagcgtatcagtttcaacatcgacaagtttaagtgactcaatatcaggttcaacaagtgtaagtgactcgagctcaacaagcacatctacatcattaagtgattcaatgtcacaaagccagtcaacaagtacaagtgcatctggttccttaagtacatcgatatcaacatcaatgtcaatgagtgctagtacatcgtcatcacaaagcacatcggtgtcgacatcattatcaacatcagacagtatcagtgattctacttcaataagtatcagtggttcacaaagtacagtagaatcagaatctacaagtgattcaacttctatcagtgactcagaatcattgagtacatcagattcagactcgacatcgacaagtacatcggactcaacaagtggttcaacttcaacaagcatatctgaatcattaagtacgtctggttcaggttcaacgagcgtatctgactcaacatcaatgagtgaatcyrattcawcragtgtttcaatgtcacaagacaaatcygactcaacatcaattagygactcagaatcagtgtcaacaagcacatcaacgtcattgagcacatccgattcgacaagcacatccgaatcrctgagtacatctatgtctggttcacaaagcatttctgactcaacatcaacaagtatgtccggctcaacaagtacatctgaatctaactcaatgcatccgtcagactcaatgagtatgcatcatactcacagcacgagcacatctcgcttatcaagtgaagcaacaacgagcacgagtgaatctcagtctacattaagtgcaacatctgaagtgactaaacataatggcacrccwgcacaaagtgaaaaaagattgccagatacaggtgactcaataaaacaaaatggattactaggtggcgttatgacattattagttggtttaggtttaatgaagagaaagaaaaagaaagatgaaaatgatcaagatgattctcaagcataa

SEQ ID NO: 42 - DNA, 6816 bp, Staphylococcus aureus; identical to SEQ ID NO: 41

SEQ ID NO: 43 - DNA, 6786 bp, Staphylococcus aureus
atgagtaaaagacagaaagcatttcatgacagcttagcaaacgaaaaaacaagagtaagactttataaatctggaaaaaattgggtaaaatccggaattaaagaaatagaaatgttcaaaattatggggctaccatttattagtcatagtttagtgagtcaagataatcaaagcattagtaaaaaaatgacgggatacggactgaaaactacggcggttattggtggtgcattcacggtaaatatgttgcatgaccagcaagcttttgcggcttctgatgcaccattaacttctgaattaaacacacaaagtgaaacagtaggtaatcaaaactcaacgacaatcgaagcatcaacatcaacagccgattccacaagtgtaacgaaaaatagtagttcggtacaaacatcaaatagtgacacagtctcaagtgaaaagtctgaaaaggtcacttcgacaactaatagtacaagcaatcaacaagagaaattgacatctacatcagaatcaacatcctcaaagaatactacatcaagttctgatactaaatctgtagcttcaacttcaagtacagaacaaccaattaatacatcaacaaatcaaagtactgcatcaaataacacttcacaaagcacaacgccatcttcggtcaacttaaacaaaactagcacaacgtcaactagcaccgcaccagtaaaacttcgaactttcagtcgcttagctatgtcaacatttgcgtcagcagcgacgacaaccgcagtaactgctaatacaattacagttaataaagataacttaaaacaatatatgacaacgtcaggtaatgctacctatgatcaaagtaccggtattgtgacgttaacacaggatgcatacagccaaaaaggtgctattacattaggaacacgtattgactctaataagagttttcatttttctggaaaagtaaatttaggtaacaaatatgaagggcatggaaatggtggagatggtatcggttttgccttttcaccaggtgtattaggtgaaacagggttaaacggtgccgcagtaggtattggtggcttaagtaacgcatttggcttcaaattggatacgtatcacaatacatctaaaccaaattcagctgcaaaggcgaatgctgacccatctaatgtagctggtggaggtgcgtttggtgcatttgtaacaacagatagttatggtgttgcgacaacgtatacatcaagttcaacagctgataatgctgcgaagttaaatgttcaacctacaaataacacgttccaagattttgatattaactataatggtgatacaaaggttatgactgtcaaatatgcaggtcaaacatggacacgtaatatttcagattggattgcgaaaagtggtacgaccaacttttcattatcaatgacagcctcaacaggtggcgcgacaaatttacaacaagtacaatttggaacattcgaatatacagagtctgctgttacacaagtgagatacgttgatgtaacaacaggtaaagatattattccaccaaaaacatattcaggaaatgttgatcaagtcgtgacaatcgataatcagcaatctgcattgactgctaaaggatataactacacgtccgtcgatagttcatatgcgtcaacttataatgatacaaataaaactgtaaaaatgacgaatgctggacaatcagtgacatattattttactgatgtaaaagcaccaactgtaactgtaggcaatcaaaccatagaagtgggtaaaacaatgaatcctattgtattgactacaacggataatggtactgggactgtgacaaatacagttacaggattaccaagcggattaagttacgatagtgcaacgaattcaatcattgggacaccaacaaaaattggtcaatcaacagtgacagttgtgtctactgaccaagcaaataacaaatcgacgacaacttttacaataaatgttgtggatacgacagcaccaacagtgacaccaataggagatcaatcatcagaagtgtattcaccaatatccccgattaaaattgctacgcaagataacagtggaaatgcggtgacgaatacagtgactggattgccatccggactaacatttgatagtacaaataatactattagtggtacaccaacaaacattggtacaagtactatatcaatcgtttctacagatgcgagcggtaacaaaacgacgacaacttttaaatatgaagtaacaagaaatagcatgagtgattccgtatcaacatcaggaagtacacaacaatctcaaagtgtgtcaacaagtaaagctgactcacaaagtgcatcaacgagtacatcaggatcgattgtggtatctacatcagctagtacctcgaaatcgacaagtgtaagcctatctgattctgtgagtgcatctaagtcattaagcacatctgaaagtaatagtgtatcaagctcaacaagcacaagtttagtgaattcacaaagtgtatcatcaagcatgtcggattcagctagtaaatcaacatcattaagcgattctatttcaaactctagcagtactgaaaaatccgaaagtctatcaacaagtacatctgattcattgcgtacatcaacatcactcagtgactcattaagtatgagtacatcaggaagcttgtctaagtcacaaagcttatcaacgagtatatcagggtcgtctagtacatcagcatcattaagtgacagtacatcgaatgcaattagtacatcaacatcattgagcgagtcagctagcacctcggactctatcagtatttcaaatagcatagccaactctcaaagtgcgtcaacaagcaaatcagattcacaaagtacatcaatatcattaagtacaagtgattcaaaatcgatgagtacatcagaatcattgagcgattcgacgagcacaagtggttctgtttctggatcactaagcatagcagcatcacaaagtgtctcaacaagtacatcagactcgatgagtacttcagagatagtaagtgactctatcagtacaagtgggtcattatctgcatcagacagtaaatcaatgtccgtaagtagttcaatgagcacgtctcagtcaggtagtacatcagaatcattaagtgattcacaaagtacatctgattctgatagtaagtcattatcacaaagtactagtcaatcaggttcaacaagtacatcaacgtcgacaagtgcttcagtacgtacttcggaatcacaaagtacgtctggttcaatgagtgcaagtcaatccgattcaatgagcatatcaacgtcgtttagtgattcaacgagtgatagcaaatcagcatcaactgcatcaagtgaatcaatatcacaaagtgcttctacgagcacatctggttcggtaagtacttcgacatcgttaagtacaagtaattcagaacgtacatcaacatctatgagtgattccacaagcttaagtacatcagagtctgattcaataagtgaatcaacgtcaacgagcgactctataagtgaagcaatatctgcttcagagagcacgtttatatcattaagtgaatcaaatagtactagcgattcagaatcacaaagtgcatctgcctttttaagtgaatcattaagtgaaagtacgtctgaatcaacatcagagtcagtgagtagttcgacaagtgagagtacgtcattatcagacagtacatcagaatctggtagcacatcaacatcattaagtaattcaacaagtggtagtacgtccatttcaacatcgacaagtatcagtgaatcaacgtcaacgtttaagagcgagagtgtttcaacatcactgagtatgtcaacgagtacaagtttgtctgactctacaagtttgtcaacatcattaagtgattccacaagtgatagtaagtctgattcattaagtacatcaatgtcgacaagtgattcaatcagtacaagtaaatctgattccattagtacatccacatcattaagtggttctacaagtgaaagtaaatccgattcaacatcaatgagcataagtatgtctcaatcaacatcaggaagtacaagtacgtcaacgagtacaagtttgtctgactcaacgagtacatcattgtcactaagtgcctcaatgaatcaaagcggagtagactcaaactcagcaagccaaagtgcctcaaactcaacaagtacaagcacgagcgaatccgattcacaaagcacatcawcatatacaagtcagtcaacaagccaaagtgaatcmacatcgacatcaacgtcactaagcgattcaacaagtatatctaaaagtacgagtcaatcaggttcggtaagcacatcagcgtcattaagtggttcagagagtgaatctgattcacaaagtatctcaacaagtgcaagtgagtcaacatcagaaagtgcgtcaacatcactcagtgactcaacaagtacaagtaactcaggatcagcaagtacgtcaacatcgctcagtaactcagcaagcgcaagtgaatccgatttgtcgtcaacatctttaagtgattcaacatctgcgtcaatgcaaagcagtgaatccgattcacaaagcacatcagcatcattaagtgattcgctaagtacatcaacttcaaaccgcatgtcgaccattgcaagtttatctacatcggtaagtacatcagagtctggctcaacatcagaaagtacaagtgaatccgattcaacatcaacatcattaagcgattcacaaagcacatcaagaagtacaagtgcatcaggatcagcaagtacatcaacatcaacaagtgactctcgtagtacatcagcttcaactagtacttcgatgcgtacaagtactagtgattcacaaagtatgtcgctttcgacaagtacatcaacaagtatgagtgattcaacgtcattatctgatagtgttagtgattcaacatcagactcaacaagtgcgagtacatctggttcgatgagtgtgtctatatcgttaagtgattcgacaagtacatcaacatcggctagtgaagtaatgagcgcaagcatatctgattcacaaagtatgtcagaatctgtaaatgattcagaaagtgtaagtgaatctaattctgaaagtgactctaaatcgatgagtggctcaacaagtgtcagtgattctggctcattgagcgtctcaacgtcattaagaaaatcagaaagtgtaagcgagtcaagttcattgagtkgctcacaatcgatgagcgattcagtaagcacaagcgattcgtcatcattaagtgtatcgacgtcactaagaagttcagaaagcgtgagtgaatctgattcattaagtgattcaaaatcaacaagtggttcgacttcaacaagtacatctggttcattgagtacctcaacatcattaagtggttcagaaagcgtaagcgagtctacctcgctaagtgattcaatatcaatgagtgattctactagtacaagtgactccgactcattaagtggatcaatatctttaagtggttccacaagtcttagcacttcggattcattaagtgattcaaaatcattgagtagctcgcaaagtatgagtggatcagaatcaacgtcaacaagtgtgagcgattcgcagtcaagctcaacaagtaatagtcaatttgactctatgagcatcagtgcatcagaaagcgactcaatgtctacaagtgattcgtctarcatcagtggatcaaattcaacgagtacatcactttcaacatctgactcaatgagcggaagcgtatcagtttcaacatcgacaagtttaagtgactcaatatcaggttcaacaagtgtaagtgactcgagctcaacaagcacatctacatcattaagtgattcaatgtcacaaagccagtcaacaagtacaagtgcatctggttccttaagtacatcgatatcaacatcaatgtcaatgagtgctagtacatcgtcatcacaaagcacatcggtgtcgacatcattatcaacatcagacagtatcagtgattctacttcaataagtatcagtggttcacaaagtacagtagaatcagaatctacaagtgattcaacttctatcagtgactcagaatcattgagtacatcagattcagactcgacatcgacaagtacatcggactcaacaagtggttcaacttcaacaagcatatctgaatcattaagtacgtctggttcaggttcaacgagcgtatctgactcaacatcaatgagtgaatcyrattcawcragtgtttcaatgtcacaagacaaatcygactcaacatcaattagygactcagaatcagtgtcaacaagcacatcaacgtcattgagcacatccgattcgacaagcacatccgaatcrctgagtacatctatgtctggttcacaaagcatttctgactcaacatcaacaagtatgtccggctcaacaagtacatctgaatctaactcaatgcatccgtcagactcaatgagtatgcatcatactcacagcacgagcacatctcgcttatcaagtgaagcaacaacgagcacgagtgaatctcagtctacattaagtgcaacatctgaagtgactaaacataatggcacrccwgcacaaagtgaaaaaagattgccagatacaggtgactcaataaaacaaaatggattactaggtggcgttatgacattattagttggtttaggtttaatgaagagaaagaaaaagaaagatgaaaatgatcaagatgattctcaagcataa

SEQ ID NO: 44 - DNA, 6786 bp, Staphylococcus aureus; identical to SEQ ID NO: 43

SEQ ID NO: 45 - DNA, 447 bp, Staphylococcus aureus
atgaaagtaatttttacacaagatgttaaaggtaaaggtaaaaaaggtgaagttaaagaagtaccagtaggttatgcaaataacttcttattgaaaaagaattatgctgtagaagcaacaccaggtaacctkaaacaattagagttacagaaaaaacgtgcaaaacaagaacgccaacaagaaattgaagatgctaaagcattaaaagaaackttatcaaacattgaagttgaagtatcagcaaaaactggtgaaggtggtaaattgtttggrtcagtaagyacaaaacaaattgccgaagcactaaaagcacaacatgatattaaaattgataaacgtaaaatggatttaccaaatggaattcattccctaggatatacgaatgtacctgttaaattagataaagaagttgaaggtacaattcgcgtacacacagttgaacaataa

SEQ ID NO: 46 - DNA, 447 bp, Staphylococcus aureus; identical to SEQ ID NO: 45

SEQ ID NO: 47 - DNA, 447 bp, Staphylococcus aureus; identical to SEQ ID NO: 45

SEQ ID NO: 48 - DNA, 7176 bp, Staphylococcus aureus
atgattatgggyaatttgagatttcaacaggaatattttcgtatatacaaaaataatacagaatcaacgacacaccgtaatgcgtattgggttaaactcgctaaaaatrttgaagctactaaaatgatgtatgcattatcgacaattgtgcaacaacatgcatctataagacatttttttgatgttactaccgatgacaatttaacaatgatacttcatgaatttctgccttttattgagataaaacaagttccatcttcttccgcaaactatgatttagaagctttttttaagcaagaattaagtacttaccattttaatgattcacctttattcaaakttaaattgtttcagttcgctgatgctgcatatataytattagattttcatgtgtccattttcgatgatagtcaaattgatatttttcttgatgatttatgcaatgcatatcgtggcaatactgttattaacaatactcgacagcatgcacatwtaaatagaaatgatgataaagacaatcaagatgcatcgcatatagcattagactcaaactattttcggytagagaataactctgacatccatatygatagttatttwccaattaagcatccatttgarcaagctttatatcaaacgtatttgattgatgatatgacatcaatagatatggcatcgttggctgttagtgtgtatttagctaatcatataatgagtcaacaacatgatgtcacattaggtatacatgtaccatcacatttaccaaatgatttacacggaaatattgtgccrttaacgttaacaatcgatgcaaaagatgtatgtcaacgytttacaacagattttaataaawgtgtgttgcaaaatatgtcgcaattacagtgcgcgaagtcttcgctttcaytagagactatttttcattgttatcatcawatgatgtcttgttgtaatgatgttattgaggatgtacatcaaatacatgatgcacatacatctttagcggatattgaaatttttccacatcaacacgggttcaaaattatatataacagtgcagcatatgatttgctctcaatcgagacgctgagtgacttagttcgwaatatttatttgcaaattactraagaaaatggaaataaacgaacaactgtagatgaacttaatttgatgacagaacgtgatattcaattatatgacgatatcaatttaagtttrcctgagatagatgatgcgcaaacagttgttaccttatttgagcaacaagttgaagcaacrccgaatyatgtcgctgtgcaatttgacggagtgtttataacatatcaaacattgaatgcacgcgcgaatgatttagcacamcgtttgagaaaccagtatggtgttgaacctaatgatcgtgtcgctgtcatagctgaaaaaagtattgagatgatartagcgatgataggtgtgttgaaagctggtggggcttacgtgccaattgatcygaactatccaagtgatcgtcaggagtacattttaaaagatgyaacgcctaaagttgtwatmacrtaycaagywktatatgaaaatggtaaacraratattaatcacattgatttgaayaagatagcgtggaaaaatattgataatctttctaaatgtaacacgttagaagatcatgcwtatgttatttacacgtcggggacaactggtaaccctaaagggacactaattccgcaccgaggtattgttcgcttggtccatcraaatcattatgtaccattaaatgaaragacgacrattttgttatcaggaactatagcctttgaygctgcaacatttgaaatatatggtgcattgctmaatggtggaaarctgattgttgctaaaamagaacaattattaaatccaatagcgktagaacaattaatcaatgaaaatgacgtyaatactatgtggttaacctcctcattatttaatcagattgctagtgaacgaatagaagtattggtaycgttaaagtatttattaattggtggagaagtattgaatgctaagtgggtggatttgcttaatcaaaraccgaagcatcctcaaattattaatggttatggaccaactgaaaatacaacatttacaacgacgtataatatacctaacaaagttccaaatcgtattcctattggtaaaccgattctkggtactcatgtttatatcatgcaaggcgagcgtcggtgtggcgttggtattcctggagaattatgtacaagtggctttgggttrgctgcaggttatttaaatcagccagaattgacagcagataaatttatcaaagattcaaatataaatcagctgatgtatagaagtggtgatatcgtwcgtttgttacccgatggcaacatagattatttatatcgaaaggacaaacaagttaagattcgaggrtttaggattgagttgtcagaggttgagcatgcgctcgagcgtatacaaggtattaataaagcwgttgttattgttcaaaatcatgatcaagaycagtatatcgttgcttattatgaagcgatgcatacattatcacataataagattaaatcacaattacgtatgaccttacckgagtacatgataccagttaatttyatgcatattgagcaaattcctattactattaatgggaaattagataagaaggcattgcctatcatggactatgtcgatacggatgcctatgtagcaccgagtacagataccgaacacttgctatgccaaatttttgcagatattttacatgtgaatcaagtaggtattcatgataatttctttgaattaggtggccattcmttaaaagcaacgttagtggtgaatcggatagaggcatctactgggaaacgattacaaattggtgatttattacaaaagccaactgtatttgaactagcrcaagcgattgctaaggttcaagaacaaaactatgaagtgattccwgaarctatagttaaagatgattatgtgytgagctctgcacaaaagcgwatgtatttattatggaaatcaaaccataaagatacggtgtataacrtaccttttttatggcggttatcatcagracttaatgtagctcaattgcracaagcagtkcagcrtttgatagcgcgacatgagattytacgaacacaatatattgttgtagatgatgaggttcgacaacgtattgtggcagatgttgyagytgactttraagaagttaacacgcattttacggatgaacaagaaatyatgcgccaatttgtrgcaccttttaatttggaaaagccaagycaaattagagtgagatacattmgaagtccmttacatgcatacctstttatagatacrcatcatatyattaatgayggtatgagtaatatacaattaatgaatgatcttaacgcaytwtatcaacataaattattgttaccacttaaattgcaatataaagactatagtgartggatgtcgcatcgtgatatgacgaaacatagacaatattggttatctcaattcaaagatgaagtacctattttaagcttaccgacagactatgttagaccaaatattaaaacgacaaatggagcaatgatgtcatttacaatgaatcaacaaatgagacagctacttcaaaagtatgtagaaaagcatcaaattactgattttatgttctttatgagtgtggtcatgacgttgttaagyagatatgctcgaaaagatgatgttgttgtcggtagtgtsatgagtgcgcgtatgcataaaggcacggagcaaatgctaggcatgtttgctaatacgttggtatatagagggcaaccrtcacytgataaaatgtggacacagtttttacaagaggttaaggaaatgagtttggaggcatacgagcatcaagaatacccattcgaatgtttagtaaatgacttagatcaatcacatgatgcctcacggaatccattatttgatgtcatgttagtactacaaaacaatgaaacgaatcatgctcattttgggcatagtaaattaacacacattcaacccaaatcrgtgacggcgaaatttgatttatctttcatcattgaagaagatygcgatgactatacaatcaatatcgagtataataccgatttatatcactcagaaacagttcgtcacatgggtaatcaatgtatgattatgattgattatattttgaagcatcaagatacactacaaattygtgatataccaaacggyacggaggaacttytaaattgggtcaatacgcatgttaacgatcgaatgcttaatgtcccgggaaataaatctatcataagttactttratgaagttgtctcacgacaaggtaatcatgttgcgctagtcatgaatgatttgacaatgacgtatgaaacattacrcaactatgtrgatgcyattgcgcacatgctcctatcaaatggtgtgggcaakggtcaacsrgttgcyttrwtwacagaacgtagttttgaaatgattgcggcgatgttggcgacagttaaagtaggtgcatcttatatacctatcgatattgattttccgaawaarcgacaaggtgcaattttggaggatgctaaagtaactgcagtcatgtcttacggcgttgaaattgaaacgacattaccagtcattcaattggaaaatgctaaaggytttgttgaatcaaaggaaaatgaacaatatgatgatttacatggcratcaactygaaaacacagcgatgttagataatgagatgtatgctatttacacatctggtacgaccgggatgcctaaaggggttgccatacgacaacgaaatttgttgaatttagtgcatgcatggtcaactgaattgcaattaggcgacaatgaagtatttttgcaacatgcaaatattgtttttgatgcatcagttatggagatttattgttgtttgttaaatggtcatacgcttgtgattccagatagagaggaacgtgttaatccagaacagttacaacaactcattaataagcatcgtgtgacggtkgcgtcgattccrttacagatgtgtagtrttatggaagacttttatattgaaaarttgattacaggcggggcaactagtacggcatcctttgttaaatatattgagaagcattgtggcacgtatttcaatgcctatggaccatctgagtcaacagtcatcacatcgtattggtcacatcawtgtggtgatttgatacctgagacgattccaattggcaaacccttatctaacatccaagtgtatattatgtcagatggtttgttatgcggtattggtatgccaggcgagttgtgtattgcaggtgatagtttagcgataggatatattaaycgtccrgaattaatggctgataaatggcaaaataatccatttggtaaaggaaagttgtatcatagtggtgatttagcacgttatacatctgatggtcaaattgaatttttrggaagaatagataaacaagtgaaagttaacgggtaccgtattgaacttgatgaaattgaaaatgyaatattagctattcgtggtatatctgattgtgttgthacagtwagtcactttgatacgcatgatatattgaatgcttattatgtcggagarcaacaartggarcaggatttgaagcaatatttaaatgatcakctgcctaagtatatgattcctaagactataacgyatatcgattrtatrccattaaccacgaatgacaaggtggatactacgcgtttgccaaatccatcamctatacaacagtctaataaagtrtatagcgaaccmtctaatgaaattgagcagacatttgttgatgtattyggagaggtrttgaaacaaaatgatgtcggtgttgacgatgatttctttgaacttggtggtaactcattagaggcgatgttagttgtctcgcatttaaaacgatttggccatcatatttcaatgcagacattataycaatataaaaccgtgcgacagattgttaattatatgyaccaaaatcaacaatcattagttgcattaccggataatctttcggaattacaaaagattgttatgtctcgttataayttgggtrttttagaggatagtctaagtcatcgacctmtaggaaawacactattgactggcgckacaggktttttaggtgcttatctgattgaagyactacaaggatacagtcatcgcatttattgtttcatacgtgctgataatgaggaaatagcawggtataagttgatgacgaatttaaatgattatttttcagaagagacggttgaaatratgttatcaaacattgaagtcattgttggtgatttcgagtgtatggatgatgttgttttaccwgaaaacatggatacrattattcatgcaggtgctcgtacrgatcactttggtgatgatgatgaatttgaaaaagtaaatgttcaaggtactgttgatgtcatacgtttggcacaacaacatcatgcaaggttaatatatgtgtctacgataagtgtgggaacttattttgatatagayacagaagatgtgacattttcagaagcggatgtctataaaggrcaactactaacatcaccatatacacggagyaaattttatagtgaattaaaagtattagaagctgtaaawaatggcttagatggtcgrattgtacgtgttggtaatttgacgartccwtacaatggaagatggcatatgagaaatataaagactaaccgtttttcaatggtaatgaatgatttgttacaactggattgtatcggggttagcmtsgctgaaatgcctgtagatttttcttttgtggatacgactgcaagacaaattgtcgcattagcacaggtcaacacrccacaaatcatttaccatgtgytatcacctaataaaatgccggtgaaatctttrttagaatgygttaagygcaaagaaattgaactcgtcagcgatgaatcatttaatgaaattttacagaaacaagacatgtacgaaacgattggattaactagtgttgaccgtgaacaacaactagcaatgatagatacaamattaacattaaaaataatgratcacatcagtgaaaaatggccaacgataactaacaattggctgtatcattgggcacaatatatcaaaacaatattcaataagtaa

SEQ ID NO: 49 - DNA, 7176 bp, Staphylococcus aureus; identical to SEQ ID NO: 48

SEQ ID NO: 50 - DNA, 1095 bp, Staphylococcus aureus
ttgagactaggagctcggattttyaaaactggtatagccattattttagctatgtctatcgcttctttactaccggatgatgttggtctgaaagccttagctggtgtcagtgctgttgttgcaatgcaacctagtatttatcgttcatttaaaacagtttctgatcargcattrggtaacattataggtgccataytwtctgttacaatggtaacaatttttagtgataattttatcattatgggtgttaccgtcatagtacttattgctattttatttaaatttaatttagcacatgttgctactttggcgagtgtaacagcattaatcattatgggacaacataccggttctttctatattacygccttttacaggtttgtacttgtaatgattggtgtcataagttcatctctagttaactttgtgtttctaccacctaaatttgaaacaaaaatttactataattcattaaatatatcctcagatatttttatgtggtttaaattagtattaaatgatacgacggagtttaataatattaaacaagatagtcataatttaaaacaacgtgtcgaaaagttagagaaaatttatgattactatagcgaagaacgtcctattacaaaaaaacatattcaccaacagaatagaaagaaaatacttttcagagaagtagttcagacgactagacaagcttatgaagtattaaacaaattgtcgcgttatcaaaacgacttatatttacttaataacaatttcctattacaaatcaaattagatttagattcattaactgcttttcaygagcaaattttagctagcctttctaaaaaagcacgttataatgtgacacatgttgattatgagttagataatccgcagaaaaaagatttattgtcyacatttcagcatgagttaataaatcayccttatcaaacggaatattcgtttgccaatgttatgcaaattgttgcagccatcgaagagtatcgacaccatttagagcatttagaccgcataagaattagctttttcacatatcatagrtctgatgcagacattgaaattgttgaagaagactttgatttataa

SEQ ID NO: 51 - DNA, 1095 bp, Staphylococcus aureus; identical to SEQ ID NO: 50

SEQ ID NO: 52 - DNA, 1095 bp, Staphylococcus aureus; identical to SEQ ID NO: 50

SEQ ID NO: 53 - DNA, 909 bp, Staphylococcus aureus
atgcaaaaaaatatattaaaaagtggtattkcattatctgaattaggtctaggttgcatgagtttaggtacagatttaaaaaaagccgaacaaattatagattgtgctgttgaaaatggtatcacttattttgatacagcagayatgtacgataaaggtataaatgaatcagttgttggtaaggcacttyttaaatatcaacaacgcgatgatattktyattggtacaaaagtaggcaatcgtttaacaaaagatggcagtacaamatgggatccgagtaaatcctatattaaagaggcrgttaaaggttcactaaagcgtttaggtatygatcatatcgatttatatcaacttcatggcggaaccattgatgayccattagacgaaacaataagcgcatttgatgaattgaaacaagaaggaattatacgtgcttacggtatttcttctattcgcccaaatgtaattgattattatttaaaacatagtcaaatcgaaacgataatgtctcaattcaatttgattgataatcgtccagaatcattattagatgcaattcacaacratgatgttaaagtattggcaagaggacctgtgtctaaaggattattaacttcaaacagtgttaatgtgctcgacaataaatttaaagatggtatttttgattattctcatgatgaattgggtgaaacaatagcctctattaaagaaattgaaagtaatttatctgcattgacatttagttatttaacatcacatgacgtgcttggttccatcattgtaggtgcaagtagcgtcgaccaattaaaagaaaatattgaaaactatcatactaaagttrgtttagatcagattaaaacagcaagagctcgtgtaaaggatttggaatataccaatcatttagtgtag

SEQ ID NO: 54 - DNA, 1362 bp, Staphylococcus aureus
atgtcggaaaaagaaatttgggaaaaagtgcttgaaattgctcaagaaaaattatcagctgtaagttactcaactttcctaaaagatactgagctttacacgatyaaagatggtgaagctatcgtattatcgagtattccttttaatgcaaattggttaaatcaacaatatgctgaaattatccaagcaatcttatttgatgttgtaggctatgaagtwaaacctcactttattactactgaagaattagcaaattatagtaataatgaaactgctactccaaaagaarcaacaaaaccttctactgaaacaactgaggataatcatgtgcttggtagagagcaattcaatgcccataacacatttgacacttttgtaatcggaccyggtaaccgcttyccacatgcagcragtttagctgtrgccgaagcaccagccaaagcgtacaatccattatttatctatggaggkgttggtttaggaaaaacccatttaatgcatgccattggtcatcatgttttagataataatccagatgccaaagtgatttacacatcaagtgaaaaattcacaaatgaatttattaaatcaattcgtgataacgaaggtgaagctttcagagaaagatatcgtaatatcgacgtcttattaatcgatgatattcagttcatacaaaayaargtacaaacacaagaagaatttttctatacttttaatgaattgcatcagaataacaagcaaatagttatttcgagtgatcgaccrccaaaggaaattgcacaattagaagaycgattacgttcrcgctttgaatgggggctaattgttgatattacgccaccagattatgaaactcgaatggcaattttgcagaagaaaattgaagaagaaaaattagatattccaccagaagctttaaattatatagcaaatcaaattcaatctaatattcgtgaattagaaggtgcattaacacgtttacttgcatattcacaattattaggaaaaccaattacaactgaattaactgctgaagctttaaaagatatcattcaagcaccaaaatctaaaaagattaccatccaagatattcaaaaaattgtaggccagtactataatgttagrattgaagatttcagtgcaaaaaaacgtacaaagtcaattgcatatccrcgtcaaatagctatgtacttgtctagagagcttacagatttctcattacctaaaattggtgaagaatttggtgggcgtgatcatacgaccgtcattcatgctcatgaaaaaatatctaaagatttaaaagaagatcctatttttaaacaagaagtagagaatcttgaaaaagaaataagaaatgtataa

SEQ ID NO: 55 - DNA, 702 bp, Staphylococcus aureus
atgttagcggctcgtgcatgtgtatttagcggtagtggtttaatcactgtagctacacatccaacaaatcattcagcattacattctcgttgcccagaagcgatggttattgatattaatgatacgaaaatgttgacgaaaatgattgaaatgactgacagtatactaattggtccaggtcttggcgttgatttcaaaggaaataatgccattacattcctactacaaaatatacaaccgcatcaaaatttaatcgtagacggcgatgcsatyacaatctttagtaaaytgaaaccrcaattacctacatgtcgygtgatytttacwccrcayctcaaagaatgggaacgattaagtggtattcctattgaggaacagacatatgagcgtaatcgtgaagcagttgatcgtttaggygcaactgttgtacttaaaaaacayggtactgaaattttctttaaagatgaagactttaaattracaatcggtagcccagcaatggcgactggtggtatgggcgatacacttgctggtatgattacaagytttgtyggtcaatttgataacttaaaagaagcggttatgagtgccacatatacacatagttttattggcgaaaaycttgcaaaagatatgtatgtggtrccaccatcaagacttatcaatgaaataccttacgcaatgaaacaattagaaagttar

SEQ ID NO: 56 - DNA, 1134 bp, Staphylococcus aureus
atgatggaattcactattaaaagagattattttattacacaattaaatgacacattaaaagctatttcaccaagaacaacattacctatattaactggtatcaaaatcgatgcraaagaacatgaagttataytaactggttcagactctgaaatttcaatagaaatcactattcctaaaactgtagatggcgaagatattgtcaatatttcagaaacaggctcagtagtacttcctggacgattctttgttgatattataaaaaaattacctggtaaagatgttaaattatctacaaatgaacaattccagacattaattacatcaggtcattctgaatttaatttragtggcttagatccagatcaatatcctttattacctcaagtttctagagatgacgcaattcaattgtcggtaaaagtrcttaaaaacgtrattgcacaaacraattttgcagtgtccacctcagaaacacgcccagtactaactggtgtgaactggcttatacaagaaaatgaattaatatgcacagcgactgaytcacaccgcttggctgtaagaaagttgcagttagaagatgtttctgaaaacaaaaatgtcatcattccaggtaaggctttagctgaattaaataaaattatgtctgacaatgaagaagacattgatatcttctttgcttcaaaccaagttttatttaaagttggaaatgtgaactttatttctcgattattagaaggacattatcctgatacaacacgtttattccctgaaaactatgaaattaaattaagtatagacaatggggagttttatcatgcgattgatcgtgcmtctttattagcrcgtgaaggtggtaayaacgttattaaattaagtacaggtgatgacgttgttgaattrtcttctacatcaccagaaattggtactgtaaaagaagaagttgatgcaaacgatgttgaaggtggtagcctgaaaatttcattcaactctaaatatatgatggatgctttaaaagcaatcgataatgatgaggttgaagttgaattcttcggtacaatgaaaccatttattctaaaaccaaaaggtgacgactcggtaacgcaattaattttaccaatcagaacttactaa

SEQ ID NO: 57 - DNA, 534 bp, Staphylococcus aureus
ttgtgcaggccgtttgatccgccaatgacgaawacaaagtcgctttgcccttgggtcatgcgttggttcaattcttgggccaatccttcggaagatagcatctttccttgtatttctaatgtaatgactgtkgattgtggtttrattttggctagtattcgttggccttctttttcttttacttgctcratttctttgtcrctcatattttctggtgctttttcgtctgkaacttctatgatgtctatcttggtgtatgggcctaaacgtttttcatattctgctatggcttgcttccaatatttctcttttagtttccctacagctaaaatggtgattttcatgtcgtttggtcctccaaattgttatcaactttccagttatccacaagttattaacttgttcacactkttccctcttattataccaakwttytttgcagtttttgatattttyctgacattyatgcccrattttyagtgtataacttgtgtatttgtggataactctgtgggcattgtgggtatttctctt

SEQ ID NO: 58 - DNA, 969 bp, Staphylococcus aureus
atgacaaattacacagtagatactttaaatytagggraatttatwacagaatctggggaagtcatagataacttgcgtttgagatatgagcatgtyggttatcatggacaaccattagttgtagtttgtcatgcattaactggcaatcatttaacatatggaacagatgattatccgggktggtggcgagaaattattgatgggggatatrtrccyattcaygaytatcaatttttaacatttgatgttattggtagtcctttcggttcaagttcacctttaaacgaccctcattttcctaaaaaattaacattaagagatatwgtyagagcgaatgaacgaggtatacaagcscttggttatgayaarattaatattttaatagggggaagycttggaggwatgcaagcaatggaactactytacaatcracagtttgaagtagataaagccattatycttgctgcaacaagycgaacatcatcttatagtagagctttcaatgaaattgcrmgkcargccattcatcttggtggtaaggaaggtctaagtattgcacgccaattaggttttttgacatatcgatcatcraaaagttatgatgaacgtttyacrccggatgaagtagtcgcataccarcaacatcaaggtaataaatttaaagaacrwttygatttgaattgttatctgacactgctagatgtattggatagtcacaacattgaccgaggtcgcacagacgtaacgcatrtttttaaaaatttagaaacraaagtsttaacratgggsttyatagatgatttgctatatccggaygatcaagttcgtgcwttaggtgaacgttttaaatatcatcgtcatttcttygtrcctgataaygttggrcatgatggattcctactaaactttagtacctgggcacctaacttatatcatttcttaaatttaaagcattttaagcgyaagtaa

SEQ ID NO: 59 - DNA, 1350 bp, Staphylococcus aureus
atgaaacaagcaataggttacttacgacagagcactacaaagcaacaatccttagcagcacaaaaacaaaccatcraggcattagccraaaaacataatattcaayacattaccttttatagcgataarcaatcaggacgyactgataagcggaayggttaycaacaaattactgaactgattcaacaaggacaatgtgaygtattatgttgytaymgwytaaaycgacttcatcgyaatctwaaaaatgcattaaarctcatgaaattrtgtcaaamrtaycatgtycatatcttaagcgttcatgatggctayttygayatggataaagcattcgatcggctcaaactcaatattttcatcagcttggccgaactagaatctgataatataggcgaacaagtcaaaaatggaatcaaagaaaaagcgaracaaggtaaamtrattacaacacatgcrccctttgggtatcactatcataatggtactttcacgatagacacagtaaarkcaccaacagtaaaagctgtgttcaattattaccttcaaggttatggttataaaaaaattgcgcaatacttagaagctgatgataamttcattaatcgyaagccytatcaagtgcgtaatattatcctyaaycctaattactgtggccgtgttatcaatcaatacggacaatatgaaaacatgttcccagctattgtcagtacaacgatatacgaagaagctcaagttacccgaactcagaaacmagtaaaaygtaagccgtcagaaaaycaactcaaacaaaaaatcaaatgtccytattgtsattcracactmacwaayatgacyrtymgaaaamagcaycatwcattrcgttaytatgtytgtcckcaaaatatgaatrmmkctcgytttgtytgtgaattyaaaggratcaacgcacaagaattagaaacaagtgttttagcgacttgtcaggacttctttcaaaatcaacagctctattcaaaaataaaccatactattcaacaacgactcaaaagacaaagagatatagaaaytaaaactacactcaatcacgagcagctgatagaaaaattagcccaagrcaaaattgatgcagaaacgttcaragaacaaacgcamtcattacrtcarcaatcaaaacctatatcatcaatcagtrcgtatcaaattcgaaaagctttccaaaacatcattcaacaacgtttcacgctaaacatgttgtacccctatattgatgaaattaatatttctaaaaataaaagcctcgctggcatctatttcaaaaaygaaccactgaatattgtaaagcagactatgraattatcaattgtataa

SEQ ID NO: 60 - DNA, 627 bp, Staphylococcus aureus
atgaggatagcgattgaaaagataattggtttgctgaaaaaccagtcctctaaagaatcgaatgttaagattcatcgcttggcgtatattacaaactcaaaatttgatggcaataactatatagatagatggtgtaaaatcaggaattctcacattggtgaatacagttatattggatttggtagtgattttaataatgtagaagtaggaagatattgttcgatatcttcggatgtaaaaattgggttaggaaaacatcctacacacttttttagctcatcaccgattttttattctaataataatccatttaacataaagcaaaagtttatagactttaatgaccaaccaagccgtacaacaattaaaaatgatgtgtggattggtgcaaatgtaattattatggatggwttaacaataaatactggtgcagtcatagcagccggctcagttgttactaaaaatgtaggagcatatgaggttgttggtggkgttcctgcaaaagtgattaagaagcgatttgacaataaaacaattgaaaaacttttggaaagcaagtggtgggagaaaacgcctgayaaactaaaaggattttcggttgaatatttaaataaaaaggatacttaa

SEQ ID NO: 61 - DNA, 276 bp, Staphylococcus aureus
atggaagcaagagatattcttaagcgccccgtaatcactgagaaatcttctgaagcaatggctgaagacaaatacactttcgacgttgatactcgtgttaacaaaacacaagtraaaatggcwgttgaagaaatcttcaacgtaaaagttgcaagtgttaatatcatgaattacaaacctaagaaaaaacgtatgggccgttaccaaggctatacaaacaaaagaagaaaagcgattgtaactcttaaagaaggatcaatcgacttatttaactaa

SEQ ID NO: 62 - DNA, 252 bp, Staphylococcus aureus
atgcttacattaataaaattgaaagaagatgaacaggttataatatatgaatatatacctgaagatgatataagtaacggtaaaggttcagtaacttttaataaaaaagatgcagaggttatagatttctcattatctgaaatagaaaatgaagaatattttatgttatatcgtaataagtctttttctgtagtaagagactttatcgagaagcaagaatttcccgaaaattataaaatagcatggtattaa

SEQ ID NO: 63 - DNA, 624 bp, Staphylococcus aureus
atggctaattatgatgttttaaaattagacggaactaaatcaggttcaatcgaattaagcgatgcagtattcggtattgagccaaataatagcgttttattcgaagctattaatttacaacgtgcttcattacgtcaaggtacgcatgctgttaagaatcgttcagcagtaagcggtggcggacgtaaaccatggaagcaaaaaggaacaggtcgtgctcgtcaaggtacaatccgtgctccacaatggcgtggcggtggtatcgtattcggaccaactccaagaagttatgcatacaaaatgcctaagaaaatgcgtcgtttagctttacgctcagcattatctttcaaagytcaagagaatggcttaactgtagttgacgcattcaacttcgaagctccaaaaactaaagaattcaaaaatgtattatctacattagaacaacctaaaaaagtattagtagttactgaaaacgaagatgtaaatgttgaattatcagcacgcaacatccctggcgttcaagtgacaactgctcaaggtttaaatgttttagatatcactaatgctgacagcttagtaattactgaagctgctgctaaaaaagttgaggaggtgctcggataa

SEQ ID NO: 64 - DNA, 630 bp, Staphylococcus aureus
atgacacaagtattcggagaaaacggtgaattaatccctgtaacagtagtagaagctaaagaaaatgttgtattacaaaagaaaactgtagaagttgatggatacaacgcaatccaagttggatttgaagacaaaaaagcatacaaaaaagatgcaaaatctaayaaatatgctaataaaccagctgaaggtcacgctaaaaaagctgacgcagcacctaagcgcttcattcgtgaattccgcaatgtagacgtggatgcttacgaagtaggtcaagaagtctcagtagatacttttgtagctggcgacgttattgacgtaacaggcgtatcaaaaggtaaaggtttccaaggtgcaattaaacgccacggacaatctcgtggacctatgtcacacggttctcatttccacagagcaccaggttctgtaggtatggcttcagatgcttctagagtattyaaaggccaaaaaatgccaggacgtatgggtggaaacactgtaactgttcaaaacttagaagtagttcaagttgacacagaaaacaaagttatcttagtaaaaggtaaygtacctggacctaaaaaaggtttagtagaaatcagaacttcaattaaaaaaggtaataaataa

SEQ ID NO: 65 - DNA, 249 bp, Staphylococcus aureus
ttgctaatattaaaaataaaagaaattaatgataaaagtgttacatataaatattttcctaataatgatgaaaatattaagcckggtattattcaaatggatatagatagycttgaagttatcaatgctgaaaaatctagtttagaaaaaaatacaagagayaattattttattcatgccatagacagaatatacataaatactagtaaagggctatttcctgaatctgaactcgtagcatggggataa

SEQ ID NO: 66 - DNA, 309 bp, Staphylococcus aureus
atggcaaaacaaaaaatcagaatcagattaaaagcttatgatcaccgcgtrattgatcaatcagcagagaagattgtagaaacagcgaaacgttctggtgcagatgtttctggaccaattccgttaccaactgagaaatcrgtwtacacaatcatccgtgccgtgcatawgtataaagattcacgtgaacaattcgaacaacgtacacayaaacgtttaatcgatattgtaaacccaacaccaaaaacagttgacgctttaatgggcttaaacttaccatctggtgtagacatcgaaatcaaattataa

SEQ ID NO: 67 - DNA, 1335 bp, Staphylococcus aureus
gtgaaaaactatttccagttcgataaatatggaacaaactttaaaagagaaatmttaggcggtatcacaactttcttatctatggcctatattttagcagttaacccgcaagttttaagtttagcaggtgttaaaggcgtatcagaagatatgaaaatggaccaaggtgccatttttgtagcgactgcattagcagcatttgtaggctcgctattcatgggrctaatagctaaatatccaatygcrttagcaccaggtatgggattaaatgcattctttgcatttactgttgtgttaaccatgggtattccttggcaagttggtttaacaggygttttattctcaggtatattctttgcgatattaacygtcacagggtttagggaagttattattaatgcaattccttatcaaatgaagatggctgtttcagcaggtataggrttattcattacatttgtaggtttacaaagttcgggtattatagttaaaaatgaatctacattagtaacattgggacatttaactgatccaccagtacttttrgcgatattcggtatcgttattacagttattttatatgcaattaaattgccrggttctatctttatcggtatgatcatcacagcaatcgttggtatgttcactggattgattcaaatgccatctggtattgtrggtaagattccaagtattgaaccaacgttcggygctgcatttgaagcgtttaaagacccaagtcaattattaacgatacagttcttaattgttattttaacgttcttatttattgatttctttgatacagctggtacattagtagcygttgctactcaagcaggtattatgaaagataataaattaccaagagctggtagagcattgttctcagattctttagctacgattgtaggatcagtttttggaacaactacaacaacttcttatatcgaatcaacttcaggtgttgctgtaggtgctagaacaggatttgctagtatcgtaacaggttgttgtttcctattagcgctrttctttagtccgttaatcgctgttgtaacaagtgcagttacgacaccagcyttagtggtggtaggtgtattaatggctgcaaactttgctgarataaactggaaaagttttgaagttgcagtgccagcmttcattacaatcattatgatgcctttatcataytcaattgcaactggtattgcgtgtggatttattttctatccaattacaatgcttatctctaaaaaacataaagaagtacatccgataatgtatgtattaatggtactattcattytgtacttcatatttgttcatggttaa

SEQ ID NO: 68 - DNA, 96 bp, Staphylococcus aureus
ktggctgttagcgtaccaagyatcatrcatattgcaaacgctaaattacaaattattacagttcgcagcttagatcgcgacggacctttaaaaacr

SEQ ID NO: 69 - DNA, 2136 bp, Staphylococcus aureus
atgaaatctttaatattagctgaaaaaccatcagtygcaagagatattgctgatgctttacaaataaatcaraagcgtaatggttactttgaaaataaccaatatattgtcacgtgggcgttaggtcatctagtgacaaatgcgacacctgaacaatacgataaaaatttaaaggaatggcgattagaagaccttccaattatacctaaatatatgaaaactgttgttattggtaaaacaagcaaacaatttaaaacagtaaaagcgttaattttagataataaagtgaaagatattattattgcaacagatgctggacgagaaggtgaactagttgcaagattgattttggataaagttggtaacaaaaagccamtccgtcgattatggattagctcagttactaaaaaagctattcaacaaggttttaaaaatttaaaagacggtcgycaatataacgatttgtattatgcagcgttagcgagaagygargcrgattggattgttgggattaatgcaacgcgtgcactaacaacaaagtatgatgcacagctatccctgggacgtgttcagacaccaacgattcaattagtaaatacacgacaacaagagattaatcagttcaaaccacaacaatactwtacattatcattaacggtaaaagggtttgattttcagctagaatcaaatcagcgatataccaataaagaaactttagaacagatrgttaataatttgaaaaatgtcgatggtaagattaaatctgttgctactaaacataagaagtcgtatccgcaatcactgtacaatttaacagatttacaacaagatatgtatagacgttataaaattggacctaaagaaacattgaatacacttcaaagyttatatgagagacataaagtcgtaacctatccaagaacagattcaaactatttaacaactgatatggtagatactatgaaagaacgtattcaggygacgatggcaacaacatataaagaccaagcrcgcccattaatgtctaaaacattttcatcaaaaatgtcgatatttaataatcaaaaagtatctgatcaccatgcaattattcctacagaagtgagacctgtcatgtcagacttaagtaatagagaattaaagttatacgatatgattgtcgagcgttttttagaagctttaatgyctccgcacgagtatgacgcgataactgtwactttagaggttgcagggcacacatttgttttgaaagagaatgtaacaactgtwttaggytttaaatctattagacaaggtgaatctattacagagatgcaacagcctttttcagaaggcgatgaagtgaagatttcaaaaacaaayattagagaacatgaaacaacacctccagaatattttaatgaaggttcgttattaaaagcgatggagaaccctcagaactttattcaattgaaggataaaaaatatgcgcaaacwttaaaacaaacaggtggtatcggcacagttgcaacaagggccgacattatcgataaattatttaatatgaatgccattgaatcaagagacggtaaaattaaagtracgtcaaaaggtaaacaaatattagaattagcaccagaagaattaacgtcgccacttttaactgcacaatgggaagaaaaattacttttaattgaacgtggtaaatatcaggcgaaaacattyattaatgaaatgaaagattttacgaaagatgttgtaaatgggatwaaaaatagtgatcgtaaatataaacacgataatttaacaaccacwgaatgcccaacgtgtggtaaattcatgattaaagttaaaactaaaaatggtcagatgcttgtgtgccaagatccatcttgtaagacgaaaaagaatgtacagcgcaaaacaaatgcaagatgtccaaactgtaaaaagaaattaacgttgtttggtaaaggraaagaagcggtatatcgttgtgtttgtggacattctgaaacgcaagcacatatggatcagcgtatgaagtctaaatcctctggtaaagtatctcgtaaagaaatgaaaaagtatatgaataaaaatgaaggtttagacaataatccgtttaaagatgcattaaaraacttgaatttatag

SEQ ID NO: 70 - DNA, 93 bp, Staphylococcus aureus
gtgatattaacatgttacaatacatttaacacatcatttgcaatcattgaatttaaatcaaagattagtggaatagatgaagcacgttcgaaa

SEQ ID NO: 71 - DNA, 132 bp, Staphylococcus aureus
gtgataaataaacaaaacggcaattcccattttgttgaaatagaaattaccgtttttatagttcaattcaattgtgataacctttcaatcagttataagaaacgttttgctgcaactgaaataggtggaatt

SEQ ID NO: 72 - DNA, 129 bp, Staphylococcus aureus
atgtatggcgcatacttgatatatgaatatcatcaagattttaaaagtatcgctaattttaaagtcttaaaacgcatgattaatgtcatgatgtgttattgcgttttgtttttagagccacgtatttcc

SEQ ID NO: 73 - DNA, 858 bp, Staphylococcus aureus
ttgaagcgcattaattwtataaargcaacagatagtcaagtcattgctacattagttcttaatgtcacactcccatctttagttattgtgaatttaaacagtgcagaattaaaattgtcattmtccattttaccaattttaatgattatmtatggtattgtggcgaaaatgattgctgtctggttttttagaaaatatgataatcacatgcgtggatcagtaggtatgatgactggtgctatgaatattggattgtttgcatatccactaattgaagtgatatggcctaaaacgggrcttatttattttgktatggctgatataggtggtgcctttgtgatgtttggaattacttactttgtaggtagctactttagtgaaggtagtgatcaattcgattttaaatatttaggtaagaaattattacartcagtgccactcgttacatacattgtaatgtttatattgaatataartcacatccatttaccacatgtggcaatcgatttctttagcatactttcccatgcaaatatgccgttatcaatgattttgctaggtgtyatgttgaattttactctggaaagaaagtatatacctgctactattaaatatttatgtttrcattatggattagcattagttgcgggattgttagtayatgtgttgytaccrgtatcagatgatatgattaagacgacattgttggtcacttggatgttcccggtwggtgtygcaattatttcttatggtattcagtttaaatatcgaacactgccatttataggtatgacgaccaatttracaatcattattagtatcattattttgtacgtgtatcaggcagtgtttgtctag

SEQ ID NO: 74 - DNA, 192 bp, Staphylococcus aureus
ttgagaattgaagatgcatatcgtaaagatgttattatcacgcttttgaataatgaagaatacgaagggkttgtaactgactatgaaaatgaattygagagygaaacaggaaatcttgttgtagatatacagacygattttgctgtttattcgtttgatgaaactgagataaaaagtattagattattaaaa

SEQ ID NO: 75 - DNA, 1110 bp, Staphylococcus aureus
atgagaattttaaatattgtatcgagtaatattgttcaagacccaagggtacttaaacaaatagaaacaattaaagrcgttacgratgattataaaattgttggaatgaataattcacaagctactaatargcgattggaaaatttagattgtaattatcgtttgttaggtagcaaggtagatccmaaaaatattctttctaaattaattaagcgtataagatttgcaacaggtgttatccgagaaattaaagcttwtaaacctgacgtgattcatgcaaatgatttcgacgtattattaatggtctatttaagcaattataaaaaagctaatattgtttatgatgcgcatgaaatatatgcgaaaaatgcctttattaataaagttccacttatttcaaagtttgtagaaagtatagaaaaacacatagtaaaacatcgtgttaatgccttcgtaacagtaagtcatgcagcaaaagaatattatcaatctaaaggatataagaaggaagcgaatgttattacgaatgcacctattttaaatgatagcagagaatttaaagaaatcgaaaactttaaagaaatygtatatcaaggtcaaattgtaatggacagaggatatgaagagtttattattgcttcatcagcttttaaacaaaatgctccttcattcataattcgagggtttggtccgcatgaagaagtgataaaagaactgattagttataacycggaaaatattaggttggataaaccagttgaagtaaragaattggttgataagttagcagaaagtaatgttggtgttrtcttgacgaaaccwgtatctattaattttgaatatacagtatctaataaaatttttgaatgtatacatgctggtttaccagtaattttatckcctgtmaaagagcatatttatctcaatgaaaaatataaatttggcattgttytaaaggaagttacgccgttagaaattgaaaaggcggttagaaaattaagagataatcacgatttgtttaatcatttacgtcaaaatgcaattaaggcgtctaaaattttgaattggcaaatagaragtgaacgrttagtagaattatataaattttaa

SEQ ID NO: 76 - DNA, 3168 bp, Staphylococcus aureus
gtgataaaaaagctattacaattttctttrgggaataagtttgctatctttttaatggttgttttagttgtcttgggcggtgtataygcgagtgctaaattgaaattagaattactaccaaatgtacaaaatccagttatttcagttacaacawcaatgccgggtgcaacgccacaaagtacccaagatgaaataagtagtaaaattgacaatcaagtaagatcrttggcatatgtgaaaaatgttaaaacgcaatccatacaraatgcttcaattgtaacagttgaatatgaaaataatacagatatggataaagcagaagaacagcttaaaaaagaaatcgataaaattaaatttaaagatgaagttggtcaaccagaattaagacgtaattcgatggaygcttttccggttttagcatattcattttcaaataaagagaatgacttgaaaaaagtaacgaaagtactgaatgaacaattaataccaaaattrcaaacggtagatggtgtgcaaaatgcgcaattaaatgggcagacgaaccgtgaaatcacccttaaatttaagcaaaatgaacttgaaaaatatgggttgactgctgatgatgtagaaaactatctaaaaacrgcaacaagaacaacrccacttggattgttccaatttggtgataaagataaatcaattgttgttgatggtcaatatcaatctgttgatgcttttaaaaacataaatattccattaacgttkgcaggaggrcaagggcaatctcaatcccaaagtgayaataaacaaaattcagccatgtcagacgttaatcaggcatcaccrcagcaaaattcaaaarcgtcagcaycaaataatataagtggtatgccgacagcgaaactaggagatttagctgatattacagttggtgatgtgcgtacttctatttctaaaacgaatggmaaggatgcggttaatctacaaataactaaagctcaagatgccaatacagttcaagtagccaaagatgtacarcgtaaaattgatacattcgttgatgaaaataaagattttaatgtcacaaaaacaatggatactgcaaagcctgttgagaaatcactttatacgatggttgaaaaagcatcattaggtacaatcgtggcaattatagttattttgctgtttttaagaaacattcgtacgacggcaatttctattatatcsattccrttatcacttcttatggcgcttattgctctgaaattgagtgatgtttcattgaatatactaacgttaggtgcattaacagtagcgattggacgtgtgatagacgattcgattgtagttgttgaaaatatttatcgacgcttaacagattcagaagaacaaytaaaaggtgaaaatttaattatcagtgcgacaactgaagtatttaaaccaataatgtcatcgacactagttactattatcgtcttcttaccacttgtgtttgtatcaggttcagtaggmgaaatgtttagaccttttgcattggctattgcatttagtttattagcatcgttattagtgtcaattacactcgttccagckttggcagcwacactatttaaaaaaggcgttaaacgtcgtaataaacaacatcaagaaggattaggtgttgttagtacaacttataaaaaagtattrcattggtcaytaaatcataagtggattgtaattatattaagtacwttaattttggttryaactattgtatttggaggaccgagactaggcactagctttatttcagcaggtgacgataaatttttagctattacttatacaccgaagcctggtgaaacggagcaagcagtgttgaatcatgcgaaagatgttgaaaaatatttaaaacagaaaaagcatgtaaaaacaattcaatactcagttggyggtagtagtccagtagatccaacgggtagtacaaatagtatggcaatcatggttgaatatgataatgacacgcctaattttgatgtagaagcggataaggttattaaacatgyagatggctttaaacatcctggagagtggaaaaatcaagatttaggaacaggtgcaggtaataaatctgtagaggttactgtraaaggyccatcwatggatgccataaaatcaactgtaaaagatattgaacagaaaatgaaacaggttaaaggwctagccaatgtcaaatctgatttatcrcaaacatatgaycagtatgaaattaaartygatcaaaataaagcggcagaaaatggtatttctgcaagtcaacttgcaatgcacttgaatgaaaacttaccagaaaaaacagttacgactgttaaagaaaatggtaaaactgttgatgttaaagtcaaacaaaataagcaaacagactggtcagaagataagttgaataatataactttgaaaaagccgactggtggtacgattaaattgggaratrtcgctacgttagttaaaacaacgacaccaagtaaattgacgcaagaacaaggwgattatgcaacgacggtatctgctaaagtaacaaataaagatgtgggtggcacaacacgacaagtgatgtctaaaataaataatttggayaaaccgaataatgtaaaggttaatatcggtggtgcatcagatgatattaacaatgcaatgacacaattagcctttgcaatgttagctgcratcattatcgtatatttaatcctagttattacatttaaaggtggcytagcrccatttacaattytattctctttaccatttacagttatcggtgtaattattgcactattaatcacaggagaaacaatatcagtaccaagtttaattggtatgctaatgttaattggaatygtagtaacaaatgccattgtgttaatagaccgtgtyattaataatgagcarcagggcatggagatgaaagaagcattaatcgaagcaggcggtactagaattagaccgatattaatgacggcrattgcaacaatyggtgcattagttcctttgttatttggtcaagatagctcgattcttatttcgaaaggattagcygctacagttattggtggtttaatttcatcaactttattaacacttgtagttgtaccagtaatatatgaaattctctttactttraaaaaacgattcactaaacgatag

SEQ ID NO: 77 - DNA, 195 bp, Staphylococcus aureus
atgaatttacagtcatacataggcaaattagtcaaattaacgcttactaataataaaatattaattggaaaagtgatagactttgatgataaarttgataattttgatggttataattcgatagaaattgatacaggtagaattacatatgatatatcagaaaataaaattaaaactawwrtwttacaawaatag

SEQ ID NO: 78 - DNA, 765 bp, Staphylococcus aureus
atgatattgaaatttgatcacatcattcattatatagatcagttagatcggtttagttttccaggagatgttataaaattacattcaggtgggtatcatcataaatatggaacattcaataaattaggttatatcaatgaaaattatattgagctactrgatgtagaaaataatgaaaagttgaaaaagatggcaaaaacgatagaaggyggagtcgcttttgctactcaaattgttcaagagaagtatgagcaaggctttaaaaatatttgtttgcrtacaaatratatwgaggcagttaaaaataaactacaaagtgagcrggttgaagtagtaggdccgattcaaatggaaagagatacacataaagatggtaaggtaaagtggcaattgctttatataatgaatcaggatgatgatgaaattaagccaccattttttattcaatgggaagaaagtgattccatgcgtactaaaaaattrcaaaaatattttcaaaaacaattttcaattgaaactgttattgtgaaaagtaaaaaccgatcacaaacagtatcgaattggttgaaatggtttgatatggacattgtagaagagaaygaccattacacagatttgattttaaaaaatgatgatatttattttagaattgaagatggtaaagtttcaaaatatcattcggttatmataaaagacgcacaagcaacttcaccatattcaatttttatcagaggtgctatttatcgctttgaaccattagtataa

SEQ ID NO: 79 - DNA, 1482 bp, Staphylococcus aureus
atgcratwtwcattttcaaaygatttaggaacrytwtttacyattattttagccattggattcatcattaatttagtattrgcttttattatkatctttttagaaagaaatagrcgtacagcgagttcaacttgggcatggctatttgtactttttgtcttaccmttgattggttttattctttacttgttttttggtagaaccgtttcggcacgyaaattgaataaaaacaatggtaasgtgttaacggatttcgatggacttttraaacaacaaatagaaagctttgataaaggtaattatggtactgataacaaacaagttcaaaaacatcatgatttagtamgtatgcttttgatggatcaagatggttttttaactgaaaataataaagttgatcatttcattgayggwaatgatttataygatcaagttttamaagatattaaaaatgcwaaagaatayatccatttagartaytatacwttcgctytagatggyttrggymaaagaattttamawgckttagaagaraaattgaaacaaggtytagaagtraaaatwttatatgatgaygttggwtcwaaraawgttaagatggcwaattttgatcaytttaaatcrttaggtggmgaagttgaagcattttttgcktcwaaaytaccvttattraatttcmgwatgaataayagaaatcatagaaaaatcatyrtwatygatggtcaaytaggttatgtcggaggatttaacattggwgatgaatayctwggwttaggwaaaytaggrtattggagagatacrcatttacgwatwcaaggrgatgcrgttgatgcaytrcarttgcgmtttattttagactggaattcgcaagcrcaycgwccwcartttgaatatgatgttaagtatttccctaaaaagaacggaccattgggyaattcaccaattcaaatagctgcaagtggyccrgctagtgactggcatcaaattgaatayggttatacaaaaatgattatgagygcwaagaartckgtatatttrcaatcrccwtatttcattccggataaytcatatataaatgccattaaaattgcwgctaaatcaggkgtagatgtwcatytaatgattccatgtaagccagatcatccwttagtwtattgggcgacatwttcaaatgcytcwgayttaytatcwagtggygtwaaaatttayacgtatgaaaatggatttatacattctaaaatgtgyttaatwgatgatgaaatsgtwtcagtsggmacwgcwaatatggactttagaagttttgaattraatttygaagtmaatgcytttgtatatgatgaaaakcttgctaargatttaagggtggcttatgaacatgatattacaaaatcaaaacaactwacyraagaatcatatgccaatagaccgctgtctgttaarttyaaagaatcgttagcwaaattagtttcgccaattttataa

SEQ ID NO: 80 - DNA, 351 bp, Staphylococcus aureus
atgagtaataaagttcaacgttttatagaagcagaaagggagttaagtcagttaaagcactggttaaaaacaacacataagatttcaattgaagaatttgtagtmctttttaaagtgtatgaagctgaaaagattagcggtaaagaattgagrgatacattacattttgaaatgctatgggatacaagtaaaatcgatgtgattatccgtaaaatctataaaaaagagcttatttctaaattgcgttctgaaacggatgaaagacaagtattctatttctatagtacttctcaaaagaaattgttagataaaattactaaagaaatagaagtgttaagcgttacaaactaa

SEQ ID NO: 81 - DNA, 909 bp, Staphylococcus aureus
gtgrttmawttgattcaaatatctaatatyaayaartcatttaakaaaagatgtgttytaaaaaayatttcrttygatattgaamaaggtamatgtaycgcwttaatyggaaaaaatggtgctggaaartcaacrttarttgatatwttaakyrrtaawrtwawtgctratkmtggygwgatwttkgataaagacaarttattrcaaagtgaaaatcgcagtataatgttycaraaaacgatgtttccagatcaattraargtwattgrrattatcaamttatatcaatcattttaygaaaatccattamcattggamgwaataatagaactracraartttrattctartcaaytgaaycaatttgyaaataaaytwtctggwggtcaacaacgattactygattttgtawtatctttaatmggacaaccacarytkatyttrttagatgaaccaacrtcramtatggatatwgaaatkagagaatatttttggtcaatwatwkmwaakttaaaagaagawaatcgracgatwctytatacatcgcactatatwgaagaagtmgarcgyatgtcmgacaaaattattytsatwgaaaatggagaaatmawacttaatgattcaacgtcacatattagaaccaatcagcaatctcagattacgttatccgatgaatatawaagaaagttaaaacyagataaagatgatttagttattcaaaaaaatcataatggcactatcaaaattattacttcaaatgtaaatgatacgattttatatcttcaacaacttcatattaatttggatgatattgaaatacaaaaagtctcaattgttgattcatacttcaacaataaaaagcaaaggggatctaattatgatactaagttacttgaaaatcgaatttaa

SEQ ID NO: 82 - DNA, 705 bp, Staphylococcus aureus
atgaaaaggtcagtcgagtctttcagtgagttacatcaagttttaaagaattatagagataatagcttatggttatttagaggtcatagtaatttgaattggagtttagttccgaaagctggtcgagcaccttatgataaatatgatgatgaagaaacattttatgcttggaaacgtcaagcaatgatatttttaaaagagacttatagtgattgggatatgctaactatagcgcaacatcacggattagctactagactattggattggagttttaatcctttagttgctgccttttttgcggtgcaaacatatgaggattgtgatgctgttatttatgcctatttaaaaaaatcggatatgaatatgaaaggggctacgccttttaagagtaaatggataaaaaaagtaaagcctaacggtctagcttcgagagtggttagacaaagtggaatttttactattcatgagcctcctacaaattctatagaagctaatctttcagagaaagaagaactacacaaaatcatcataaagaaacattatcgcaaaaaattaagagaagagttatcttattatggtatcaacgaattatcattatttcctgacttagatggtttatctagccatgttaattggataatggagataaatccatacgcttcaaataatataacgcaagaattaaattcaattaatgaataa

SEQ ID NO: 83 - DNA, 843 bp, Staphylococcus aureus
atgtcagtattagaaactaaattaaaaagtcaaatgtcaaaatctgcaaaaatagctagaaatatgaataagttaccagatgaaattgatagattaagaaaaaggatagaaagaataaataaaaaaagaaaacctacttccagtaatattagagatttggaaaaatctaataagcaattagttacaaagcagcaaaaacttgcagatttacaagttgagtatactaagattgagaaaaaaattaatgaaacaaaaattaatcttcaaaaagagcagtctaggaatcaaaagaaattatccagtatgttagataaaaatacaaaaggaaatgaagagattatggaaaaattattaactaattcagatcaaataaatgagatatcaaatcagataaaaaaagcagtgaatcaaaaagagataattgaatatgatgtctttctatcccattctagtttagataaagaagattatgtatctaagataagtgaaaaactaatagaaaaaggactaaaagtctttgaagatgttaaagtttttgaaatcggaaaaagtcaaacagaaactatgaatatgggtatactaaactctcggtttgttgtagtatttttatcccctaattttattgaaagtggttggagcaggtacgaatttttatcctttctaaacagagaaataaatgaagagcatgttattatattacctatttggcataaagtgagtgttgaagatgtacgtgcatacaacccatatttagtagataagtatgcattgaatacaagtgattttagtatagaagaaatagtagaaaaaatttatcaagtaatcgttaattctaagaattag

SEQ ID NO: 84 - DNA, 309 bp, Staphylococcus aureus
gtgacggaaataaatgagagctcattatccttgaagacagtttatcctgtaggtactgagttatcgattgatgagtacgaaatagttaaaaataaaataatggtgcttgggaaagaaaagtggactaatctattgaacgaaccccattattattacttaattgaagattttatagagacagactacaagaaaacatctaaaggtggattgatgggagttaagtattttaatgtgaatgaaattttgaatagggattgcttaaccaccgaacaaatcgctaaagaattatgtaataaagattgggaatga

SEQ ID NO: 85 - DNA, 159 bp, Staphylococcus aureus
atgtatcttaaaggtgttgaaggagatacaccgaagtatgcagtaccaattcttgaaacagactttagtgatttaccatctacacatacgacagtcggatcacttgatcggtttcgagataagacaatgagcattaacagaagcgggagtaactgttga

SEQ ID NO: 86 - DNA, 654 bp, Staphylococcus aureus
atggaggaatatgaaatgaataaaatagaagtgtataagtttgttaaagtaaagcagttagtatatcaattgattaagttatatcgtacaaacgatatgaattcccataaaacacaaaaagattttttactaaatgaaattaatgatatctttaaagaaaaagatattgatatctcggactttattacatcgattgacgatgtaaaattaactaagaaaaaagcagaacatcttttaaatgaattaaaagtgtacatccaagattttgaaataccttcatcaagtcaactggagaaaatttttcgtaaagtaaaaaaattaaagagaccagatataaatttaattgatacaaaagaaatttcatatttaggatggaatgataattcttctaaccgaaaatatatcgtttataaaaatttagatgataaattcgaaggtatatatggcgaaatttcaccaaataaagtaaaaggattctgtaaaatttgtaatcaggaatctgatacatcactctttctcaataaaactaaacataataagagtagtggaacatatactaaaaaaggagattacatttgttatgacagttttaaatgtaatcagaacctagatgatataaataatctttacgaatttattgttaaaataaaatag

SEQ ID NO: 87 - DNA, 732 bp, Staphylococcus aureus
atgatactaagttacttgaaaatcgaatttaaagttatamtgcgtaaaaaaacaacattaatattatctattttatttcctgtkatwttctatatattatttacttcgatattggawttgccggaagatgttaaacctaaattttataaagagtatatgtatagtatgacggtttatagtttgttaagttttagyttactaacttttccattagatattattaatgaaaaacaaaatgratggcgccaaagattaatggtaacaccatttacttttactagttattatatttcaaaagtagtgaaaactatgctgcaatttgcaatagcgatattagtkatttttatggttggrcatttttataaaggtgttgmaatgagtgcagttcaatggttagagtcaggaatatttttatggttaggtgcgtctctattaataacttttggcatattattttctttgttaaatgatattcaaaaaacaagtgctttagcyaatatcgtaacaattggwttagcagtattaggtggattgtggtttccgataaacacatttccraattggcttcaacatgttgctcatgttttaccgagctatcatttgcgtaaactaggtgtagatattgcttcaaatcatcatatcaatttaatatcatttgytataatactcttgtatgytttagggagtatwwtagcagtatattgtattagtcattttaaaagggcggaataa

SEQ ID NO: 88 - DNA, 1023 bp, Staphylococcus aureus
atggtagaacaaataaaagataaactaggacgtcccatccgtgacttacggttatctgtgacagatcggtgtaactttaggtgtgattattgcatgcctaaagaggtatttggagatgatttcgtatttttacctaaaaatgaactkttaacgtttgatgaaatggctagaatcgctaaggtatatgcagaattaggtgtaaaaaaaatacgcattacaggtggagaaccattgatgcgacgsgatttagatgtacttatwgctaaattaaatcaaatcgatggtattgaagatattggtttgactacaaatggtttgttattaaaaaagcatggacaaragttatatgatgctgggctrcgcagaattaatgtcagtttggatgctattgatgatacgctatttcaatcaatcaataatcgtaatattaaagcgactacgattttagaacaaattgattacgcgacgtctattggtttgaatgtaaaagtaaatgttgttatacaaaaaggtattaacgatgatcaaatyataccaatgcttgaatattttaaagataaacatatagagattcgatttatagaatttatggatgttggtaatgataatggatgggatttcagyaaagttgtaactaaagatgaaatgcttacwatgatagagcagcactttgaaatygatcctgtagaaccaaaatattttggggaagtagcaaaatattatcgmcataaggataatggtgttcaatttggtttgattacaagtgtttcacaatcattttgttctacatgtacacgsgcaaggctgtcatcagatgggaagttttacggatgtttatttgcaactgycgatggatttaacgttaaagcgtttattcgttctggcgtgaccgacgaagaattaaaagaacaatttaaagctttatggcaaataagagatgatcgatattcagatgagagaactgctcaaacagttgccaatcgtcaacgtaaaaagataaacatgaattatattggtggttaa

SEQ ID NO: 89 - DNA, 630 bp, Staphylococcus aureus
atgaatttaagaggtcatgaaaatagacttaaatttcttgagaaatatgatgtgacacctatatcacatttaaaattattagaaggtcaaaagaaagacggtgaaggcggtagactgacagatagctattattgtttttcatacagtttaaaagataattctaaaaaagttttaggtacgtttaattgtggttatcatattgctgaagatttactaaaattatcaaatcaagacaaattacctttatttaacccgtttaaagtaattaataaaggtaatcaattgcaaggcgtaacgaataaaggtaatttagatattaataggcaaagaaaacagtataatgaagtggctttacagctttcaaacgctattaatttaatcataatttgttatgagggtaatattaaagaaccactttcaacgataaaatacgaaaccgataaatattattatagtgaaccatatgatagtaaaattaaagcagtaaatactattataggtaatttgtttgataagaaattagttgagaagatatctgaaattaatgtaaatcaggaaattagaaaatttgatttttcattactcactaataaaattaaaaaatatgagatacaaaataattttgaataa

SEQ ID NO: 90 - DNA, 117 bp, Staphylococcus aureus
ttggataaagtaagtaatcagttaaacaatgaaaacattgaaggtatgaaaaagataattgaaaaagtagcagaagcaaatagagttatcgctaaatcttctttaagaaaaaattga

SEQ ID NO: 91 - DNA, 963 bp, Staphylococcus aureus
gtgtcacctattgatactaaaaggggaataataatgaaaaaatctgttagattatatcatatgattgaatactgtaatgaaaaaaggaatttcaagttaaatgatttaatgtcagaatttaatatttctcgtagtactgctttaagggatataaaggaaattgaagcattaggagtgcctttatatagtagtacagggaaaaatggcggttatatgaccataggtaatcgaaaccaaacgaaaatagcaatcacagacgaagaattgaaagctttagtatttacactttcaagtatctccaatgttagtaagttaccttttcaaacagaatatcaagaaatattaaaaaagttatataataattcgaataaaaaagaattgataaaccagtataatgagatatttcaatattttaatgaagatacatatcagttcaaaagttataagatatttaatgaaatcattagattaacaattggtagtaagtcatttaaaatctgttattcacaaaactatttgaaagaacaatataaaggtattggtatcttatataaaaatcaacaatggtacttcgttgttgttaatatagcatcaaaattagtaaagttgttaaacatttctaaaataaaagaagtatatgaaatgggagaaactaaagaatgtaatgaaataactatgcagaattttcaacagtttatggttgaaaacgaaaatacgattgatatacaaattagaagtaatattattggattaaatatcttgaaaggatacttgtggagtgactatatgattgaaaatattaacgaagagacatatttgtttaaatcaaaagtgaacatgcaagatataaattttatagctaaattaatagtcacatgtggtgccaatgtcaaagtagaatttcctattagtttgaaaaaagctattaaaactgaactaaccaaaataataaacttatactaa

SEQ ID NO: 92 - DNA, 189 bp, Staphylococcus aureus
atgtatgattcggaaactggagatatacaaaaaggatatataaaatttcattctactaaatcaagtttctattatgacttatttgattttaaggtgaaaaaacgtgtggatttcttaaagttctataatgacaatgaacttataagtaccaaaaaattacatatagatatctatttgtttaacaagtaa

SEQ ID NO: 93 - DNA, 1092 bp, Staphylococcus aureus
atgaaatttttaaaagatacttcaattgctgaaatatcgtctatactttatctratttttcctattgccggtatattttttaatgaagtatatggtcccamatggttgtatattatatcagtcattgtcttttcgttrtcgtatcttatattagttatagtaaataatagacttaatacattaatgttttacattttgttgattattcattattttattatttgttattttgttttcagtgtacatccaatgctaagtttgtttttcttttatagtgcttttgccrttccatttacttttaaaaataatgttaaaaaaayggcaactaatcttttcataytaacratgattatatgtwywayaatwacktacttaktryataacractattttgttgcaatgaygrtttattatgtygttatwtygttaatmrtgytwgataatttwaaaaaartgaaaraycgtgaatatmaaaaagaaatagmagaaaaaaatmgryatattaatacrttaatwrctgaacaagagcgwcatagaatwggtcaagayttacatgatacgytwggkcatgtgtttgcaagtttatcattaaaatcagaattagcttataaamtwatwgatdctgatrywgaaaawgyaaaagctgaattrttagcrattaataarttrtckcgkgaatcattgaacaaagtwcgmgaaatyatygatgatrtaarattaccatcatttattgaagarattgakagtatmygtaaarttttaaaagatgctgayattsaktttacrtttgaaaataaagaaytrgcrcaaktattragtcctacwaaacaatcyatkttagtwatgattrckcgtgaagcgataaayaatgtkattaarcatgcaaatgcttcaaaagttcatggtmaattamrarctrtraayrawcataaattacwgytyatkatwsargatratggmraaggtatygayagygrytgtgarrtraaragtatttcacarcgwgtamaacatttaaatggaacwttagmagtygamtcaayaaatggwactaaawtaatcatygaaatsycwacaggrggaatagcatga

SEQ ID NO: 94 - DNA, 600 bp, Staphylococcus aureus
atgaaagcaataattcttgcaggtggtcattcagtrmgatttggtaagcccaaagcttttgcggaagtgaacggtgagaccttttatagtagagtaattaagacattagaatcaacaaatatgttcaatgaaattattattagtacaaatgcgcaattggcaacgcaatttaaatatccaaatgttgttatagatgatgagaatcataatgataaaggtccattagcaggaatttatacaatcatgaagcaacatcctgaagaagaattgttttttgtcgtttctgttgatacaccaatgattactggtaaagctgtaagcacgttgtatcagtttttagtttctcatcttattgaaaatcatttagatgtcgcagcttttaaagaagatggacgttttattccaacaattgcattttatagtccgaatgcattaggcgctataactaaagcactacattctgataattacagttttaaaaatrtatatcatgaattatcaackgattatttggatgtmagggatgtagatgcgccctcatattggtacaaaaatataaattatcagcatgatttggacgctttaattcaaaaattgtaa

SEQ ID NO: 95 - DNA, 603 bp, Staphylococcus aureus
atgacatctttaattattgcagaagatcaaaatatgttacgacaggcaatggttcaattaattaaactacatggtgattttgaaattttagcagatactgataatggtctcgatgcaatgaaacttattgaagaatataatcctaacgttgttattttagatatagaaatgccaggcatgactggacttgaagttttagcggaaattagaaaaaagcatttgaatattaaagtgattattgtaacaacttttaaaagaccgggatactttgaaaaagcagttgtgaatgatgtggatgcatatgttttaaaagaacgttctatagaagaattggtggaaaccattaataaagtaaataacggagagaaagaatatagcgccacattgatgacttcattttttgtagataaaaacccattaacgcccaaagaacaaattgtattaagggaaattggcaatggtttaagtagtaaagaaataagtgaaaaattatttttgacagatggaacagttagaaattatacatctgttataattgataaattatttgcagataatcgttttgatgcttggaaaaaggcaaatgaaaaaggctggatctaa

SEQ ID NO: 96 - DNA, 234 bp, Staphylococcus aureus
atgaaggtactttacttcgcagaaattaaagatatattacaaaaagcacaggaagatattgtgcttgaacaagcattgactgtacaacaatttgaaratttattgtttgaacgttatccgcaaatcaataataaaaagtttcaagttgctgtaaatgaggaatttgtacaaaaatcvgatttcattcaacctaatgatacygttgcattaattccaccggttagtggaggttaa

SEQ ID NO: 97 - DNA, 765 bp, Staphylococcus aureus
gtgaagcgtttaaaaaaaatagttttatgtattagttttctatttttaacaatttttattgggggttgtggcatgggtaaagaagcggaaattaaaaaaagttttgaaaaaacgttgagtatgtatccgattaaaaatctagaagatttatacgataaagaaggatatcgtgatgatcaatttgataaaaaagataaaggcacatggattattaattctgaaatggcgactcaaaataagggagaagctttgaaaattaaaggtatggtcttatacatgaatagaaatacaaaaacaacaaaaggatattattatgtaaatgcaataaagaatgataaagacggaagaccccaagagaatgaaaaaaggtacccagttaaaatgattgataataaagttattccaacaaaagaaattaaagatgaaaacataaaaacagaaatcaaaaactttaagttctttgttcaatatggcaactttaaagatttgaaaaattataaagacggagatatttcatataatccagaagccccgatttattcagcgaaatatcaactaactaatgatgattataatgtaaaacaattacgtgaaagatatgatataccgacgaataaagcgccaaagttattgttaaaagggtcagggaacttaaaaggttcatcagttggatataaaaatatagaatttacttttgtagaggaaaaaggtaaaaatatatactttagtgatagcttagattataaaaaaagtggagaagtataa

SEQ ID NO: 98 - DNA, 1377 bp, Staphylococcus aureus
atggctaaagcagaatatgaaattgatcctggaaaaataacaagtaattcggaagaaactagcgcaatatctaatattagttatgaaatagaaaatgcaaatgataataatttagataatgaaaaaattagagggcaaattactaaattaaaaaagggtgggaattttcctaaaaacttagactacatagatagttatacagaccccagtacggggaccacggcaacggcatttttaaataaagatacaggtaaagttactgttggaatggctggtacaaactttcacggcgatcaacttaaaagagtagcacttagttcgatgtctccgttattattcccaccctctaagcaagatatgaaagatgtacgaggcactatgaaggatggtgtagcggatttagccattggagtaggaatggtcaattataaaggaaaacattttgcaaatacacagcagtttattgagaatttacaaaaaaagtacgaaattgataccgttactggtcattctttaggagggagagatgctatctttcttgggcttcgttataacatcaaaaatgttgtggcatacaatcctgctccgttagaagtaaaaagcattcgtaataaatttggtggtcaattgtttagaaatacgacatttccagatgaaaaatatttaaaagagttaatggataattatgatggagatattactaaggttataactcaaaaggatggattagactatttagtgaagcgtacagatcatttaacttgtggtgatgtgttacgtataaacaatggtcagggccatgcgatggagaattttttaggagaaaaagaacaacgtgaaataatcgaagaactaatgttagtaaaaggatatcgcgatgcaaatgacaaagcatttaaggctttgaaaaaaaatactgagaaaaaactcggtaaaatagatgaaatcaaatcgaagttactgcaaacgaacggtggcgccctctcgtcttctcaacaaaaattgcttgaaactttagtggcattttcggtagctgaaggactaagtaaaatggttgaccaagaacttcagcagttgaaaaatatgttcaatcttatggatgagaaatttgaagcaaattggaaagacgcacaagaagctagtgatattgtaggtaaacatctttcatacccagaaaaggtaagtgcattagataacggtggtgtcaatgaaagtaaacttgctaccgaaccacataatgaaataaaagacaaactaaataaaattacggacttatctaagaaatataattcgtatttacagcaaatcgaaaaaagtattaatgaaatagttgctaaggatcaacaattggcagggcaaataggtgatttaatatga

SEQ ID NO: 99 - DNA, 330 bp, Staphylococcus aureus
atgatgtttgaagaatacaagaaaatagatgatcttgaaaatgcatatgaaatagagttgaaacgtattgaaagggagatacaaaatcttagtgatttaaaatatcaccttagaagagaaaatgaacaaagttatgatgcatttttgtatttaaagaataaaatgaactatagtgaagagtcaaatgctaaggtgagacgactagttgaagaatttgattatgaagcagatacttatattagacaaaaagagttaaagttagaagattataaagaagaaataagaagagaatatatacagcaatctgaaaaaataatggaggcgaagtag

SEQ ID NO: 100 - DNA, 312 bp, Staphylococcus aureus
atgggaatccctgatccgttatctaatcctatgtctgaccctttactaggagatagttggatggtaggtgatttgaaaaaaagacaggaaaaaaaactaatcacaacagtcatcgcacctgaacatgatgaaaagcatcgtgaaaataaaagtaaaatgaaaaaatctgaaaagcaattgatcaatcagttaattaatcatggccatacatttaagagtgattttaaaaatgtagctaaaggtgattgggttaataaagccatgcaagacttagataaattaggcaatgagcttaaaaaaataatgaattag

SEQ ID NO: 101 - DNA, 447 bp, Staphylococcus aureus
atgaaacaatttgaaatcgtgayagaaccgatacaaacagaacaatatcgtgaattcactataaatgaatatcaaggtgcagtagttgtttttaccggtcatgttcgcgaatggactaaaggcgtcaaaacggaatatttagaatatgaagcgtatattccaatggctgaaaagaaattggcacaaattggagatgaaataaatgaaaaatggcctggaacgataacgagtattgttcatagaatagggccattacaaatttcagatatcgctgtattaattgcrgtttcttcaccgcatcgtaaagatgcctatcgagcaaatgaatatgcaattgagcgtatmaaagaaattgttccgatttggaaaaaagaaatttgggaagatggttcaaaatggcaaggrcatcaaaaagggaattatgaagaagcraagagggaggaataa

SEQ ID NO: 102 - DNA, 534 bp, Staphylococcus aureus
atgaagtcaaataaatcgcttgctatgattgtggtagccatcattattgtaggtgtattagcatttcaatttatgaatcatamgggtcctttyaaaaagggracraatcatgaaactgtacaagatttaaatggtaaagataaagtacatgttcaaagagttgtggatggtgatacatttattgcaaatcaaaatggtaaagaaattaaagttaggcttataggggttgatacgccagaaacggtgaaaccgaatacgcctgtacaaccatttggcaaagaagcatcaaattatagtaagaagacattaacaaatcaagatgtttatttagaatatgataaagaaaaacaagatcgctatggtagaacattggcgtatgtatggataagtaaagatcgtatgtacaataaggaattagtggaaaagggacttgctagagaraagtatttttcaccaaatggcaaatatagaaatgtatttatagaagcacaaaataaagctaaacaacagaaattaaatatttggagtaaataa

SEQ ID NO: 103 - DNA, 486 bp, Staphylococcus aureus
atgattttacaaattgtaggttacaaaaagtctggtaagacaacattgatgaggcatattgtctctttcttaaagwcacatggttatacagttgctactattaaacatcatgggcatgstaaggaagatattcaattacaggattcagacgtcgatcacatgaagcattttgaagcgggggcagatcaaagtattgtacaaggwtttcaatatcagcaaactgtaacacgtgtagataatcaaaatcttactcaaattattgaraaatctgttacaattgacaccaatatcgtattagttgaaggctttaaaaatgctgattttgaaaaagtcgtagtctatcgaratgaagaagagttgcaagtattacaacaattgwcgaatgtttgttatagcattaatgtaagggagcatgaagattttacagcatttgagcaatggttattaaataaaattaaaaatgattgtgatacacaattaacatag

SEQ ID NO: 104 - DNA, 3039 bp, Staphylococcus aureus
gtgatatcagtgataaaaaataaagaaattaattttgaacaagatatagaagcgagtctagttcagtacgggggatgggagtcagtaagatttcaagatactcattacgatgcaaatatcgcactcgatccaacagtattattagaatttgtaaaacaaactcaaccaaaaaattggaagcgatacgtatcaatctatcgtacaaatgcagaacagaagtttttaaaacgactaaatgaagaaatcacaaatcacggcatcttacatgtccttcgtaaaggtatcagagatcgaggagtctcttttaaagttgtttactttcaacctgcatcatctttaaatacagaaaatataaaaaattatgaagctaatcgttttcaatgtgtgcgacaatttcaatatagtaataagtatagaaacactattgatatggtgttaatgattaatgggattcctcttgttgcattagaacttaaaaatcaatatacaggccaaaatgtggaacatgcgagattacaatttgaacaagatagagatccaaaggaattaatttttcaatttaactctcgattcttagtctattttgcagtagatcattttaatgtgttaatgacaacaaaactcgcaaaagggaacacttactttctgccattcgatcaaggatctaatggtcctggtcgtgttggaggtgcaggaaatccatctaatccatctggataccctacttcttatttatgggagaatgtactcacaagctatcaattattggatatttttgaaaggtttatgaatttagaagaaaagaaaaaactactaatttttccacgttatcaccaactggatgttgtgaaaaaattaatatcagatactcagcaccatggtcctggaaagaattatctcattcaacattctgctggttcgggtaagtctaatagtattgcttggttggcataccatctcgcttccttgcatagtaatgaggatcaaccaatctattcatcggtcattgttgttacagaccgtactgttttagatcgccaacttcaaaatacattaatgagtttcgagcatactgttgggcaagtcgaaactattggagataataaaacttctcaagatttaaaaacagctataaatgaccaaaagaaaattattattactacattacagaagttcccagtaatttatgatgaaatagataatacagcaggtagaagttttgcgattttggtcgatgaagcgcattcttctcaaacaggaagcagtgcacaaaaattaaaacatgcgttagcagacaaagaagcttctttaaaggaataccaagaatttgaagaaagcgttgaagatcaatcgctagatgaccaagatcaaattgttcaaacattactgtcccaaggtcaacacgacaacttaagtttttttgcttttacagctacaccgaaagagaaaacgattgaaatgtttggaacaaaacaagcagatgggtcctatcatccatttcatatttatagtatgagacaagccattgaagaaggatttattctaaacgttttacaaaattatatgacatacaacacttcctataaaattgcgaaatcgattgaagaagacccagaattgccaaaaacagaagcagttcgagctatcgctaaatatcaatctcttcatccttgggtacttagacaaaaagccgagattatgattgaacaatttagatcagtgacacaaaaagcagtccaaggtagaggaaaggcaatgattgtgacagcttcacgactccacgccgtacggtatatgcaagagttcaaaaagtacatcaaagaaaaaggatacacggatatggatgtgttagtcgctttttcaggtactgtagaagatgatggaattgaatatacagagccgaagatgaacttaacacattctggagaacgcatccaagaaaatcaactgaaagaagcatttcatagtgaagactttaatttattaattgtcgcagaaaaataccaaacgggatttgacgaacctttacttcatacaatgtttgtcgataagagattacgcggagtaaaggcagtccaaacattgtctcgcctcaatcgtactatgcctggaaaaacagatacttttattcttgattttgtaaatacagcagaagaaatatatgaagcattccaacctttttacgaagcaacttctctaaaagaagaaattaatattaatttaatttatgatacacagagtaaactacgtaaattccatatatacaatgatgatgatattcaaacagtaatgaaattaaatcgtcaagcaaaacaaaagcaaaatgatcaattacttggtcgattgagtagcgtgttacgccccgttattagtagatacagtgacctaccagaagatgttcaatacgatttcagagttacactaaggaacttcaacaaatggtataactatatcgctcaaattgatcgtacttttgataaagagttactagaagaaagtattttcactggtttcttgttaaaatttattcctgaaaaacaacgcaactatatcgatattgaagacaaagtaaagttagaatactataaattgcaggaagatttcaaaggagatatagcactcgtcaatgaagatgtagaaaatgggcaattggctcatccttcagaagtgaatgcaactgttagacctgaagaagaatacgattctttaaatgaaattatacacaaaatcaatgaacgttttccaaatgattttactcaaggcgatagagtactcgttaaaaacatgcgagaaacattgataaccaatccagatgcgaaacttgtaaatatggctcaaaacaccagcgaaaaaatgttggcgaatagtttattccaccaccaattccaagacttcttgattgatcaatataatcaaggagaagctgcatactctaaaatgtttagcaataatagagacttttatgacactgtctatcaactactagcaaaagattattatagatggctacgatcacaaaaagcagataattttgcttaa

SEQ ID NO: 105 - DNA, 1449 bp, Staphylococcus aureus
atgaaattccatttactagattgttttacaaatatacaccaccagaaccatctgaagttatttcagaacgtattaaacaactcgaagagtctattattaaaaacttccaagcattatctggaaaggaagtggatacaaatgagtagagaaatgaaatacagcggaattgagtggattggatatataccaaagtattggactattactaagcttaaaaatattattgactttataagtggttatgcctttaaaagtgaacttttcacgatttcagataataataaaaaagtaataacaattaagtcatttaataccaaggagattattctcgataacctttcttactcaaacgaatctctcaaatttccaactaaatatttattaaaaaataatgatattctttttgctatgagtgggggaacaactggaaaaaatttattgatagaacaagtagacgatttatattatataaatcaaagagtgggaatcataaggtcttcttttagtaagtttatttattattatataaatactggtttatttagcgaatatattaacttattctcatcaggatcagctcaacctaacatatctgctacagatatacaaaattttatcattgcgttacctgagaaagaaactattaaaaaaattgaaatatacattaattaccaattaaaaattatctcaaatatcatagacacaacatatcaatctatcgaagaacttaaaaaatacaaacaatcactcatcacagaagcggtgacaaaaggcatagacccgaatgtggaaatgaaagaaagtggtaatgattggattggtagtatcccttcaaattggagtgttcgaaaaattaaacatgatttcaatttaaaagggcgtattggatggcaaggtttaacttctaacgaatatcagactgtaggaccctatctcataacgggaactgatttcaaaaaaggcataatcaggtgggattcttgcgttagaattagtgaagaacgttttgaagaagctccagatattcatattaaagaaaatgatttattaatcactaaagacggcacgattggaaaagtcgctttagcaacaaatgttccaaaaaaagtttcattaaattcaggtgtactactgattagggaaaaattaaaaaatactattaataaaaaatttatgtattataatttgttatcaaatatgttttggaattggtacaattctaataatcaaggtgctagcaccattaaacatctatatcaaggtcaattctataattattcttatgcgatccctctattgcatgaacaacaacaaatcgtccaatatctagatgataaagtttctactatcgataggctcattgaagataaaacaaaagttattaaagagttagagaattataagaaatcattaatttatgagtatgtcacaggtaaaaaagaagtgtaa

SEQ ID NO: 106 - DNA, 1788 bp, Staphylococcus aureus
atgagcgaatttaaaagacatcaacaaacatcaattaatgttcaaaaacaagcaaaccttatttggaatgttgcagacattttaaggggtttatacaaacctcatgaatatggaaaggttatcttaccaatgactgtcattaaacgtcttcacgatacattactaaaaacgcgagacaaagttcttaagactgcagaaaatacccaatcaataaatgacgtaatgcgagaacgccttttgaagaacgcttcagggtattcattttataatacaagcttatatacttttgaaacattactcgcagacccagcaaatattgaatcaaactttagagcttatctcaatggtttctctgaaaacatgcaagatattctcaataactttaagttcgacgttgaaattacgacaatggcagataatgacgtgctattttatgtgattcaagaatttaacaaagcagatgcatatctaggtccagacaaaatgacaagcacagatatgggatacgtgttcgaggaacttgtacgaaaattttcggaaagctataacgaggaagcaggtgcacacttcacgagtcgagatatcatttatctcatgactgatttattgcttatcgaagataaagatactttgtttaaagaacatgttttcaaaactgtctacgaccaaacaatgggaacttcccaaatgctctcagcaatgacagaacgtattcacgatatgaatgatactgccgaagtagctacctttggtcaagagctaaatcctgaaacttatgcgatttcgaaagcagatacaatgattcgtgggggagatcctgaaaacatggcgcttggaagtacattaacgagcgaccggtttgaaggatttacatttgattactgtatctccaacccaccatttggtgtcgattggaaaaaggaccaaaaagcagtaaaagcagaacatgaacttggtgaactcggtcgctttggtgttggattgcctcgagttagtgatggacagttgttatttcaactcaatggtatttcaaaattaaaggaaacaggacgcatggcaattattcacaacggttctgccttattctctggaaacccaggtgctggcgagagtttaattcgtcagtacgtaattgagaatgattggttagagggcataatccaacttcctaacgacttattctacaatacaggaatttcaacgtatatttggattattactaaagataaatctccagaacgtcaagggaaagtacaactcgttgatgcgtccaatatgtatgaaaaacgtcgtaagaatattggtgaaaaacgcgtagatatttctgaagcatgtcgagaaatgattgtgcaagcttatggagaatttaatgataaagaatactatctaggagatggaactgtagagtcaaaaatacttaagaatgaatcatttggttttactcgagtgactattgaacgaccgcaacgagacgaaaacggagatatcgtttataaaaagaatggaagcaagagtgtagacacgaaccttagagatacagaagatattcccttaacagaagatattaatgaatattttgaacgtgaaatattaccatttaatcaagatgcatggatggatcgtaaaaaagataagatagggtatgaaattccatttactagattgttttacaaatatacaccaccagaaccatctgaagttatttcagaacgtattaaacaactcgaagagtctattattaaaaacttccaagcattatctggaaaggaagtggatacaaatgagtag

SEQ ID NO: 107 - DNA, 1167 bp, Staphylococcus aureus
atgaaattttttgtactttgtgcaattatcagcatgaacatatttatagtaatctctacatttactaaagaagtattagggttccctatagagccggtgtattactcaaccatggttggtatagcattaattacyacggtgtttgctatttataagataattgtcacscaagaaattccgcgagggttaatattattaattgctatatgtttgctttatctagctttttattatttttcaccagataaggaagagaaactagctaaaaataatattctattctttttaacatgggcagttccagcggcaattagtggtatttatattaaatatataaacaaggctacggtagaaagattttttaaattagtatttttcatattttctrtttcatttatttttgtaattttaataccaaaacttacaggtgagatacctagctatatcaattttggacttatgaactatcaaaacgcttcgtacctttcagcatttactgccggattaggcatttatttcattatgaaaggttcagtkaaacataagtggatatatgttctatttacaataattgatatccctattgtgtttataccaggagggcgtggaggtgctattttattaattctttacggcttatttgcatttatacttattacgtttaaaagaggaatacctatygcagtaaaaagcattatgtatatttttgcattaagcatatctagtgtattgatttactttctttttacaaaaggttcgaatactagaacattttcatatctacaaggtggaacacttaatttagaaggtacttctggaagaggaccgatttatgaaaaaggtatttactttattcaacaaagtycgttattaggctatgggccatttaactattataaactaatcggaaatataccacataacatcattattgagttgattctatcatttggcttattagggttttttatcataatgatttgcattttgctactagtttataaaatgattaggaactatgatccaaacactatagatttactcgttatgtttatagcaatctatccaatcacattattaatgtttagttcaaattatttagttgtaagtgaattttggtttgtgttgttctattttattacaaaaggacggcgtcatcatggytaa

SEQ ID NO: 108 - DNA, 252 bp, Staphylococcus aureus
atgaaaaactactatcaccttttgtctttcgatgacgatttagctaatgatgcagccaacgatctgttaaaagaaggttgggatatcgttcatgttggtacaaaattagttaaaattttggataatggacaagcgtactacaatactgaatacgttctgggcggaactaaaaatcagtatgaaaaatatttagaagattgccagcagtccgagttagattattttcaacttatgtttttctgcggttattag

SEQ ID NO: 109 - DNA, 585 bp, Staphylococcus aureus
gtgaatgaaatgaatgctaaagaacaattagtggacaatttaatgaaaacatcatcgcaattatttaaatttcacggtgaagttgccatgcagcttttcttaaatgatgaattaaaattaccttctattgttgaaatatgcgtggaacgtaagcgtttaagtgatattgtgaaagttattccgcaatcatatgcgttactatacatagataagcaagatcaagcaatagctaaagaagatttatcactttcaaaaattgcaaaagtttatgtgcaatatgatratacaacaataatgagtattttcgtttatgatgtwgtaaacgatgaatggatttttagattggatccgaatatacgtatacctaagagtaacatwtacttccatagtytaaattgggatgtggattatattaaaccrgagatygttctaatgtatgatctaatgcaacaccatcagtatcatcaytattccaattataaacgmgtcatagatgcattaagctactatcaattttttattttaaaatttgtagtaggtgagcaacgtattaaggatgcaatccagagaacaataaataattaa

SEQ ID NO: 110 - DNA, 1260 bp, Staphylococcus aureus
atggtagtagaaaaaagaaacccaatcccagttaaagaagcaattcaacgtatcgttaatcagcagagtwcaatgccggcaattacggtagcacttgaaaaaagtctaaatcatatyttagcagaagatattgtagctacttatgatataccaagrtttgataaatcaccttatgatggttttgcaattcgcagtgttgattcacaaggggcaagtggtcagaatcgmattgagtttaaagtgattgatcatattggtgcaggttcagtttctgataaattagttggggatcacgaagcggtgcgtattatgactggagcacaaataccwaatggcgcagatgctgttgttatgtttgaacaaacgattgaactagaagatacatttacaattcgtaaaccattttcaaaaaatgaaaatatatctttaaaaggtgaagaaacaamgacaggcgatgttgttctaaaaaaaggacaagtaattaayccaggggctatygcggtccttgcaacatatggctatgcagaggttaaagttattaagcaaccgagygtcgctgttattgcaacaggaagcgaattattagatgttaatgatgtattagaagatggraaaattcgtaactctaatggyccaatgattcgtgccttagcagaaaaattaggtcttgaagttggtatttacaaaacacaamaagatgatttagatagtggyatmcaagtcgttaaagaagctatggaaaaacaygatatcgttattacaacgggyggagtttctgttggagaytttgactatttacctgagatttataaggctgtaaaggcggaagtgttatttaataaagtagcaatgcgtcctggtagcgtwacaacggttgcatttgyagatggaaagtatttgtttggattatctggaaatccatcagcttgttttacaggatttgaactatttgtgaaaccagctgttaaacatatgtgtggcgcactagaagtcttcccgcaaataattaaagcaacattaatggaagattttaccaaggcaaacccattcacacgatttatacgtgctaaagcaacgttaacaagtgctggagctactgtagtaccttcaggattcaataaatcaggtgcrgttgtagcgattgcacatgctaactgtatggtcatgttaccaggagggtcacgtggttttaaagcgggkcatacagtagatattatattgactgaatctgacgctgctgaagaggaacttcttttatga

SEQ ID NO: 111 - DNA, 1770 bp, Staphylococcus aureus
atgagtcattacatcatttttgaagcaggtccataccaattagatgcaaaggcgtggcgtaaaacttttccacctaaaaaagatggagataaggaaaaagtagtgcctatatctagttgtatcgttgttgaagctaaattttggcatgcctcagaaaatacagaaaaaataattatttctaacggtaaggataaagaacatacatttgaatctgatattttaacaactcgaaacttaccttccttgattaaatatggtcacagtatcaatgaaagttatataagagatttgagctatgcactacagttaatgcgcgatgaactgcccacttctgatttatatgatggctcgggcatcatagaaacaccccacggttacattgtaatggtagataccgtttacacatctaaacaatatgatcagttagcatctttagagcctattgtcgatagtgcttatctattagagcctaaagggacatttaaagattggttaaatatgtatatgaacgaagtcaaaggtcatcttcttctagagttagcggtcatatttggaatttctgccttagtgacagcctttctgaagcataaacatgaggttgaatttgctggtatcatctttagttttacaggccagtcatcaaccggtaaatcaacagcggcagctttagcggtatccgtcgctggaaatccaaccaaaggtaataaaacgctttttcgaagttggaatggcacacgtaacgctcttgaaggttacttgagtaacaattatggcatacctatggtatttgacgagctctcctcagcaacttttaaagatacaacagggttattgtactccatcgctgaaggtcaagggcgtcaacgttcaaacgttcatggagaagttaaaacacctaagaattggggaacttctgtcatttcaacgtcagaatacagtatttttactgattcagctcaaaacgatgggttacgtgtaagaaccattgaaattaatgagcaatttactacaaatgcgaccaatgctgacaatattaaaaaagctgtggcgctaaactatggtcatgttttaccgttagtagctcaataccttataaatcgtgaagaggaagttattcaatggtttaaagatgaacatcattggtttaaagctaaattgaagagtgaagcaaacaatacaggtattcgtatgtttaagcgttatgcagtcattacaacatctgcgcaaatattaggtcgtgttttagctacaaatattgatatcgctaaaataagagactactttattgattatcatactcatacagtctctgaacgatcactggcagataaagcgattgaagtcattacacaatttgtagcacaaaaccgtggtaagttttctgatgacacagcgttaaagaatatgattgagaattatggactaattgccttaaaagatgattatatcgaggtcaaaatcattgcgactgtatttaaagatatgctgaaagaacaacactttcaggatgtcaacaatgtcgtgaatgcactaagagataaaggatttatcgaatctgaccgtgatcgaatcacgacaaaaagaacagtaaaagatgactatggcaagaaacagtcacttgttttttaccatttaaagttagattcagaatatgcgtctatttttggtctaactaaagatgctgaacctattaaagctaaaattaacttggataacaaaaagatgcttgaatcatggaaaaaacagaatgatgatttaattgatttttaa

SEQ ID NO: 112 - DNA, 1533 bp, Staphylococcus aureus
ttgaaagtgagtaatactatgattaaaaataaatggaaaatagaaatgtggtttcggaattttagttattttatacataaaattgattcagaatttatattagaagaatacttagaggattatttacctaaagaataccgaccaaattttatatgtggaaaagcccaacctagcgaaactatatatgtaagttattttataaatcaggatgaacaaactgtggagcaacatactgtggaatgtgacaaaactggtttttttatagatgaaatccctaaacattttataaaaaataaaatgcattattttattgatagtcaaagtaaaattgatattaaagacttattaaatgagtttattgatcaaggtacagccattttgaatatattagatttaaatgacctagaaacatattttaatgattacttagaaacaatcaaccatacaacagaattcgctaaaaaaatagctaacaaagctatgaaagaaattcgaaaaaatattgagttagagcaaattaaacagcaagtaagttatatgaaaaatgcagatcaagtctcttctttagaaagctttaaggatttaaagcatacgatattaaaacaacaccgagatttatcgttaaaaaatgttgatgatattataataagcgactttttaacaagatacctcatttataaagaaaaacaagattcgtatgtaaaaaaagatatctcaagtataaataaatctcagtattttaaaaagttagtaatcgaaggtttaattagagaaagaaagagtaactctcaatactttgaaatagctaatagtatcaaaccttcatctcacaataataatagcttaaatcaatctgatgaaatagatcaatttagacaggctgtaattggtatttctcttaatctatacgatcataatgatacttacttcaaatttatccgtagtattatgaaaaaaagttcacgtaaagttaatttaacaatagacgatattattaaatctaaaaataatatagataaatttatgaagaaaaataagttaattagtaataatgagttattttatttaacaacaattgaggatacatttcattttacattattcactgctataactgatttaattgataaagtagtcaatgtttcaagtcgtattatcgaagaagcatctcaatacgatatattaattgccttacacagtttgaatagtttaaaaaatgagttgaatacaataatagataaacacgaagaaaatttaattcgtttcgaaagtcttattaatggttatgtaagaaatactcaattaaaaatattagttcgcaatacaattgaacagcacccagaactaacaatgaaaatagaagattcattaatttcaaaccttaatgattataatattagtgaaatatatagtagggagacttttaataacgattacaatggtattcttgataaattaatgattcaggtaattaatgatttttataaattacgcttaaaaaaattgaatagtgcatctaaattatattattaa

SEQ ID NO: 113 - DNA, 429 bp, Staphylococcus aureus
atgaattttcaagtaagtccctattttttaattatagaaaatgcagatggtttgaaaaggttgtatgaagagctgtttggcgctaaaacactgtatatccaacgtatcaaggatagaccgacagataagcaacttaatatcgataaaaaagatttaaataaaattgatcaatgtgtacttcaatttggagatataaaaattatgattgcggatgataccgaaggtttacctataacccaaggtaataatatatcgctttgtattacttttgaccatgtagaagaaactaagcgtgtgtatgaccagttaatagaaaaaggcagtgaagtattaaaagcattcagcccagagttctatactgaaggttatggttatgtaagagatccttatggtatatctttacatttatttacgaaaaggaaaggttaa

SEQ ID NO: 114 - DNA, 507 bp, Staphylococcus aureus
atgggcgaacatcaaaacgttaaattgaatcgtacagttaaagcagccgtactaacggtatcagatactagaractttgwtacagataaaggtggtcaatgcgtgckccaactrttacaagyagatraygttgaagtkagygaygcacattatacmattgtraaagaygaaaaagtagcyatyacgacgcaggtgaagaagtggttagaagaagatrttgatgtcatcattacgactggtggaacrggtattgcacaacgtgatgtracrattgaagcagtaaaaccrcttttaactaaagagatagaaggctttggrgaattrtttagatatttgagttatgttgaagatgttggcacgcgtgcattattrtctcgygcwgtrgcaggtacagtwaatrataaattgatattttcrattccaggatcaacaggygcagttaaattagcattagaaaagctcattaaaccagaattaaatcatctgattcatgagcttacaaaataa

SEQ ID NO: 115 - DNA, 1281 bp, Staphylococcus aureus
atgaaaaaattaaatatagcattattaggattaggtactgtcggatctggtgttgttaaaatcatcgaagagaaccgacagcaaattcaagatacattaaataaagatattgtcataaagcatattcttgttcgagataaatctaaaaagagaccgctaaatattagycaatatcatttaactgaagatgttaatgaaattttaaatgatgattcattagatattatcgttgaagtcatgggaggaattgaaccaactgtagattggttaagaacagcacttaaaaataaaaaacatgttattaccgcaaataaagatttattagcagtacatcttaaacttttagaagatttagcagaagaaaatggtgtagctttaaagtttgaagcgagtgtagcaggtggtattccgatcgtaaatgccataaataatggtttgaatgcgaataatatttcaaaatttatgggaattttaaatggtacctctaattttattttatcwaaaatgactaaagagcaaacgacatttgaggaagcacttgatgaagcgaaaagrcttggttttgctgaagcggatccaactgatgatgtagaaggggtagatgcagcgcgtaaagttgtcattacatcatatttatcatttaaccaagtcattaaattaaacgacgttaaacgaagaggaattagtggygtaactttaactgatattaatgtagccgatcaactggggtataaaattaaattgattggtaagggaatatatgaaaatggcaaagttaatgcatcrgtagaaccaacgttaattgataaaaagcatcaattagcagctgtagaggatgaatataacgcgatttatgtyattggtgatgccgttggtgacacgatgttttatggaaaaggagcaggcagtttagcaacaggtagtgccgttgtmagtgatttattgaatgtagcattattctttgaatcagatttacacacattgccaccacattttgaawtaaagacagataaaacamgggaaatgatggattcwgatgcagaaattaatattaaagaaaaatccaatttctttgtagtagtgaatcatgtcaaaggttcaattgaaaattttgaaaatgagttaaaggcaatattaccatttcaccgatcattaagagttgcaaattacgataatcaakcatatgccgctgttatagttggattggaatcatcaccggaagaattaatcactaagcatggatacgaagttgacaaagtatacccagtagaaggagtttaa

SEQ ID NO: 116 - DNA, 1005 bp, Staphylococcus aureus
gtgagtcaagaacgttattcaaggcaaattttatttaaacaaataggtgaaataggtcaaarcaaaataaatcaaaaatgygcgttgattattggtatgggcgcattrggtacacatgtggcygaaggwcttgtkagagcaggcattgcyaaactaatcattgttgayagagattatattgaatttagtaatttacaaagacaaacattrtttactgaagaagatgctttgaaaatgatgcctaargtggttgcagctaaaaagcatttgctagcgttacgtagtgatgttgatattgatgrttrtattgmccatgtggattattattttttggaracacatggacaggacgttgacgttatyattgatgcaaccgataactttgaaacacgacaactgattratgattttgcatataaayatcgtataccttggatttatggwggtgttgtacagagtacatatacagaagctgcatttatacctggtaaaacaccttgctttaactgtttggtaccacaattgccagcattaaatttaacatgtgatacrgtaggggtcattcaacctgccgtgacgatggcaacaagtttacaattaagagatgcgatgaaagtattaacggaacaaccaattgacacaaaaataacttatggcgatatttgggawggtagtcattattcatttggtttcagtaaaatgcaacgtwcagmctgtacaacttgtggagatgtaccaagttatccgtatttaaacaagaatgaacaacgttatgcaacattgtgtggkagagacactgtacagtatgaaaatrcatcaattacacacgayattcttgttcaatttttaaaacarcatcarytaaattatcgcagtaattcrtatatggttatgtttgaatttaaaggrcaccgcattgttgcttttaaaggtggaaggtttttaatacatggcatgacacgcacatcagatgccacacatctaatgaatttattgtttggataa

SEQ ID NO: 117 - DNA, 1062 bp, Staphylococcus aureus
atgagaagatggcaaggattagtagaagagtttaaagcacatttaccagtaaatgaaaatacaccaaaattaacwttgaaygagggaaatacaccactcattcattgtgaaaatatgtctraaatactaggyatagatttatatgtgaagtatgaaggtgccaatccgacaggttcatttaaagatcgcggtatggtaatggctgtgacaaaagcaaaagagcaaggtaagaaaattgtaatatgcgcttcgactggaaatacatcagcgtctgcagcagcatatgcagcgagagcaggtttaaaagctatcgtcgtaataccagaaggtaaaattgcattaggtaaattgtcgcaagcagtaatgtatggtgcagaaatcgtttctattgaaggaaactttgatgaagctttagaaattgtaaaagaaattgcaaaaagtggcgaaatmgagcttgtaaactctgtcaatccayttagaatcgaaggrcaaaagacaggctcatttgaaattgtacaacaattagacggtgaagcacctgatattttagcgattcctgtaggtaatgcaggtaatattactgcatattggaaaggctttaaagaatatcatgaagctaaaggwtcacaattgccgaaaatgtttggcttccaagctgaaggygcatcaccaattgttcaaaataaagtcattaaaaatcctgaaacgattgcaactgctattcgaattggtaatcctgctagttgggataargcgactaatgctcttaaagaatcaaatggattaatagatagtgttactgatgatgaaattytagaagcatatcagttaatgacaactaaagaaggtgtctttagtgaaccagcragtaatgcttctattgcaggtttaattaaattgcayagacaaggtaaattacctcaaggtaaaaaagtagttgckattttaactggtaatggrttaaaagatccwgatactgctatttcactaytagataatccgataaagccattgcmaaatgataaagatagcattatcgattatattaaaggagctttataa

SEQ ID NO: 118 - DNA, 606 bp, Staphylococcus aureus
atgcttaaaatcaatktraaatatcaattaaagaayactttaattcgcatcaatatagatgatactgaaccaaaaatttatgcagttcgtggtccatctggcattggtaaaactactgttttaaatatgattgccggattacgtaaagcagatgaagctattatcgaagtgaatgggcaattrcttactgatacgrcaaaaaacgtgaatgttaaaattcaacaacgacgtattggatatytrtttcaagactaccaaytgtttcctaatatgacggtytataaaaatattacttttatggctgaaccatctraacacatcgatcaattaatycaaactttaaayattratcatttgatgaaacaatatcctatgacattgtcaggtggagaggcacaacgtgtagcacttgcacgtgcacttagcacgaaaccagatttaattttattagatgaacctttttctagtttggatgatactacaaaagatgagagtattacattagttaaacgtattttcaacgaatggcaaataccaatcatatttgtgacacattcaaactatgaagcagaacaaatggctcatgaaattattacaattggktaa

SEQ ID NO: 119 - DNA, 915 bp, Staphylococcus aureus
atgtcgaatgttttggagttaacaattcctgcatcaacagccaaccttggagttggctttgattctataggtatggctttagataaatttttgcatctgtctgtaaargaaacatcagggacaaaatgggaatatattttccatgatgatgcatckaagcaattrcctactgacgaaacaaactttatttatcatgtrgcacaacaagttgctkctaaatatagtgttgacttgcctawtttatgtatcgaaatgagaagtgatattccattggcaagagggttaggttcgtcagcttctgctttagtaggagctatatatatcgcaaattattttggtgatatccaactrtctaaacaygaggtattacaattagcgactgaaatcgaaggacatcctgataatgttgcgccgaccatttatggtggtttaatcgctggatwttataatgatgtcwcgaaagaaacgtcagttgcacatatcgacataccagacgtggatgtgattgtaacgataccaacttatgaactaaaaacagaagcatcaagacgtgctttaccacaaaaattaacacatagtgaagcsgtwaaaagtagtgcaattagtaatacaatgatttgtgcattagcacagcacaattatgaattagcaggtaaactcatgcaacaagatggctttcatgaaccgtatcgtcagcatttaattgctgaatttgatgaagtgaaaacaattgctaktcaacataatgcctatgcaactgtaattagtggtgctggaccaactattttaatatttagtcgyaaagaaaatagtggsgaattrgttcgckctttaaatagwmakgtagtwwcatgycattctgaattrgtsgatattaatrtyagtggtgttaaagaacgaattgtataccaatag

SEQ ID NO: 120 - DNA, 672 bp, Staphylococcus aureus
atgcctgacttaacacctttttggatatcaatacgagttgctgtaatcagtacgattattgtaacgrttttaggtatttttatatctaaatggttgtatcrtcgtaagggttcgtgggttaaagtattggaaagtttattgatattacctattgttttgccgccaacggtattaggttttattctattaatcatcttctcgccaagaggaccaatyggtcaattctttgcgaatgtactacatttacctgtagtrttcactttgacaggtgctgtgatagcatctgtcattgttagttttccactaatgtatcaacatactgtgcaaggcytcagaggtatagacacgaaaatgattaatacagctagaacgatgggagcaagtgaaacgaaaattttcctcaaattaattttaccattagctaaacgctctattttagcaggtataatgatgagttttgctcgtgcattaggtgagtttggtgctacattaatggttgcaggatatattccaaataaaacgaatacactacctttagaaatatacttcttagtggaacaaggtagagaaaatgaagcgtggttatgggtattagtgctagtcgcattctctattgtggttatatctacaattaatttattgaataaagataaatataaggaggtcgactag

SEQ ID NO: 121 - DNA, 1113 bp, Staphylococcus aureus
ttgaggcgtaaaaggaaatggctaattgttatttgtgtattattagtattgattacgatatcacaaattttgaaacattttaactatggaactgagagtaaagaagcatacaatacatatacggttgaaaaagaaagacaattagatttacaaggtaaggcatatccacgtgaagttaaaacatattataaaaataatcaggttggaacatatttgggtgtgcaagtagcggacgggcaaacagtcaaaaaaggagacatgttaattaattataaaataaatagtaataaacgacagcaacttgttgataagataaatgatactcaacatattattacagaagtttatttaaacattactaaaggtttaaacaatcgagagatacagaagaagttaattgaatataagcagacattatatgaagctcaacagcaattgtatcagtatgatagtcaaaatagggatagtatgtatgcatcatttgatggcaagattatgatcaagaatatagataatgacagtgataatcaacctatactgtatctcatttcaaaggagtctcatattaaaacgtctgtyamgkagyktgaykkrmamamagtcaaaaaaggagacaaagttaacttaagtattacgagtacgggtaaaacaggagcggggattataaaacaaatctctgagttgcctattagttatgaagagaatttaagtcttcacgaaaatgatgccctgcatttaccagaaagtaacaacgatggggaattagcaaattcaaaatcgatttcggcatctccaatatttaagagtaataacaactctgaattatcaaagtatggagttataattgatgatcttagtctaccaatacgtgcaggttattcgttggaaattaaagtcccattaaatgcgattaaaatacctaaatcagtattaacaaaaggcaataatgtttttattgttaataaaaatagtattgtggaaaaacggaatattcgtataaaaagaatcaatggtgacattattgtagaaaaggggttaaaacctggagacaagttaattaaacaacctaaaagtacaatgaatgatggtgataaggttgagatttcgtcatga

SEQ ID NO: 122 - DNA, 681 bp, Staphylococcus aureus
atgatagaattaaagaatgtttataggacttttaaaaacggtgataaaaatattcgagttttaaaagacattaatatacatatcaatgcaggtgaattcatagcgattatgggaccatcaggctcagggaagagcacactgattaatatcttaggatttatagatcgagagtatcatggtgaatatttgtttgaaggaagtaattatcagacacaatctgataatcaattggcaaacataagaaataaaacagttggatttgtttttcaaaattttaaactaattcataataatactattttagaaaatataagtatgccactggtatatacaaatatgaatacgatagaacgaaagaataaagttatgactgtgctcagtgctgtaggcctagatggcaaaggtgattttactcctagtaaactatcaggcggtcaacaacaacgtgttgcaattgcgcgagccattataaataatccaaagtttattattgcagatgagccaacgggtgctttggattcagatacatctaaaattattatggacatatttacatcattaaaccgagataatcatactacaattattttagtcacacatgatcgtaaagtagcagaaaaagctgatcgaataattcatattttggrtggtcgtatacaacatgaagaggtgattaaatga

SEQ ID NO: 123 - DNA, 1179 bp, Staphylococcus aureus
atgaggaaagttttaaatatttttacaatagcttttaaatcaatattgaaaaataaaggtagaaatatatttacaatgataggtataatcatcggtatttcttctgttattacgataatgtctttgggaaatggctttaaaaaaactgctgctgatcaattttcagatgctggcgccggaaaacaagaagcgttgattagctttacttttaaagttgatgagaaaatcaaaaagtatccttttaatcaaagagatatagagttggtaaatcaagttgatggcgtactagatgcgaagctaaaggaaaataaagaagaaggaattgaagccacaataactaatgtccagaaaaaaagtgacatcttcattataaaaaaacaaaatttacactcttttaaagtaggtagagggtttgataaagaggataatgaattacgtaagaaaatagtggttataaatgatcaagtagcaaaaactgtattcaataataatgctattggtaaatcgctatatattgagggacagggatttgaagtcataggaattacggataaactatattctgactcatctaccgttataatgcctgaaaatacattcaactactatatgggacacttacatcaaggtctgcctaccttacagataattattgaagatggttacaataaaaaaactgtagttaaaaaagtagaatcactattaaataaaaaaggatcgggctctgttttaggtgagtatacatatacagacactgaagaaattatcaaaagtattgataaaatttttgatagtattacttattttgtagcagctgttgccggtatttcactttttattgctggtattggagttatgaatgtcatgtatatatctgtagctgaaagaacagaagaaattgcgatacgacgtgcatttggtgcaaaaagtcgagatattgaactacaatttttaatagagagcattttaatatgtgtgacaagtggttttattggacttattttaggtgttgtgtttgcaacaataattgatgtattaacaccagattatattaaaagtgtagtaagtttgagttctgtcataattgcggttagtgtgtcgatattaattggacttctttttggatggataccagctcgcgcagcatctaagaaagagctcatagatattataaaatag

SEQ ID NO: 124 - DNA, 222 bp, Staphylococcus aureus
atgctaaaattacataaaaaaatagcttggacaggaatcaaaggttcagctataactacatttattactgccttatataatggaagtagtgtttggaacgcgctagctgttgctggtattgcttttggtggtggcgctggtactgcggttgcagctcttggtcgtgcaacagtaatgagatttatcaaacgttggggcgtacgaaaaacagctgcttggtaa

SEQ ID NO: 125 - DNA, 723 bp, Staphylococcus aureus
atgctagttttaaataatcttcaaaaaaaatttactaattcaaaaatggttttgaataatgtgaatgctaagtttagaagtgggagcatcaattgcatagtgggagtaaatggggcaggtaaaacgactttgttaaatattattagtagtatattgatgccaacaaaaggtgatgtatatttaaatagtgaaagtatttttgaaaatagcacactaaaaaaagagattttttacacaccagtaaatccctttttttatgaaaatttaagtgctaaagataatttgtacttaatatgtagcctatataatcggaaaatagatcaaataactattgagaaaactattaaagatgtaggtttgaatatagaagatctaaatatacctgtatataatttttcaagtggtatgaagcaaaaactaaattttgcttctatgttattagtagattcaaatgttttattattagatgaaccatttaatgcccttgaccatgttgctcaaaaaaatttcacacgaattttaaagggattagtttctaaagaaaagataataattttcactagtcatttgcctaatacaattttagaactctcagaaaatatttatttgttaaaagatggatgttttacagataaacgaaaagcacagtcatttaatcaaaccacgttagaaacatggttgttagaaagtcaaaaagaggtgataccttatgaagaaaaatga

SEQ ID NO: 126 - DNA, 804 bp, Staphylococcus aureus
atgacaaattataaagttgtcgttttagayatggatgacacattgctaaattcagataatgtgatatcagaagaaactgcaaattatttaacagcaattcaagatgaaggttattatgttgttytagcatctggtagacctactgaaggtatgattccaactgctagagatttaaaattacctgaacatcatagctatattattagttataacggyagtaaaacgattaacatgactaatgaagaagtagaagtaagtaaatcgattggtaagcargatttcgatgaaattgtagattattgtcgagayagaggctttttcgttcttacatatcatgatggtcaaattatttacgacagcgaacatgartatatgaatattgaagcagaattaacwggtttaccgatgaaacgtgttgatgayatyaaagcgtatattcaagrygatgtwccyaaggtcatgggtgtagattatgtagcgaatattacagaagctagaattgatttgaatggtgtgttcaatgataatgtagatgctacgacaagtaagccattcttcttagaatttatggcyaaagaygtttcaaaaggtaatgcaattaaagcgttatgtcacaaattgggatattcggtggatcaagtcattgcttttggtgatagtatgaatgataaatcaatgtttgaagtcgcaggtctagctattgctatggggaatgcatcagatgaacttaagcaatatgcaratgaarttacgttggaycataatgaaaatggtattccacatgcgctcaaaaaattgttataa

SEQ ID NO: 127 - DNA, 1422 bp, Staphylococcus aureus
atgcaagatatttacttyttagagcaaatgtctcaatttgatagagaagtaataccwgarcgtcgwatgcatgccaaaggttctggtgcatttgggacatttactgtaactaaagatataacaaaatatacgaatgctaaaatattctctgaaataggtaagcaaaccgaaatgtttgcccgtttctctactgtagcaggagaacgtggtgctgctgatgcggagmgtgacattcgaggatttgcgttaaagttctacactgaagaaggraactgggatttagtagggaataacacaccagtattcttctttagagatccaaagytatttgttagtttaaatcgygcggtgaaacgagatcctagaacaaatatgagagatgcacaaaataactgggatttctggacgggkcttccagaagcattgcaccaagtaacgatcttaatgtcagatagagggattcctaaagatttrcgtcayatgcatgggttcggttcwcacacatactctatgtataatgattctggtgaacgtgtttgggttaaaytccattttagaacgcaacaaggtattgaaaacttaactgatgaagwagctgctgaaattatagcwacagrtcgygattcatctcaacgcgatttattcgaagccattgaaaaaggtgattatccaaaatggacaatgtatattcaagtaatgactgaggaacaagctaaaaaccataaagataatccatttgatttaacaaaagtatggtatcacgatgagtatcctctaattgaagttggagagtttgaattaaatagaaatccagataattactttayggatgttgaacaagytgcgtttgcaycaactaatattattccaggattagatttttctccagacaaaatgytgcaagggcgtttattctcatatggcgatgcgcaaagatatcgattaggagttaatcattggcagattcctgtaaaccaacctaaaggtgtkggtattgaaaatatttgtccttttagtagagatggtcaaatgcgcgtagttgacaataaccaaggtggaggaacacayyattatccaaataaccatggtaaatttgattctcaacctgaatataaaaagccaccattcccaactgatggatacggctatgaatataatcaacgtcaagatgatgataattattttgaacaaccaggtaaattgtttagattacaatcagaggrcgctaaagaaagaatttttacaaatacagcaaatgcaatggaaggcgtaacggatgatgttaaacgacgtcatattcgtcattgttacaaagctgacccagaatatggtaaaggtgttgcaaaagcattaggtattgatataaattctattgatcttgaaactgaaaatgatgaaacatacgaaaactttgaaaaataa

SEQ ID NO: 128 - DNA, 771 bp, Staphylococcus aureus
atgkctmrtataagtatgtcagatatwwattgyracggyacwatatttgaaaatracgacragcagttratttatttaacgcctwyttttccacaacgatacacaagyaacacatggwtatataaaaagaygcctacccaagagcratggytgaaagacttararcgtcaacatcaattacatacaaatcaaggttcaaatcattatgcrtttagtttyccggaaaatgaacaacttgatratcattggatggctatktttaaagatatgaattttgaactaggtattatggaattgtatgccatagaaagtgatgcgcttgcyaatttgccgcgtaactctgacgttgaaattgcyrtcgttgacgagtcgcatatagatgcctatttaaaagttgcatatcagtttagtytgccatttggaaragactatgcagatgcacatgaaraaatggtaagggaacattatcaaaaagatgtgattaaacgcttagtagcttatttaaataatgaacctattggcgttgtagatgtcattgaaagtgaaaattacattgaattagatggatttggtgtaytagaacaatttcgrcaccaaggaatyggwtctacmatkcartcrttrrtagstgaataygcywtatcwaraaatcayaaaccrrtyatattagttrcagatggygaagatacagcaaaagatatgtatgcaaagcaaggttatgtytaycaatcrttttgttatcaaatattaaaagaagatattggaaattaa

SEQ ID NO: 129 - DNA, 159 bp, Staphylococcus aureus
gtgtttaacrtgcgcgtaaacgtaacattagcatgcacagaatgtggcgatcgtaactatatcactactaaaaataaacgtaataatcctgagcgtattgaaatgaaaaaatattgcccaagattaaacaaatatacgttacatcgtgaaactaagtaa

SEQ ID NO: 130 - DNA, 555 bp, Staphylococcus aureus
atgacaacaaaacagttagtatayacagctttaatgacagcgattatcgctattttaggawtggtaccggtaattccactaccattttcttcagtaccaattgtacttcaaaacattggtattttcttagcaggtgygattttaggacgtaaatatggcacattaagtgttatcgtctttttattattagtagttgctggyttgccaytgttatcaggyggtcgcggtggcatyggtgtattcgcaggtccttcarcagggtttttactattatatccagttgtagcattcatgattggkgcgattcgwgatagattcatcaatgaaattaatttctggattttattcgttggtattttagtttttggtgttatagcattagatgttattggtacattgattatgggcatgattattaacataccatttacgaaagctatttcaatttcattagcttatttgcctggtgatatattaaaagcaattgtagcaagtttgattggtacagctttacttaatcactcgcagtttcgtcaaattatgggawtaaartaa

SEQ ID NO: 131 - DNA, 270 bp, Staphylococcus aureus
atggctaagaaatctaaaatagcaaaagagagaaaaagagaagagttagtaaataaatattacgaattacgtaaagagttaaaagcaaaaggtgattacgaarcgttaagaaaattaccaagagattcatcacctacacgtttaactagaagatgtaaagtaactggaagacctagaggtgtattacgtaaatttgaaatgtctcgtattgcgtttagagaacatgcgcacaaaggacaaattccaggtgttaaaaaatcaagttggtaa

SEQ ID NO: 132 - DNA, 942 bp, Staphylococcus aureus
gtgactaagaaagtttattttaaccaygatggtggtgtagatgatttagtrtctctatttttattattacaaatggaaaacgttcaattgataggggtcagtacaattggtgctgattgttatttagarccatctttgagcgcatcagtaaaaattattaatcgtttttcaaakgaagatattcaagttgcgccatcatatgaacgaggaaaaaatccatttcctaaagaatggcgtatgcatgccttttttatggacgcattgccaattttaaatgagccagtcaaacaygttgcttcaaatgtgagmgacaaagaagcctttgaagacattattcaaactttaaagagacaatcagaaaaagtaacattattatttacaggcccgcttacagatttagcaaaagcactacaaaaagattcatcwatcgttcagtatatagaaaaattagtttggatgggtggyacctttttaccaaaaggaaatgttgaagaacctgagcatgatggttctgcagaatggaatgcatattgggatccagaagcggttaaaattgtttttgatagcgatatagagattgatatggttgctttagaaagtacgaatcaagtrccgctaacgttagatgttagacaaagatgggcgaatgaacgccaatatacgggcattgattttttaggagtaagttatgcagcggtaccaccattaacacactttataacaaattctacttactttttatgggatgttttaacgactgcttatattggtaacaaggacttrgttcaytcaattgagaaaaaagtsgatgtaataagttatggaccaagtcaaggtaagacatttgagtgtaaagatgggcgcaaaattaatgtcataaatcatgtagataacaacgcattttttgattatataactgcacttgctaaaaaagtaaattaa

SEQ ID NO: 133 - DNA, 978 bp, Staphylococcus aureus
gtgaaaatatttgattacgaagatattcaattaatacctaataaatgcatagttgaaagtaggtctgaatgtgatacaactatccaatttggtccraaaaaattcaagctacctgtagttcctgcaaatatgcaaacagttatgaatgagaaattagcgaaatggtttgctgaaaatgattacttttatatcatgcatcgttttgatgaagaagcaagaataccttttataaaacatatgcaaaattcaggcttatttgcatctatttcagttggtgtaaagaaagcggaatttgattttatwgaaaarttagctcaagaaaarttaatccccgaatatattacaatwgatattgcgcatggtcactcagattcagtgataaacatgattaaacatatwaaaamccatatacctgatagttttgttattgctggtaatgttggyacgccagaaggtgttagagaattagaaaatgctggtgctgatgctaccaaagtcggtataggtcctggtagagtttgtattacaaarattaaaacaggttttggtactggtggttggcagttagcggcattaaacatatgtagtaaagcagctcgtaaacctttgattgccgatggtggtataagaacgcatggcgayatygctaartcaattagatttggtgcatcaatggtcatgattggttcattatttgckgcacacgaagaatcacctggtgaaactgtagaacttgatggtaaacagtataaagaatattttggtagtgcatctgaatttcaaaaaggcgaacataaaaatgtwgaaggtaaaaaaatgtttgtagaacataarggttcrttaayggatacsytaaaagaaatgcaacaagatttacaaagytcaatytcwtatgccggtggaaaagacttgaaatcattacgtactgtagattatgttattgttagaaactctattttcaacggtgatagagattaa

SEQ ID NO: 134 - DNA, 909 bp, Staphylococcus aureus
atgaaaaaactattattaccattaataattatgttattagtgttagctgcgtgtgggaaccaaggtgaaaaaaataacaaagctgaaactaaatcttataaaatggacgatggcaaaacggtagatattccgaaagaccctaaacgcattgcagtagttgcgccaacatatgctggtggacttaaaaaattaggtgcaaacattgtagctgtaaatcaacaagtygatcaaagcaaagtrttaaaagataaatttaaaggtgttacwaaaattggtgatggygatrtagaaaaagttgctaaagaaaagccagatttaattattgtatactctactgacaaagayattaaaaartatcaaaaagtagcaccaacagtagttgttgactataataagcataaatayttagaacaacaagaaatgttagggaaaattgttggtaaagaagataaagtaaaagcttggaagaaagattgggaagaaacaactgctaaagacggtaaagaaattaaaaaagcaattggacaagatgcaacagtgtcattgtttgatgaatttgataaaaaattatacacttacggcgataactggggtcgtggtggagaagtattatatcaagcatttggtttraaaatgcaaccagaacaacaaaagttaactgcaaaagcaggttgggctgaagtgaaacaagaagaaattgaaaaatatgctggtgattacattgtgagtacaagtgaaggtaaacctacaccaggataygaatcaacaaacatgtggaagaatttgaaagctactaaagaaggacatattgttaaagttgatgctggtacatactggtacaacgatccttatacattagatttcatgcgtaaagatttaaaagaaaaattaattaaagctgcaaaataa

SEQ ID NO: 135 - DNA, 1206 bp, Staphylococcus aureus
atggytaagaaagtttttattatggatagcgtaaagacaataattggtacgttgcttatagctttaggattacaatttttagcttatccaattattaatcaacgagtaggtaatgaagcgttyggttctattttaacgatttatacaataataacaatcacgagtgttgtattaggcaatacgcttaacaatatacgattrattaatatgaatctatacaaatccaatcattactactggaaatttgyrtcgatacttttaatytcaattctgattgagagtatagctttaattattgtatttctttacttttttaatttgaacaycatcgatattatctttttaattctacttaatattttaatgtgtttaaggatttatctgaatgtattttttaggatgactttaaaatataatcagattttgtatattgctcttattcaatttttaggtttgctgataggactatttctatattatttaayccaaaactggattgtttgttttattaccagtgaattgtttgcaacgatatatacattggttaaattacggggattaactataggcgagtatcaaagtgaagataataatgtggtmaaagattatgtgatgctactgagtacaaatagccttaataatttgaatctctayttagatagattaatcttattaccaattataggtggaacagctgtaactatatcatttctytcaacatttattgggaaaatgttagctacatttctrtatccgattaataatgtagtactttcatatatttctgtaaatgaaagygacaatataaagaagcaatatttgaaaactaatctawttgctatagctgcmctatgtttagtcatgattatatgttatccaattacawtaattattgtctctttactgtataacattgattcaagtttatattcgaagtttattattttaggtaatataggtgttttattcaatgcagtgagtattatgatccaaactttaaatacaaaacacgcatcaataacattacaagcgaattatatgacgcttcacacgattacatttatattcataactattttaatgacaattgcgtttggtctaaatggattcttttggacaacgctgttcagcaacattattaagtatgtgattttaaatattataggtttaaagtctaaattcattaataaaaaggacgtcgattag

SEQ ID NO: 136 - DNA, 828 bp, Staphylococcus aureus
gtgactgaaattaaakataaagtaattactaaagatgcatttgmattaccytacacaattattaaagcraarmatcaaccaacaaaaggygyyattgtctacatycayggtggyggwttaatgttyggwaargcyaaygatttatcsccacagtatatcgatatccttacggaacattacgatttaattcaactaagttatcgtttattaccagaagtaagyctygattgcatyatygakgayrtctwcrcatcattcgatgcgattcaatcacaatattctaattgccctatttttacctttggcagatcatcaggtgcatatttaagtctattaattgcacgagacagagatattgatggtgttattgatttttatggttatagtsgcatcaayactgaaccktttaaaayrrcwaatagytattacgcwaaaatagctcaaagyrtraaygaaacartrmttgcwcaactyacttcaccaacaccgrttrttcaagatcaaatcgcmcaacgttttttaatctacgkttatgcacgtggyacaggtrartggatmaatatgattaacattgctgattatactrattcaaaatayaayatykcaccaratgaacttaaaacacttccmcckgtkttcattgcgcattgtaatggcgattatgatgtyccygttgargaaagcgaacayatcmwsaatcatgtkccacaytcaacatttgaacgcgtgaataaaaacgagcatgattttgatcgtagacctaatgacgaagcaatcactatttatcgtaaagttgttgatttcttaaacgctataacaaygrygtaa

SEQ ID NO: 137 - DNA, 1155 bp, Staphylococcus aureus
atgaatgatatggataattcctttttaataacaacggaaattcaaagaaaatggattgaaaaattcaaagtaattrgagatacatttaaggctaargctgaatataatgatcaacatagccaatttccatataaaaatattgaatggttaattaaagaaggttatggaaaattaacgttaccaaaagmatatggtggtgaaggtgcgaccatagaagacatggttattttgcaatcatttttaggcgaacttgatggtgccacagcattatctattggttggcatgtgagtgtcgtaggacaaatttatgaacagaaattatggtctcaagatatgttggagcaatttgctgttgaaattaataatggtgcattagttaatagagcagttagtgaagctgaaatgggtagtccaacaagagggggaagaccaagtacacatgctgttaaagctgatgatgggtatattttaaatggtgtgaagacatatacatcaatgagtaaagcactaacacatattattgttgctgcttatatagaagaattaraargtgttggttttttcttagtrgacaggaatttgcctggtgttgaaattgccgataattgggacgtattaggtatgcgagcgacagaaagtcatgatttaatattaaatgatgtaaaagtaccattaaaacatttagtggaaacagagaaaagtaaagcgycaaatggttggatattgcatataccaagctgttatttaggtatagcacaagctgctagaaattatgctgtaractttgcaatccaacatagccctaatagtatwgaaggaacgattgcaacattgccaactgtgcaacaaaatttaggraaaatggaaacgctrttgttatgtgcgagacaatttttatggagtacagcraaaggstatcaacaatatamagmygamagtcagatwagaaatbcracragtgcgagtaaagtratggtaatgaaycaaggscttgaagtgattgatttagcgatgmgmatwgttggtgctaaaagyttagaaatgaatcgrccattacaacgttactatcgtgacatgcgtgcaggattacacaatccacctatggaagatgcagcatatacaaatattgctaagagtattacagatacattttaa

SEQ ID NO: 138 - DNA, 864 bp, Staphylococcus aureus
ttggatacrccgaagaaacaacaatttgcctttaayaatatacaaatgaacatgtcgaaatcagatgttgagaaaacattaaataaaccaaaaagagtgacatttaatgaatatggtacgaagtggtatacgtattatgatgrygattacaataattttatmatgrtaagttacatkaaagataaagttaatgcgttatatacaaatcaaaatatmatcacttcaaaatcaaaaattaaatrcaatacacckaaatcggttgtaaggcaaagattaggygaaccagaaacagagattgttaaaggtagagtgcgttacgaacaaaataataaagaatatgatgttttccataaaaatcacatttatacgacggtattttatgataagcatcgacgtaataatgtaacagctgttttacaagtaagtgatgctatggaaaatagattaaaagaacaatatggagcaccwtcgaaatcgcttgcagatagttttgaactacaaaattttgatttagttaatgctgmaagaaaacaacatcaattatytacattgaagtattctaaacagaattctgaaactgcwcgtaagcatagtaaagatatggccaamaatcattattttgatcatacaaatttaaaaggtcaatcaccatttgatcgattgaaaaaagatggtattrcatttaactcagccggagagaatttagcatatggtcaagttagtagtatctatgcacatcaaggattaatgaattctattggtcacagaaaaaatattttaaatgatacgtttaaaatattaggygttggtgttgattttaatgatgaaaaacaacctttttggacagaaaattatactgrttaa

SEQ ID NO: 139 - DNA, 402 bp, Staphylococcus aureus
gtgtttcatatgcttgaagataacggcgatatcagattgctatatcaatcaatagaagaacttgcttcagttttgggtcaaagtcaattcgaaactaaaactgtcagcttaatatttgtacaaatggacttaagatatagtgttttcgaaaaagtgcaaactgattttatgaagtatttagcacataaaaattctgatgaaataaaatatatagacttaatcaaaataatagaaaatgcattacctgaagataaagaacttagtatcaatgtgattaattccattattattggtttcgctaataactattacccaatattgcaaagtttagtaccggaaatacaaagtagttatggcataaccataaataaaaatttcaatatagatagtatagatttttaa

SEQ ID NO: 140 - DNA, 342 bp, Staphylococcus aureus
gtgaaaattaatcgcaatcctaacttgccaatgaatccagaagcacaacaacgaattggcggaacaaaagtagttaaaactgctataaagctaattattaataataggggcaaagcaaaaaatgtcatacaacaagttggtggcaaaaaagctgcaactatttttgataaagggtattcaggtattgtaaaagaattgaaaccattgctaaaatggtcagaagtaccagctaacgctgtcggtgatgcagttaaacgaggcgcaataaatgccggtctaagtaaaagtgatgctggaataatctcaactgtagtcaaagaagccattgcatggttattctaa

SEQ ID NO: 141 - DNA, 423 bp, Staphylococcus aureus
atgaaaagcgttaacattctattaaatttattaccaactgaattaaaaaatatgttagagaataaagatatggagaatattctaacatactttatgtcgaacgaaatttcagatgaaaaattagtatcatatttatcaaatcttgcgaatcaaataaatacaattgaatatcatgaaatggtcgcaagcatctatcactttcatttcaattacatagataatgcctatgatttagcatactatcattattggcaatcgttagagatttcgcaatttaataatgctaatttattatacgaatttttagaaatccttggagaaccagactttaatatgatttcacatgagaatattcaattggtcgcaaataaaattcttgaaagagaccctaataataagttagcaattaaatatattaactaa

SEQ ID NO: 142 - DNA, 549 bp, Staphylococcus aureus
atgaaaacaaaaaatcttaatcactttatttatagcatttctgatctcagaaatttaataaaggacaacgccctctttcataactatataagtcaagaaaccaagaaattccaaacatctttaaacccttcaatagcacatttcctaaaacataaagcaataaaaatgaacgatcaaaattccatacgtacgtatttaattatagataaatcagaccttgaaataatgggatacttctgcttaaaaattgtaaatataaagcttgaaaaagacgttagtggaaaaacgaaaaaagatattgatttagataaaaatattcaatatgatttgaatactaatactatggatgataagggcagatacgtcgatgaaaatggaaaactaataaataaggattatgacgttttcgtagaacaatttgaaaatgaagaatatgaagctacattaatcgacaaagaaactggcgaaataataaaattcaactcaattgaagctaaatcttctgcattgccattagtaatattagctgcagtagctgatacggaataa

SEQ ID NO: 143 - DNA, 234 bp, Staphylococcus aureus
atgttttacaataaatataaaaacgtatcaacatatatcatcatatttttagtttcaagtgcagcctttgcaatattcttgttaagtgcgaacrttagtgctcactcggaacaagtgtacgaaatgactgaccatcaaattaagaacaatacgataaataaagcatacgaacataaagaccctacaaacaatrgcgaacaaagagatgggaaagtgttcgctttaataaattga

SEQ ID NO: 144 - DNA, 891 bp, Staphylococcus aureus
gtrcttttgaaaaatatwtctcargtwgtgttaattagtaataartggacwggwttatttatcttratwggattatttgtrgccgaytggacarttggattagcrgctatkrtaggtagyatcatmgcytatrcwtttgcrcgttwyatwaattatagtgargcagagrttaatgatgggttagcyggatttaatccagtgytaactgccattgcgttaacaatctttttagataagtcaggattagatattgttataacaatgatagcaactttattaacrttaccagtygctgctgcagtgagagaagttttaagaccatataaagttccgatgctgacgatgccttttgtcattgtgacttggtttacaattttactttcaggacaggttaaatttgtagatacatcgttaaagttaatgcctcaaaacattgaaacggttaattttagcaacaatgatmgaatacatktcattcagtcattatttgaaggattcagtcaagtatttatcgaagcgagtgtaattggtggygtatgtattttaatcggcatattratagcatcaagaaaagcarcactcttagctgttatagctagtttgttaagctttatcattgtagctctattaggtggtaattatgatgatattaatcagggrttattcggttataactttgtattaatggcaatcgcactaggatatacatttaaaacagcgattaacccttatatttcgacttttttaggtgtgttattaacwgtagtggtgcaactaggtacaacaacattgcttgaaccgtttggcttacctgcattaacattgccatttattatygtgacatggattttattatttgckggtattaaacatgacaaagtagatgcttga

SEQ ID NO: 145 - DNA, 240 bp, Staphylococcus aureus
ttgagtaattctgatttgaatatcgaaagaattaacgagttagctaaaaagaaaaaagaagtaggattaactcaagaagaagcaaaggagcaaacagcsttaagaaaagcttatcttgagagttttagaaaagggtttaaacaacaaattgaaaatactaaagtaattgatccagaaggtaatgatgtaacacctgaaaaaattaaagagatacaacaaaaaagagataataaaaattaa

SEQ ID NO: 146 - DNA, 348 bp, Staphylococcus aureus
atgagtaaaattaatgayattaatgatttagtcaacgcaacatttcaagttaagaagtttttcagagatacaaaaaagaagttcaatttgaactatgaagaaatttatattttaaatcatattttaagaagtgagtctaacgaaatctcatctaaagagattgctaagtgctcagagttcaaaccttactatttaactaaagctttacaaaagctaaaagatttaaaattgttatcaaagaaaagaagtttacaagacgaaagaacagttattgtttatgttacagatacacaaaaagcaaatattcaaaaactgatttcagaattagaagaatacattaaaaattaa

SEQ ID NO: 147 - DNA, 1878 bp, Staphylococcus aureus
atggcttacactttgtggacacgtcatctgaattttaatccacaatctaaagattacttcaatagagaccgtttcgtattatckgcagggcatggttcagcaytattgtatagcttgttacatgtttctggtagtttagaattagaagaattaaagcaatttagacaatggggttctaaaacaccaggycatcctgaatacagacatacwgatggtgtagaagttactacyggaccacttggacaaggttttkctatgtcagtwggattrgctttagcagaagatcacctagcagggaaatttaataaagaaggatataatgttgtagatcattacacatatgtattagcttctgacggtgatttaatggaaggtatwtcgcatgaagcagcttcatttgctggacataataaattaagtaaattagttgttttatacgattcaaatgatatttcattagatggcgaattaaacaaagctttttctgaaaacacaaaagctcgttttgaagcatatggttggaattacttactagttaaagatggtaatgatttagaagaaattgataaagcgattactacagctaaatctcaagaaggaccaacrattattgaagttaaaacaacaatcggatttggttcaccgaataaagcaggaactaatggtgttcatggggcacctttaggtgaagwtgaaagaaaattaacattcgaaaattacggtttagatcctgaaaaacgttttaatgtttcagaagargtatacgaaattttccaaaatactatgttaaaacgtgctaatgaagatgaatctcaawggaattcattattagaaaaatatgcagaracatatcctgaattagcagaagaatttaaattagcgattagtggtaaattgcctaaaaattataaggatgaattaccacgttttgaaytkggtcataatggtgcatctcgtgctgattctggtactgttattcaagcaatcagtaaaactgtcccttcattctttggtggatcagcagaccttgctggttcaaacaaatccaatgtaaatgatgcaacwgattatagttctgaaacacctgaaggtaaaaatgtgtggtttggtgtacgtgaatttgctatgggtgctgctgtaaatggtatggctgcacatggaggtttacatccatatggtgcaacattcttcgtatttagtgattatttaaaaccagcgttacgtttatcatcaattatgggattaaatgcaacgttcatcttcacrcatgattcaattgcagtaggtgaagatggtcctactcatgaaccaattgarcaattagctggattaagagcyattccaaatatgaatgttatccgtcctgctgatggtaatgaaacaagagtagcatgggaagttgccttagaatctgaatctacacctacttcattagtattgacacgtcaaaacttaccggtwttagatgtaccagaagatgtagttgaagaaggcgttcgaaaaggtgcctatacagtttatggcyctgaagagacaccagaattyctattattagcttcaggttcagaagttagtcttgcagttgaagctgctaaagatctwgaaaaacaaggtaaatcagtrcgtgttgtttcaatgcctaactggaatgcatttgaacaacaatctgaagaatataaagaatcagttattccatcaagcgtaacaaaacgtgttgcgattgaaatggcttcaccgcttggatggcataaatatgtaggtactgcaggtaaagttattgctattgacggctttggcgcaagtgcacctggcgatttagtagttgaaaaatatggmtttacwaaagaaaatatcttaaaccaagttatgagcttataa

SEQ ID NO: 148 - DNA, 327 bp, Staphylococcus aureus
atgattttagataatgtgaatccraatgatttatttccaactgaaaaaaagggtccgtcagtgytaggaataattgagtatmaagttcaaggtgmgaatgaatttgaaggggcatttatagcaacaaatgaaagattaattatgaatgtagatatgaatggccaattttattatagaagtattagttataatgaaatagaraagatagattatgatggtcaaactataatgttcaaatttaatattggtaatgtcccaatgcatgatattaaaagtrmtaacgttgaaatgtttgttgaatatgtaaaacaacatatgatagtataa

SEQ ID NO: 149 - DNA, 288 bp, Staphylococcus aureus
atgaatttagyaaaattcagtaggataaagaaagcgggtgaaacaatggcaacttggktagcaattatttttatagtagctgcattaattttaggtttaattggaggtttccttttagctagaaaatatatgatggactacttgaagaaaaacccaccaatcaacgaagaaatgcttcgtatgatgatgatgcaaatgggtcaaaaaccttctcagaagaaaattaatcaaatgatgacgatgatgaataaaaatatggatcaaaatatgaagagtgcgaaaaagtaa

SEQ ID NO: 150 - DNA, 744 bp, Staphylococcus aureus
atgtctaaatttaaagttaagcgtttaactgcacacatactaatgttgaaagtcattaatgatatgttgaaatattcatttcatctcactttgactcaagtgaaactattaaatctattagttaaatatgataattctgattccaatagcgcttcaatagatagkttattaaaaatgaaagaaatccaatctaagatggcmcttcttcaaatgttaagttatttaaacaatcatcaatggctattgaaagsaagagatcaaagggatcaacgtaaattgactatttcgattaataaaatgcatatagataaaatagaatatatgaataatgagcttagtgactatattgaacgttattttggtcaatatacatttgattttagttgtgactatgtatcgtatttattgtcgtcacaagaattattkckraatctaaagtgttatttaaatatgtgtcaattawcattagaagagttatacgttttaggaatattaaatctgcataaaggtcaattgacggttaaagaattacagggtgaattccatcacccgatatttgcggttagyccgattttaaagtgtttaattttgaarggattagttaaaaaagagagatgtgaattagatgaaagrcgtgttattgtaacaatcaagcgrgaaaagttttctaaagtcactatgcttattcaagcatgttataattatcttgaaaagggaatacaagttaakcttaataataaatag

SEQ ID NO: 151 - DNA, 96 bp, Staphylococcus aureus
gtgcgaaaaagtaaattcgcaattgatagaggctattttccagatatggaaatggcctctttttataatcaaattaataarrayaaatatgtttat

SEQ ID NO: 152 - DNA, 1956 bp, Staphylococcus aureus
atgacagataattattcactacatatttwtaaaagtatgaaaatgagtagtgtgaaggaagcraacttaaaaattatatattggctwcaaggtacaggtgtagtttcaatcaatctacaacaatatgatgtraaaagaaatgatgtcaccrttattatgttgaatgatttgtatcarattgatggtmatgatgatagtgtatgttgtgttgttgaagtaagtgcaaagacatttttgaagtttatgaatgcaaactatatgatgcgtggcaagatattaacaaatgaggttgctagcacttttagaatcttgattaagtatttaatctacagcaaaattaaacaacagycttataatgctaatgataagattattaattayatgtgtgttgaattaatgtcattaaatacatacgatggtagtcgtcatttagtagccgaagaagtgcacgattatttaacaaacaaccaccataaaaagataaataggaaagatgtcattaatcaagttagtatyacaaacaaagctttaagtgacatgkttaaagcgacrccttatagtaattttattcaatatttaaatcatattagactggagcattgcttaattgatattttaacttctaagaagccyattgaagaaatcgcaagtagtcatggttttaatcattattctcgttttatacacctctttaaagaaacgtatggtracactcctaaattaattagaaaaagawatagtccaacatctcattcaattaaccattcccaattagttgaaattgataaaaatataattgaattatttgatratactaatcaaagttcttcaagtatgcgcgagattgatataccttttgarcctacaaaaaggagtcaaatgtatcaacctaaaaacatytatattaaaggaagtaatttttattggatggattaytatactattaaacaaatcattcaaagattaggtgttaatcytgaaaacttgcatataattgttacaatcgacacaagcaatgagctatcgattgaacaaatcactttattacttcaaaagatagtgaattacaatgtaaatgtagtrtttcgtattaaacatgaatataaggaattgttaacgagtrctgaaagaggcaagatagaaaagctagtagcyacaatttttaatatgacwtttgagagtaatagatgtaagattgcatttttaattaacgacttaaatactactgcaattcaaaaactgaaacgyttaatagataattatataggagtatttgaattaatatatcatctggaaccaaawgagttgaatacgcrctatgataaagaaattgatcatctaatagactattttatcttaccgctaagacaaatagaacaggtgtctattgcaygttctaaaattatatgtgatgtagatttgattaatgagaataatgacttaaaagaaaaaatcacaatgtctgatwttaataaggttwctgaacttttgacaaattatacaaaatttcgaggacttattatgcacatgtcaattataagtgaakckagcaaagaaataaatttractagattatcaatattcatttttatcataaatatacttaatcaattacgagggattgttatttatcaaaatgacacgatgattgtaacgaagttcaaacatgaagtacaatgtgtcatttgtttgccagccgcattgttaaatgagaattcagacgctatacgtttatcgtgtaagggtcttcaacaatttagccatgctaaaactaaacaaattgttttaagtatagataaagataatcatacttccgaaaatggtgtacttgtgaatgatattatgcaacaacacagttattggaaagctaattttatagaaagaaatatttatgatcattcattaatggtctcaagcaatagtattgttcatttgaaatatcatcttgagatatag

SEQ ID NO: 153 - DNA, 468 bp, Staphylococcus aureus
gtgctctatttaatattttcaatcattgtagctttatttatgggaactmtagttatagttattcgtatgaaagctcaaaattatccggtaaatgagaaaaaaatagttttgccaccgttttttatggcgacyggtgcattgatgtacgtcgttccatattttaggctaacaggatcggaaatgctagaagcctttataattggtttgcttttttctacagttctaatttggacttctcgatttgaagtcaaaggtacagaaatttatatgaaacgatctaaagcatttccagttattttgatttcattacttrtcattcgtactgtgatgaaaatattcattagtaatgaaatagatcctggagaattaggcggcatgttctttttattagcattctgtatgattgttccttggagagyagcaatgctatataaatacaaaaaactaaagaaaacattaatcaattaa

SEQ ID NO: 154 - DNA, 1401 bp, Staphylococcus aureus
atgatgamaagaaaaccmacctttttagaatcaatttcgacaatgattgtaatggttattgttgttgtaacaggctttgtgttttttgatattccaattcaagtattattaattattgcctcagcatatgccrcatggattgcaaaacgtgtaggcttaacatggcaagatttagaaamaggcattgcagaacgtttaaatactgcaatgcctgcaattttaattatactagcggtaggaattatagtaggcagttggatgttttctggcacagtgccagccttgatttattatggcttagatttattgaatccaagctattttttaatatcagccttttttataagtgctgttacatctgtagcaactggtacagcatggggctctgcatcaactgcagggattgcacttatttctatyggtaatcaattrrgkatyycwccaggratggcwgcgggtgctattatagcaggsgctgtrtttggcgataaaatgtcaccwttatcagatacaactaatttagcggcrcttgtyactaaagtkaatatatttaaacayatwcattcratgatgtggacracratacctgcrtcaatcatmggtttattagtatggtttattgytggatttcaatttaaagggcattcaaatgataarcagattcaaacwttgttatcagagcttgcacagatttatcaaattaacatatgggtctgggttcccttaattgtgatcattgtttgtttgctatttaaaatggctacagtgccagctatgstaatatcaagcttttctgccattatagtggggacttttaatcatcatttcaaaatgacagatggtttcaaagcaacatttagtggttttaacgamtcaatgatacatcagtctcatatttcatycagtgtgaaaagcttgttagaacagggtggtatgatgagtatgacccaaatattagtaacgatattttgcggatatgcatttgcaggtattgtagaaaaagcaggatgtttagaagtcttattaactactatttctaaaggcatccattctgtaggaagtttaatatgtattacygttatttgttgtattgcgcttgtattcgctgcaggtgttgcttcgattgtaattattatggtcggtgtgttaatgaaagatttgttcgaaaaataccaagtctctcgttccgttttatcaagaacacttgaagactcaagtacgatggtyttacctttaataccatggggaacatcaggtatttactatacgaatcaacttcatgtctctgttgragaatttttcatrtggacagtaccatgttatttatgcgcaattatagcaattatctatggttttacaggrataggtattaaaaagtcatcgaattcacgtttaacttaa

SEQ ID NO: 155 - DNA, 150 bp, Staphylococcus aureus
ttgtactacataaaagaaagtggtcgttatcatagaatatttggcgataaggtaaatctgattatgttagaacctatatttattgatgatttagtgaggtttgagaagacaagaatgattgaattacaattgacaattgacaccccttag

SEQ ID NO: 156 - DNA, 1155 bp, Staphylococcus aureus
atgcgaaacacagttggccttttttttgtaataggagaatttatagttatggataaatcacttgaaattaacttaaaagaattagaaggcataatgtataaagaaaaagtaatcgacgttaaagagtatgataatttaaaagtaacttttgagacactaaacgatgctcctaaaagtgaaatacccactccctttacaatagaacaaatgttatataaattagaaactaaaaatttatattttcctgaaattaagtcaaaagaaaaatgtgtggagcttttacatagtgttggctattataatttgaagcattttatgtataatgaatttggtaaagatgagccgaaaaattttgatgaagtatatatactttataaatttgatagatatttattgaaacaattatttagtttagtaaatatgttggaaactcatataagaaatattattttagaagtatatatgttagaaattgagtataataacaagccttcgacactgttctatttagataaagatttatattttgagaaagttaatgatgagtataaatattctgccaaaaagctaaaagagttcaataggttacaaaatgttttttggagagctatagaaaaaaagaaaagtaacgataacgttaaacataatattaaaaaatacaatattataccagcttgggttttattccaaaattttagttttggagatttgtctactttttatagaactacattaccaacttatagaaataaagtaagtaagcgaattgaaaatttaatagaaaaaaatactggtataagcataaaacttccagaaaagttattgtgtgcatggttgaatagtatcaggtttttgagaaatagaatagctcacacagatataatttatggaattaattttacaaacacctgtgcaaaacatcatagtgatgaggaaatgtatgtaaatatagaaaagtataaatatcagcaaaggttagttacatttttattagctatgaagaaaatatttatgagtatgccagaaaataatattattgaatggaatgagactctaactaagatagagaataaatgttcagaacataactttattaaactttctaggttaggagttattgaaaataacctttcttactttaaaataactaaataa

SEQ ID NO: 157 - DNA, 333 bp, Staphylococcus aureus
gtggcaacactaaaagatgtaaagactggtaaaaaggaaattttgccatcaactgcaaaagataaaaatggtaaaaatgttacgttaatttattttgaaaaagacggtaaattaggtttttatgtgcagaaaacacaaaaagaacgtggagtagggaaatgcgtttctggtatagcgggtggcgcagtgacaggaggcactactttaggtcttgcaggtgcaggagtaggaacagttactattccagtaattgggacagttagtggaggcgtagttggagctgttggtggtgctgtcggcggtggtctaaccggtggagccacattctgctaa

SEQ ID NO: 158 - DNA, 1827 bp, Staphylococcus aureus
atgggatatagaatagaaacaagaacgtttgaagagttagaaggaaaattaaagttaccaacttttcaaagagcactagtttggtctaataatcaaaagcaagaatttttctcaacgctgaaagatggttttccttttggttctattctgttatacgaatatgaaaatgataataaatacagtcttattgatggcctgcaaaggtattctacaatggtagatttcatggagaatccaacaaactatattgaatttgaagattttacattgaaaattgctgaattgtataaaggggcatcagagagtacaaaagcagaagtagttaattatgccgaagatattctgctgaaaattattgaaaaatatattgattctacaaaagaaaatgtaaaagtaaatgaactagctaaaaaaatggtggataaatttccagtattaggtgaaacagatattagagatgaaatcactcaaatacagtcagatgttattacttattttaataatcaactagatattagtaatgtcaagattccgtgtatcttctttgaaggagaagagactgaattggcagaagtttttcaaaggttaaacagtggaggtaaaaagttatcgaagtatcaagtttttgctgcacattgggacagatatgaagttgaattgggagatttaaagtatagtgatgagatacttaaaaatgtaatagaaaggtacgaaagattaaataatgatagaggtatcttaattgaaaattttgaccctaaagaaatggagacgtcaagagtaattaatttatctgaattatgttatggacttggtaaagtgatttctgatgaattacaagcattttttaaagagtcaacagaagatatatgcaatgaattaggatttcaaacaatgctaattgtatttggcattcctacaaataagatgaatgagttaccatataaatatcaatatatgaagaataaaaataatatagaaatcttgtttgaaaaaattgtgaagatatataaaataataaataacaagtttaaagaagctttctctatggtagtatcgtcaagagaagataaatatgaaactaaatcttttactagattacaaataatgtcattcttttcatctttatggatctcatcgtatagtattgaattagatgaaaataaaaacacattttctattaaacaaactaaatctttgaaaaaaaatcaacaagtgattttgtctaatatcataatttatgcaatttatgatgtgataagaaagtactggtcaggaacaggtgatcgaaaattaatggatatatacatatctcaaaacaatagatatttaaagccgttagcaaaagaagtgtttagaaatgagctacttagatggaatgaagagaatataaataagacaagtattaatattcaaacggatgagaagatgatcattacttttattgctaataaatttagaagcttctattcatctttgaatgataatttagattatgaacatattttttcaagaaaattatacaagctgcataaaggtaatgcaataatccctgctggatctttaggtaacatcatgttacttgactctggtattaatagaagaaaaaaagaaaaatttctttattcagcaatagatattgataaggcatctattacgggaactatagaaaatcagtatgttaacaacagtttttatccagataaaagaacaatagatactattgaaatagatataattgatgaaaaatatgatagtttaataaaaatgatcaaaaatcgtggtgataaattaatagaagaagttgttagagaattatataaataa

SEQ ID NO: 159 - DNA, 408 bp, Staphylococcus aureus
atggagctatctattttttacaatgggcaattttttgtagcattggtagaatataaaatggaaaataaatctaaatttatccaatacacatttgggaatgaacctgatgatatagaggtattggattttattcatcatcaattaatgaaaatgattgatgatgtgcaaactattgtttatacgaaaaatatttctagaaaagtaaacccgaaaaaactacaacgacaaattgctaaggagcaaaagaaacctaaatattctacccaagcacaaatagctattaagaaagaattagaattaaagaaaaagcaaaagcggaagcgctataaagaaaaacgtgatgcatttcaaaaaagaaaaagagaaattaaaaaggttaaagcaaaagagaagcataaggggcattag

SEQ ID NO: 160 - DNA, 492 bp, Staphylococcus aureus
gtggttgggatgattttaattagttcgtgtttgataggcgataatgtaagatacgatggtggtaatcaattgaatgttagattgaaaaaattaatagacagcggaaaagctattcacgcatgtccagaattacttggtggattattaattcctagagaacctgcagaaattattggtggcgatggttttgatgtatggaatgacgctgcaaaggttgttactatttcgaacaaagacgtaactgacgattataaacatggagcaatagttacattaaaaattttgaaaaaatatcaatgtgatacagttattttaaaagcaaatagcccatcatgtggatcacaagagatatatgatgggaattttacaggaaataagaaaaagggtgtaggtgtggcaactgctttactcattaatgaaggtataaaagtttatgatgaaaatacgttttttgaccaaaacatgaatgaaacgatagtacatgaaaagtaa

SEQ ID NO: 161 - DNA, 690 bp, Staphylococcus aureus
atggaaaaagtagccattttagtagatggtggatactatagaaagataagcgcaaaagtctacggaaaagttacagcgaaagaaagagctgacgagttatatagttattgcaatagacacttaaaagagacacatttcaaagaagaaatatataataaattatacagaatattttactatgattgtcctcctattgataagatagtttatcaccccttattaaaaaagaatgtaaatttttccaatactgatacgaaaaagtggacagaagactttttcaaagaaatgagcaaaaaaagaaaggtagcattgaggttaggagagttgagtgagtattcagttgaatacaacttaaaatactctattacaaaaaaattattaaatggaagtatcgatttaaatgatttgaaagaaaaagatttttccctatcattacaacaaaaaggtgttgatatgaaaataggtttagacatagcttcattatcatttaaacatcaagtagataaaattattttaatagctggtgatagcgattttgtacctgctgctaaactagcaagaacagaaggaattgattttgtattagattctttaggggcagatattagaaacaacttgtcattacacattgatggtaggcgtacttgtgatgaaaaatttaaattttatttaaatcaactatttaaataa

SEQ ID NO: 162 - DNA, 1122 bp, Staphylococcus aureus
atgaaaattatacatacagcagactggcacttagggaaaatattaaatggcaaacagcttttagaagatcaagcgtatattttagatatgttcgtagaaaaaatgaaagaagaagaacctgatatcattgtgatagctggagatttatatgacacaacatatccaagtaaagatgcaatcatgttattagaacaagcgattggaaagytraatttagaactgcgtataccaataattatkattagyggaaatcacgatggtaaagagagrttaaactatggggcgagttggtttgaamataatcagttatttataagaacagattttacatcgattaattcaccaatagagataaatggggttaatttttatacactcccttatgctactgtgagcgaaatgaaacactaytttgaagatgacaccattgaaacrcatcaacarggaattacgcgctgtattgaaacaatagcaccggaaattgatgaagrtgccrtcaatattttaattagtcatctgactgttcaaggtggaaagacatctgattctgaaagaccattaactattggaacggttgaatcagttcagaaaggtgtttttgatatatttgattatgtcatgctaggtcacttgcatcatccatttagtatagaagacgacaaaattaaatatagtggctccttattgcagtattcattttcggaagcgggtcaagcwaaagggtatagacgtktaacaattaatgatggcattattaacgatgtatttattcctcttaagccrcttagacaattggaaattatctcrggcgaatataatgatgttattaatgaaaaagttcatgtgaaaaataaagataattatttacattttaaacttaaaaatatgtctcatattactgatccaatgatgagtttaaaacaaatttatcctaatactttagcgctgacgaatgaaacttttarttayaatgaagaaaataatgctatagaaataagtgaaaaagatgacatgtcaatyatcgaaatgttttataamcatataactgataaagaattatcggatatccaatctaawaagataaaaaatattttagaaaacgaattgagaaaggaggattaa

SEQ ID NO: 163 - DNA, 1083 bp, Staphylococcus aureus
atgaaaatagcaattgtaggatcaggaaatggcgcagttacggcagcagtagatatggtgagcaaaggccacgatgttaaattatattgtcgtaatcaatctataagtaagtttcaaaacgcaatcgaaaagggcggatttgattttaataatgaaggtgatgaacgtttcgtaaaattcactgatattagtgatgatatggaatatgttttaaaagatgctgaaattgttcaagtgattattccatcttcatacatagartattatgctgatgtaatggcagagcatgtaactgataatcagttgatattcttcaacatggctgcagcaatggggtcaattcgttttatgaatgttttagaagatagacatattgaaacaaaaccacaaytagcrgaagctaatacgttgacgtatggtacgcgtgtcgattttgaaaatgcagcagttgatttatctctaaatgtacgtcgtatcttcttttcaacatatgatagaagctgtctaaatgattgttatgacaaagtttcaagtatttatgatcatttagtaaaagaggaaagcttaattaaaacaaatcttgaaaatggtaatcctgaagtgcatccaggrccaacattattgaatgtcggtcgyattgattatgctggygagttcgctttatataaagaaggaattactaaacatacagttagattacttcatgcaatcgaattagaacgtttraatttaggccgtagattaggttttgaattatcaacagctaaagaatcacgtattgaacgtggttatttagaacgtgataaagaagatgaaccattaaatcgtttgtttaatacaagcccagtattttcacaaattccaggaccaaatcatgtagaaagcagatatttaactgargatattgcatatggtttagtaytatggtcaagcttaggtcgtgttattgatgtaccgacaccaaatatagatgcagtaattgtmattgcatcaaccattttagagagagacttctttgaggaaggcttaacagttgaakmmattggyttagataagcttgatttagaaaaatatttaaaataa

SEQ ID NO: 164 - DNA, 699 bp, Staphylococcus aureus
atgaaattaaaagcgttagctaaagcaacattagtattgggattgttagctactggtgtaataacaacagaaagtcaaacagtaaaagcggcagaatcaactcaaggtcaacacaattataaatcattaaaatactactatagcaagccaagtatagagttaataaatgtagatggtctgtatagacaacatttaactgataaaggtgcatatgtatggaaaaatcttaaagattattatattgggctactaggtgaagatagtaagaaattcaaatcagatgtatacggggacctagatgcatttttagtcatagaagaagaacctgttaaaggaagacaatattcaattggcggtataagtaagacaaatagtaaagaatttaaagaaagagaagtcgatgttaaagtaacaagaaaagcagacagagatactacatcaactaaagatagtaaatttaaaattacaaaagaagaaatctcgttaaaagagttagattttaaattaagacaaaaattgatgaaagaagagaatttatacgatgcaattaaccatagaaaaggtaaaattgtagttaaaatggaagatgataagttttatactttcgaacttacaaaaaaattacaaccgcatcgcatgggtgacacgatagatggtaccaaaatcaaagaaattaatgttgagctagaatataaataa

SEQ ID NO: 165 - DNA, 3030 bp, Staphylococcus aureus
atgaaaccattacatttaaagttgaataatttcggcccctttttaaaagaagaaattgatttttctaaaattgataataatgaattgtttttaataagtggtaagactggatcgggtaaaacaatgatttttgatgcaatgacttatgccttgtttggtaaagcatcaactgaacaaagagaagaaaatgatttgagaagtcatttcgctgatggtaaacagccgatgtcagtaacrtttgaatttcaattaaatmatcgaatttataaagtgcatagacaaggcccttatatcaaagaaggtaatacaacaaaaacgaacgctaaatttgatgtatttgagatggtggatggcaagtatgaaattagagaaagtaaagtaatttcaggtacccaattcattattgaattattaggagtaaatgcagatcaattccgacaattgtttattttgcctcaaggtgaattcaaacgctttttaatatcaaacagtcgtgaaaagcaagggatattaagaacrctgtttgacagtgaaaaatttgaagctatacgagaaatattaaaagaagaastaaaaaaagaaaawgctcaaatcgagaatagatatcaacaaattgaccttttatggcaagaaattgaatcatttgatgatgacaawataaaaggcttattagrgsttgccactcarcagatagacaaaktgattgaaaatataccacttttacaagctaggtcgaaagaaatactagcatytgtaaatgaaagtaaagaaactgctattaaagamtwtgaaataatagaaaagaaaacaytagaaaataatatattaaaagataatattaaycaactcaacaaaaataaaattgatttcgttcaattgaamgarcaacaacctgaaatagasgraattgaagctaagttaaagttgttacaagatattacmaacctattgaattatattgaaaatagagaaaaaattgaaactaaaatygctaatagcaaaaaagatatttctraaaccaataataaaatattgaatcttgaktgtgataagcgaaacatagacaaagagaaaaraatgttagaagaaaayggagatttaattgaaagtaaaayctcttttattgataaaactagagtattatttaacgatattaataagtatcaacaaagttatctcaatattgaaygcttgakaactgagggtgaacaattagstgatgaattaaatratctaattraaggtttagaaamggtcgaagattcaataggtaataacsaaagtgattacgagaaaattatcgaactaaataatrcgataackaacataaataatgaaattaatrtaattaaagaaaatgaaaaagctaaagctgaattagataaactattaggtagtaagcaagagttagagaatcaaattaatgaagaaacawctayawtgaagaatctcgaaataaaattagatcrctacgataaawcaaaattggacttaaatgataaagaaagytttataagtgaaattaaatctgctgtaaakattggagatcaatgtccgatatgtggtaatgaaattcaggatttagggcatcatattgattttgacagtatygctaaacgtcaaaatgaaattaaagaaattgaagcaaatatccacrcwatraaatcgaatattgctgtrcataattctgaaattaaatttgttaatgaaaaaatatcgaatattaatattaaaacgcaaagtgatttytcactygaagtattgaataagcgtctgctagaaaatgaaaatgcattgaataatcaaagagakcttaataaatttatagaacaaatgaaagaagaaaaagataatytaacgttgcaaattcataataaacaattgcgtctaaataaaaatgaatctgagttgaaattatgtcgaratctcatcactgaatttgaaacactctcgaaatataataatatcactaattttgaggtggattataagaagtatgtwcaagatgtgaatcarcatcaagaacwctcaaassagattgaagataagttaatrcaattrtctcaaagaaagttaattgagcaaaataatctaaatcaytatgaaaawcaactagaaacttacaataatgacttagaattgaatgaacartctattgaaatggaaatgtcgaggctgaatttaactgayracaatgatataratgaaataatagcctggaggggcgagcaagaggaattagagcagaaaagggatacttataaaaaacgttatcatgaatttgaaatggaaatagctaggttagaatcattaacyaargataaagagttattggactctgataaattaaaagatgaatatgarcwaaaaaaagraaagatgaatacactgatagatgaatactctgctgttcattatcaatgtcaaaataatattaataaaacacaatctatagtttcgcatattaattacttaaatcaagaattaaaggatcaacaagaaatwtttcaattggctgarattgtcrgtggtaagaataacaaaaatcttacattggaaaacttygtcttaatttactatttagatcaaattattgcycaagcaaatctgagattagcracaatgtcagataatcgataccaactaattaggcgagaagcggtttctcatggtcttagtggcctagaaattgatgtatttgatttgcattcaaataagtctagacatattagctcgttatcaggtggagaaactttccaatcgtcgcttgcattagctttagggttaagygaaattgtacagcagcaatcaggaggtatttcactagaatcaatwtttattgatgaaggattcggtacattagatcaagaaacgcttgaaacagcgttagacactttrttaaatcttaaatcaactggtagaatggttgggattatttcacatgtgagcgaattgaaaaatagaatacctttagttttagaagtgaaatcagatcaatatcagagttcaacaagattcaaaagaaattaa

SEQ ID NO: 166 - DNA, 1125 bp, Staphylococcus aureus
atgaagatagcaattataggtgcaggcatcggtggattaacagctgctgcaytattacaagaacaaggtcatactattaaagtctttgaaaaaaatgagtcagttaaagaaattggcgctgggattggtatcggagataatgtgcttaaaaaactaggtaatcatgacttagctaaaggtattaaaaatgctgggcaaatcttatctacaatgacagtgttagatgacaaagatcgccygttaactacwgttaaattaaaaagtaatacattgaatgtgacgttaccacgycaaacwttaattgacattattaaatcttatgtaaaagatgaygyaatatttacaaatcatgaagtyacgcatatagataatgagacagataaagttaccatacatttcgcggaacaagaragtgaagcatttgatttatgtattggtgctgatggaattcattctaaagtgagacaatctgtaaatgctgacagtaaagtattatatcaagggtatacatgctttagaggtttaattgatgatattgatttaaarcatccrgattgtgcaaaagaatactggggaagaaaaggaagagtaggtattgttccgttattaaataatcaagcataytggttcattacaattaactcgaaggaaaacaatcataaatatagttcgtttggtaaacctcatttgcaagcatactttaatcactatccaaatgaagttagagagatcttrgacaaacaaagtgaaacaggtatcttattgcataatatttatgatttgaaaccactcaaatcttttgtttatggtcgtactattttactaggagatgcagcacatgcgacaacgcctaatatggggcaaggtgctggacaagcaatggaagatgctatcgtattagtaaattgttttaayrcatacgactttgaaaaagcattacagcgttatgataaaatacgtgtcaaacatactgcaaaagtaattaarcgttctagaaaaatcggtaaaattgcccaatatcgtagtcgtttakttgttgcagttagaaatcgtattatgaaaatgatgccaaatgcattagcagctggacaractaaattcttatataaatcgaaagaraartaa

SEQ ID NO: 167 - DNA, 1260 bp, Staphylococcus aureus
atgagtaatacacaaaagaaaaatgtgccagagttgaggttcccagggtttgaaggcgaatgggaagagaagaagttaggggaccttactaccaaaataggtagtggaaagactcccaaaggtggaagtgaaaactatacaaacaaaggcataccatttttaaggagtcaaaatattagaaatggtaaattaaatcttaatgacttagtttatattagtaaagatatagatgatgagatgaaaaatagtagaacgtactatggtgatgttcttttaaatattacaggagcatcaataggtagaacagccattaattcgatagttgaaatacatgctaatttaaatcaacatgtatgtattattagattgaaaaaagagtattattataatttttttggacagtatctattatcaagaaaaggtaaaaggaaaattttccttgcacaaagtggaggtagtcgagaaggactaaacttcaaagaaattgctaatttaaaaatcttcaccccaactatatttgaagagcagcaaaaaataggcgaattcatcagcaaacttgaccgacaaattgaattagaagaacaaaaacttgaattacttcagcaacagaaaaaaggctatatgcagaaaatcttctcgcaagaattgcgattcaaagatgaggaaggtaaagattatccagattggaaatcaaaatcaattcaagaaatatttgagaataagggtggcactgctctagaaacagaatttaattttgacggtaattataaagttataagtataggaagttattctataaatagcacttataatgatcaaaatataagagtcaataaaaataaaaaaactgaaaaatatattttatcaaaaggcgacttagcaatggtattaaatgataaaacaaaagatgggaaaattataggtagaagtatatttatagataaagataatcaatatatttataatcaaagaactgaaagattaataccatttgctgaaaatgataataaatttttatggttcttaatgaatacagatttaattagaaataaaataaaaggtatgatgcaaggagcaacccaagtttatataaattattcatctattaaattgatatctatacaattgccacttcttgaagaacaacagaaaataagagggtttctagaagttttatctggaataactactaaacaattgcacaagatagaccaattaaaagagaggaaaaaggcgtttttacagaaaatgtttatttga

SEQ ID NO: 168 - DNA, 693 bp, Staphylococcus aureus
atgaaattaaaaaatattgctaaagcaagtttagcactagggattttaacaacagggatgattacaactactgctcagccagtaaaagcaattgagcaaagcagattatcagttacttcaaaagatacacaagaattaaaaaaatactacagtggaacaggatataattttcaaaatgtgagtggttatagagaaggtaataaaatgaacattattgatggaccacaacttaatgtagttactttacttggcacagacaaagaaaggtttaaggacgatgaagattatgaaggacttgatgtatttgttgtaagagaagggtcaggtaaacacgcagataatatatcaattggtggaattacaaaaacaaataagaatcaatataaagaccctgtacaaaacgttaatttattgacttctaagagtaacggtcaaaatactgcttctgtgacttcagaatactatagcatcaataaagaagaaatttcattaaaagaacttgatttcaaactaagaaagcaattaattgataaacatgatctttataagacagagcctaaagacagcaaaattaaagtttctatgaaaaatggcggctactatacgtttgaattaaataaaaaattacagcctcatcgcatgggtgatacgattgatagtagaaatataaagaaaattgaagtgaatttataa

SEQ ID NO: 169 - DNA, 1488 bp, Staphylococcus aureus
atgagagaaaattttaaattacgtaaaatgaaagtcggtttagtatcagttgcaattactatgttatatatcatgacaaacggacaagctgaagcatctgaaactaatcagaaggtaagtacaaatcaagaatcaaaagctgtttcgcagactgaacaaaattccaaagaaacaaaagcggcagagtcttctaaaaactttgtaaatttagatcctatcaaaccaggagctcaaaaagtaacaggtactacattaccgaatcatattattttacttaatatagatggtaaaagtgctgattcagttgaaggaggatatggtgattttataactgcaaatgacaaaggagagtttgagtatcctttaaataatcgtaaaattgtccataaccaagaaattgaggtatcatcatcaagccctgatttaggtgacgatgaagaggatgaagaagtagaagaatcttcaactgaaaaagctggtgctgaggaagaaagtacagatgctaaagctacatatacaacaccacgatatgaaaaagcgtatgaaataccgaaagaacaactaaaagaaaaagatggacaccaccaagttttcatcgaaccaattactgaaggttcaggtattattaaaggtcatacgtctgtaaaaggtaaagttgctctatctattaataataaatttattaattttgaagaaagagctaaaggtggaattagtaaagaagatactaaagctagttccgatggtgtttggatgcctattaatgaaaaaggatattttgattttgatttcaaaaaaaatccttttgataacttagagttaaagaaaaatgatgaaatctcattaacatttgcacctgatgatgaagatgaagcattgaagtcattaattttcaaaactaaagtaacgagcttagaagatatcgataaagcagaaacaaaatatgaccatactaaagtggaaaaagtaaaagtattgaaagatgttaaagaagatatacatgtagatgaaatttacggaagcttatatcatacagaaaaaggtaaaggtattcttgataaacaaggaactaaagagattacagggaagactaaattcgcgaatgcagtagtgaaagtatattctgacttaggtgatgcgcaattgttccctgatattcaagtagatgaaaatggtaaatttagctttgatgctgaaaaagctggtttcagattgcaaaatggagaaacattgaattttgcagtagttaaacctattactggtgacctattacatcaaggatttgtctctaaatatattgatgtatatgaatctccggaagaaaagaaagaacgtgaatttgaagaaaaacttgaaaacacgcctgcatatcataaattacatggtgataaaattgtaggatatgatgttcaaggtaatccatcaacttggttctatccattaggtgaaaagaaagttgaacgtacaacacctaaattagaaaaataa

SEQ ID NO: 170 - DNA, 1503 bp, Staphylococcus aureus
atgagagaaaattttaaattacgtaaaatgaaagtcggtttagtatcagttgcaattactatgttatatatcatgacaaatggcgaagcagaagcatctgaaggtagccaaactgttaagaacccaaaggtgaatgcaactgaagaaatcaaagttggatcacaaccagttcaaaataatcaagaagtaagttcggaacaaacaaaaaagaattttgttaatttagaccccattaaacctggtgctcaaaaggtaacagggactactttacccagccatattattctaatgaatatagatggtaaaagtgctgattcagtagatggaggaaatagtgatttagtatttgctgatgaaaacggaagattcgagtatccactacacaatagaaaaattgttcataatcaagaaattgaggtttcgtcatccagtcctgatttaggtgatgatgaagaagatgaagaagtagaagaagattcaactgaaaaagctggtactgaggaagaaaacacagatgctaaagctacatacacaacaccacgatatgaaaaagcgtatgaaataccgaaagaacaactaaaagaaaaagatggacatcaccaagttttcatcgaacctattactgaaggttcaggtattattaaaggtcatacgtctgtaaaaggtaaagttgctctatctattaataataaatttattaattttgaagaaagagctaaagatggaattagtaaagaagatactaaagctagttccgatggtgtttggatgcctattaatgaaaaaggatattttgattttgatttcaaaaaaaatccttttgataacttagagttaaagaaaaatgatgaaatctcattaacatttgcacctgatgatgaagatgaagcattgaagtcattaattttcaaaactaaagtaacgagtttagaagatattgataaagcagaaactaaatatgaccatactaaagtggaaaaagtaaaagtattgaaagatgttaaagaagatttacatgtagatgaaatttatggaagtttgtaccatacagaacaaggtaaaggtattctcgataaacagggaactaaagaaattacaggtaagactaaattcgcgaatgcagtagtgaaagtatattctgacttaggtgatgcgcaactgtttcctgatattcaagtagatgaaaatggtaaatttagctttgatgctgaaaaagctggtttcagattacaaaatggagaaacattgaattttgcagtagttaaacctattactggtgagctattacatcaaggattcgtttctaagtatatcgatgtttatgaatctccggaagaaaagaaagaacgtgaatttgaagagaaacttgaaaacacgcctgcatatcataaattacatggtgataaaattgtcggctatgatgttcaaggtaatccatcaacttggttctatccattaggtgaaaagaaagttgaacgtaaggcaccaaaattagaaaaataa

SEQ ID NO: 171 - DNA, 1647 bp, Staphylococcus aureus
atgaattcttcttcaccagagaatccaaatggaaagaagtattcaccagtcttcatctatagtgcaattgttgttgctatagtcgtattacttggtgcatttttacctgaacaattcaactatgttaccaataatattaaaatgtggattacagaaaagttaggttggtattatcttattcttactacgattatcgtgttcttctgtatattccttatttttagtcctattggaaaacttaaactaggtaaaccaaatgacaaacctgagtttaatacaatttcatggtttgctatgttgtttagtgctggtatggggataggtttggtgttttatggtgcagctgaaccgatggcgcactttgctacgccacctacrgcagatcccaaaactactgaagcttatactgaagcyctacgttcaacatttttccattggggattccatgcttgggctgtttatggtgttgttgcgttagcgttggcatattcgcaattccgtaaaggtgaaccaggtttattatctagaactttacgtcctcttttaggtgataaagtagaaggtcctattgggatttttattgacgttttatctgtatttgcgacaatcgttggggtagcygtttcgttaggtatgggtgctctacaaattaatggtggtttacattacttgttcaatgttccaaacaatacgtttgtacaagcgattatcatcattgttgttactatcttatttatagcaagtgcatggtctggattaagtaaaggtattcaatacttaagtaacttgaacattggtttaggtactattttaatggtagctgctttaattgttggaccaactgttcttattttaaatatgttaactagctctacgggtagtttactaaacacattcttgtttaatagttttgatacagcwgctttaaatcctcaaaaacgtgaatggatgtcttcatggacactttattactggggttggtggttaagttggagyccattcgttggwgtgtttattgcacgagtttcaaaaggacgttcaattagagagttcatttctggtgtcttgctagttccagcaattgttagttttgtwtggtttagtgtctttggtgtattaggcatcgagacaggtaagaaayacaaagaaatttttgatatgactcctgaaacacagctatttggagtgtttaatcatgtgccatttggcatwgttttatcgttgattgcattattattaattgcatcattctttattacatctgctgactcagcaacatttgtattaggaatgcaaacaacatttggttcattaaatccatctagwatggtaaaagttgtttggggaatttcacaggccttaatagcatttgtacttttattagctggtggcggtaayggygctgaagctttaaatgcgattcaaagtgctgcaattataagtgcattcccattctcctttgtcgtcatactcatgatggtaagtttctacaaggatgcraaccaggaacgtaaattcctaggtttaacattgactccgaataaacaycgcttacaagaatatatcaagagtcaacaagaagattatgaatctgacattcttgaaaagcgtcagtcacgtagaaatatagagaaaaaagataactaa

SEQ ID NO: 172 - DNA, 639 bp, Staphylococcus aureus
atgcaacaagggaaaggtattgtacagacaaaagaagaggatggtaaatttgttgaagcaaataataatgaaattgctaaagcaatgactatttcacataaagacaatgatatgaagtatatggatatcacagaaaaagtgccaatgtcggaatctgaagttaaycaattgctaaaaggtaaggggattttagaaaatcgagggaaagtttttctagaagctcaagaaaaatatgaggttaatgtcatttatcttgttagccatgcattagtagaaacaggtaacggcaaatcagaattagcaaaaggcattaaagatggraaaaaacgctattacaacttttttggtataggagcattcgatagtagtgctgttcgtagtgggaaaagttatgctgaaaaggaacaatggacatcaccagataaggcgatwmttggtggtgcaaagttcattcgtaatgaatattttgaaaacaatcaactgaatttatatcaaatgcgatggaatccagaaaatcctgcgcaacatcaatatgcgagtgacattcgmtgggcagataaaattgccaaattaatggataaatcctataagcagtttggtataaagaaagatgatattagacaaacatattataaataa

SEQ ID NO: 173 - DNA, 1206 bp, Staphylococcus aureus
atgagtgaaaaaaagattttgattttatgtcagtatttttatccggaatatgtatcttcwgcgacgttaccaacwcaattggcggaagatttaattgcgaatcacattaatgtcgatgtcatgtgtggatggccatatgaatatagtaatcatmrasakrtwtctaaaaccgagatgcatcgtggwattygcattcgacgtctcaagtattcgagrtttaataacaaaagtaaggttggaaggatcatcaatttctttagtttattttcaaaattcgtgattaatatacctaaaatgttgaaatatgatcagattcttgtttactctaatccaccaatcttgccattaataccagacgtwytacacagaytgcttaagaaaaaatattcttttgtggtgtatgatatagcacctgataatgcgattaagacaggtgcaacwcgtccaggtagcatgattgataarctgatgcgttacattaataracatgtctayaagaatgctgaaaatgtcatwgtccttggtacggaaatgaaaaactacttactaaatcatcaaatttctaaaaatsctgacaatatycatgtgattcctaactggtatgacatgcgtcarttacaagacaatcrtatctataatgacacatttaaagcttaccgtgagcaatacgacaaaattttattgtatagcggtaatatggggcagttacaggatatggagacacttatytcatttttaaaattaaataaggatcagyctcaaacgttaacaatactttgtggtcatggtaagaaatttgcagatgtcaaaacggcaatagaagaccatcgtattgaaaatgttaaaatgtttgagtttttaacaggtacagactatgctgacgtattaaaaattgcggatgtatgtattgcatcgctgattaaagaaggcgtcggtttaggcgtkccgagcaagaattatggctaycttgcagctaagaarscgttggtactcatcatggataagcaatctgatatcgttcaacatgttgaacaatatgatgcgggtatccaaattgataatggcgatgmacatgccatttataacttcatcaacactcactcgagtaaggaattgcacgagatgggtgagcgcgcacatcaactgtttaaagataaatatacgagagaaattaatactatraagtattacaatctgttgaagtga

SEQ ID NO: 174 - DNA, 1215 bp, Staphylococcus aureus
atgtaccgatacaaaccacttttacaatcaatccacttacctaatggcatcaaaatttcgaatcgctttgtattatcaccaatgaccgtaaacrcatcaacaaaagaaggctatattacaaaagmagacttggcttatgctgcacgtcgctctaattcagctggwatgcaagtcaccggcgctgcttacattgaaccttatggtmaattgtttgaatayggctttaatattgatcatgatgcttgtatccctggattaactaacatggcatctacgatgaaacaacatggtagcctcgctattatycagctagcgcatgctggtcgtttttcaaatcaagcmattttaaattttggaaaggtgtatggaccaagycctatgacdttgcattcaccgattgaacacgwtgttatcgccatgtctcatgagaaaatcaatagcatcattcagcagtatcgcgatgctacattacgcgcgattaaagcaggttttgatggtgtggaaatttcgattgcacaacgtttgctgattcaaacatttttctcaactttttcraataracgtacagaccattacggtgccgactcattaaaaaatcgtgcaagattatgtttagaagttatgcgtgcggtacaagaagtgattgataaagaagcacctgacaattttattttaggatttcgagcaacgccagaagaaaccagaggyagtgatttaggatataccattgacgagttcaaycaattaatcrattgggtcatggacgtttcaaacatccaatayttagcaatcgctagctggggtcgacatatttatcaaaatacgtctcgtacaccaggtgawcatttcggtcgrccagttaaccaaattgtctatgaacatttagcwggtcgyatccctttaattgcaagtggcgggattaattctccagagtctgctttagatgctttacaacatgcagatatggtcggcatgtcttcgccttttgtcacagaacctgactttgtgcataaacttkctgaacagcgaccacatgatatyraycttgaattttctatggcagatttagaaratttagccattccrcrtgcygcttttaaagatattgttaaaatgatggattatggggaaggtctaaagaagcatacccgtgacgctttacgtcaattrgaacagaattatcatgacwcatcrtcwwaagataatttttcatag

SEQ ID NO: 175 - DNA, 2706 bp, Staphylococcus aureus
atggctgcaaattttaaagagcaatcaaaaaaacattttgacttgaatggccaaagttatacttactatgatttaaaagctgtagaagagcaaggtattactaaagtttcsaawttaccttattcaattcgtgttttgttagaatctttacttcgtcaagaagatgattttgtaattacagacgatcatattaaagctttaagtcagtttggaaaagatggaaatgaaggcgaggtaccatttaaaccttctcgtgttattttacaagatttcacaggtgtaccagccgtagttgatttagcttctttacgtaaagcaatggatgacgttgggggagatattactaaaattaatccagaagtaccggtggatttagttattgaccactcagttcaagtggatagctatgcaaayccagaagcwcttgaacgtaatatgaaattagaatttgaacgtaactatgaacgttatcagtttttaaattgggcaacgaaagcatttgataattacaatgcagttcctcctgcaactggaatagttcaccaagttaacytagaatatttagcaagtgttgtacatgttcgtgatgtagatggtgaaaaaactgcatttccagatacattagttggtactgattcacatacaacaatgataaatggtattggcgtactaggatggggtgttggtggtattgaagctgaagctggaatgcttggacaaccttcttatttcccaattccagaggttattggtgtacgactagtaaattcattaccacaaggcgcaacagcaactgatttagcgttragagtaactcaagagctacgtaaaaaaggtgttgttggyaaatttgtrgagttctttggtccaggtgtacaacatttaccactagcagaccgtgctacaatygcaaacatggcaccwgagtatggagcaacttgcggattcttcccagttgatgatgaatctcttaaatatatgaagttaactggtagatcagacgaacatatcgcgctwgtaaaagaatatttgaaacaaaaccatatgttctttgatgttgaraaagaagatcctaattatacagatgttatcgaattggatttatcaacagttgaagcatcgctttcaggaccaaaacgtcctcaagatttaattttcttaagtgatatgaaatcatcatttgaaaattctgtaacagctccagcrggcaaccaaggacacggtttagataaaagtgaatttgataagaaagcwgaaattaacttyaaagatggatcaaaagctacaatgaaaacaggtgatattgcaatagcagcaattacatcatgtacaaatacatctaacccttatgtaatgttaggtgcaggtttagttgctaaaaaagcagttgaaaaaggcttgaaagttcctgaatacgttaaaacttctctagcaccaggatcaaaagttgttaccggatatttaagagrtgctggcttacaaccytatttagatgatttaggcttcaacttggttggttatggatgtacaacttgtatyggtaattcaggtcctttattaccagaaattgaaaaagcgattgctgatgaggacctattagtgacatctgtattatctggtaaccgtaactttgaaggtcgtatccatcctcttgttaaagccaattacctagcttcaccacagttagttgttgcttatgcattagctggawcggttgatattgatttacaraatgaacctattggtaaaggtaatgacggtgaagatgtatatttgaaagatatttggccatcaattaaagaagtttcagataccgttgatagtgttgtaacacctgaattatttattgaagaatataataacgtatacaataacaacgaattatggaatgagattgatgtaactgatcaacctctatatgactttgatcctaattcaacatacattcaaaatccatcattcttccaaggattatctaaagaaccgggtacgattgttccrttaaatggtttacgtgttatgggtaaattcggtgattctgtgacaactgaccacatctctccagcaggtgcaattggtaaagatacgccagctggtaaatatttacaagatcaycaagtgcctattcgtgaatttaattcatatggttcaagacgtggtaatcacgaagtaatggttcgaggtacgtttgctaatatacgtattaaaaaccaattagcgccaggtactgaaggtggttttacaacttattggccaacaaatgaagtaatgcctatctttgatgctgcaatgaaatataaagaagatggtacaggtttagttgtattagctggtaacgattatggtatgggttcatctcgtgactgggcagcaaaaggtacaaacttattaggtgttaaaacrgttattgcacaaagttatgaacgtatccatcgttcaaatttagttatgatgggtgtattaccattagagtttaaaaaaggtgaatcagctgattctcttggtctagatggtacagaagaaatttctgttaatattgatgaaaatgttcaaccacatgactacgtcaaagttactgctaagaagcaagatggtgatttggtagaatttgacgctatggttcgttttgactcacttgttgaaatggattactatcgycacggtggwattttacaaatggttttaagaaataaattagcgcaataa

SEQ ID NO: 176 - DNA, 249 bp, Staphylococcus aureus
gtgcatattaattcgagaatgttaaaaacgtcagctgtaatttctaatacattattagtcataggtttagtctgtctatttatgatgaaattagtgttagctattactttttttgctgtttcattatcaattagtctagttgtctttaatatgatgttcagagatagaacaacgatgaaagtaatcgttaacgcttcttttttaatcgtaatattagcgattgtagtggcatattttttattgtctaag

SEQ ID NO: 177 - DNA, 1278 bp, Staphylococcus aureus
ttgggtagcccgcctacccttattatttttttaaaaaaatatagaacatacgttcttacaggaggtataaacatgtggttcgaaaaattcaaaaataaaaacaacgaaactaaatacagatactacgagaaatacaaagatccatacacagataaatggaagcgcgtaagtgttgtcttgaacaaaaatacaaaacaatcacaaaaagaggcaatgtttcgtttagaagaaaagataaaagaaaaactaaacaacaagtcgtcaagcgaattaaaaactttgacttttcacactctattagatgaatggcttgaatatcatataaaaacatcaggttcaaaggtgactactcttaataatatcaaaacgagggtcaaaaatataaaaaagaacagtgctaaagaattacttttaaacaagcttgatacaaaatacatgcaaatgtttattaataagttgtcaagcatctattctacaaatcaattaaggtaccaacttggacacatgaaagaagctattaaatacgcagttaaattctacgattacccaaatgaacatctactaaccggtgtcaaacttccaaagaaaagaaaaacgattgaagatattgaaaaagacgaagctaaaatgtacaactatcttgaattacaacaagtcattcaaatacgcgattttatattgaattataacagtttgcattacagaactcgtattttaattgctggtgctctagaagtacaagctttaacgggaatgcgtataggcgagttattagcacttcaaattaaagatgttgacctaaaaaataaaacaattgatattaacggaactcttcatagaattaaatgtaatactgggtttggatataaagatactacaaaaactacaggttcaaaaagaaacattaccatcaattccagaacagcaaaggttttaaaaaagataatgttagaaaataaaaagatgaaacaatggaaaccaagttatattgatagaggattcttattcacaactagtaaaggaaatcctttacaaattgataaaataaacaaacttttatctttagctgcagaatcattgaatataaataaaaaggtcactacccatactttaagacacacgcatataagtttattggtggaaatgaatgtatcgttaaaagcaattatgaaaagggttgggcataccgatgaaaaaacgaccataaaagtatacacccatgtaacggagaaaatggatagagaattagatcgaaaattagaaaagcttatatactaa

SEQ ID NO: 178 - DNA, 465 bp, Staphylococcus aureus
ttgggattatacgaagaactttgcataaataacgaaaaaataaagatagaagaaactgaccagcttccaaatttccaacctggatgctatatgaacggaaaaatttatataaggcgtaatttatcagaartacgtaaagcagaagtgttatatgaggaacttgcccaccacaagttgacgtatggcaacattttagaccaatcaaaatggattaatagaaaatttgaaaattatgcacgtagacayggytttayytcagctgtwccrytacrygaaattgtagaagctyayaaytayggygtwcgtaayttgtaygagttgtcwgagtatctrcarttragygaakmatacataytagaagckatagaacaatataaaaagatatayggtattggwacycactayggcgagtattctattacrtttgagccgttgagagtttttaaatwkmaksawattrattaa

SEQ ID NO: 179 - DNA, 330 bp, Staphylococcus aureus
atggagaataataaagtcagaaaaattttatctgaaaaccttcaagaacttatgaatgataaaaatattgatcagagagaacttgctgaagctattggagtttctcaacctacagtctccaattggattcaacaaactaaatatccacgaattaaaagaattcaacaacttgcagattacttcaatgtaccgaaatcaagaattactgaatcaaaaaaagatatacatcaagaaacaattgctgctcattttgataargagggattaactgaagaagagattgaagaagtaaatagattcattgaatgggttagaaatagagacaaataa

SEQ ID NO: 180 - DNA, 240 bp, Staphylococcus aureus
gtgataagtatacataagagattgctcactcaatatttagataaagaaatcgttacttctttagatttacatttaattaatggtgaagttattaaagtacaagaacatataaaagatgctgaaagcaaaactctacacatcattcatccaaaagatagagttgtcagtttagatcatgttttgtatttcgacattaacgttaaaggtgaaaagaataacgatagtccttatccatcttaa

SEQ ID NO: 181 - DNA, 468 bp, Staphylococcus aureus
atgatatatagtattacagaaatagaagcgcgttatgctgaaactgataagatgggtgtaatttatcacgggaattatgcaacttggtttgaagttgcgcggttggattatatatcgaagttaggttttagttatgctgatatggaaaaacaaggaatcatttcacctgtgactgacctcaatgtcaattataaaaagtctattttttatccagaaaaagttaaagttaaaacttgggttgaaaaatattcgagattacgttcagtgtataaatatgagatttttaatgaaaaaggtgaacttgcaactacaggttccacagaattgatttgcattaaagaagatacttttaagcctatacggttggatcgttatttcccagattggcatgaagcytatagtaaagtgcaarcgctcaataatgaagggaaaayagtagagataatggatgrtattgattctttataa

SEQ ID NO: 182 - DNA, 1998 bp, Staphylococcus aureus
ttggcaatgaataaacaaaataattattcagatgattcaatacaggttttagaggggttagaagcagttcgtaaaagacctggtatgtatattggatcaactgataaacggggattrcatcatctagtatatgaaattgtcgataactccgtcgatgaagtattgaatggttacggtaacgaaatagatgtaacaattaataaagatggtagtatttctatagaagataatggacgtggtatgccaacaggtatacataaatcaggtaaaccgacagtcgaagttatctttactgttttacatgcaggaggtaaatttggacaaggyggctataaaacttcaggtggtcttcacggygttggtgcttcagtkgtaaatgcattgagtgaatggcttgaagttgaaatccatcgagatggtartatatatcatcaaagttttaaaaacggtggttcgccatcttcwggtttagtgaaaaaaggtaaaactaagaaaacaggtaccaaagtaacatttaaacctgatgacacaatttttaaagcatctacatcatttaattttgatgttttaagygaacgactacaagagtctgcgttcttattgaaaaatttaaaaataacgcttaatgatttacgcagtggtaaagagcgtcaagagcattaccattatgaagaaggaatcaaagartttgttagttatgtcaatgaaggaaaagaagttttgcatgacgtggctacattttcaggtgaagcaaatggtatagaggtagacgtagctttccaatataatgatcaatattcagaaagtattttaagttttgtaaataatgtacgtactaaagatggtggtacacatgaagttggttttaaaacagcaatgacacgygtatttaatgattatgcacgtcgtattaatgaacttaaaacaaaagataaaaacttagayggtaatgatattcgtgaaggtttaacagctgttgtgtctgtwcgtattccagaagaattaytrcaatttgaaggacaaacgaaatctaaattgggtacttctgaagcwagaagtgctgttgattcagtwgttgcagacaaattrccattctatttagaagaaaaaggacaattgtctaaatcmcttgtraaaaaagcrattaaagcacaacaagcaagggaagctgcacgtaaagctcgtgaagatgctcgttcaggtaagaaaaacaagcgtaaagacactttgctatctggtaaattaacacctgcacaaagtaaaaayacwgawaaaaatgaattgtatttagtcgaaggtgattctgcgggaggttcagcaaaacttggacgagaccgcaaattccaagcgatattaccattacgtggtaaggtaattaatacagagaaagcacgtctrgaagatatttttaaaaatgaagaaattaatacaattatccacacaatcggggcaggcgttggtactgactttaaaattgaagatagtaaytataatcgtgtaattattatgactgatgctgatactgatggtgcgcatattcaagtgctattgttaacattcttcttcaaatatatgaaaccgcttgttcaagcagrtcgtgtatttattgctttacctccactttataaattggaaaaaggtaaaggcaaaacaaagcgagttgaatacgcttggacagacgaagagcttaataaattrcaaaaagaacttggtaarggcttcacgttacaacgttacaaaggtttgggtgaratgaaccctgarcaattatgggaaacgacgatgaacccagaaacacgaactttaattcgtgtacaagttgaagatgaagtgcgttcatctaaacgtgtaacaacattaatgggtgacaaagtacaacctagacgtgaatggattgaaaagcatkttgagtttggtatgcaagaggaccaaagtattttagataattctgaagtacaagtgcttgaaaatgatcaatttgatgaggaggaaatctag

SEQ ID NO: 183 - DNA, 2955 bp, Staphylococcus aureus
atgcaagaacatttggtggtyacrcttgatggwaaagattatcttgtagaaccaggtacraatttacttgaattyattaaatcrcaagatacttttgtrccttcaatttgttataacgartcratgggaccratwcaaacrtgtgatacatgtacwgttgarattgayggtaaaattgaacgttcatgtagtacrgtgattgatcgtccaatgacwgtaaatacwgtgaayaatgaygtgaaagatgctcaaaaagaagcgcttgatcgaattttagaaaagcatatgctgtattgtacagtatgtgattataataatggtgattgtgaaattcataatacgatggatgcatgggggcttcagcatcaaacgtatgaatataaagagaagccataygaaaargattayggcccattttatcgytatgatccaaatcaatgtatcttatgtggscgttgtgtagaagcrtgtcaagatatygaaktraatgaaacwattagaattgattgggatcgtgarcatccacgtgtyatttgggataatgatgtaccrattaatgartcktcatgtgtatcttgtggtcaatgygcrackgtatgyccatgtaatgcsatgatggaagtkaayatggaaggtaatgcrggttatatgactgatacggaacctggttcattagcrgcaatgattgatttaactaaaaaagcagaacctggttatggtccactatttgcaatctcagattcagaagcagaaatgcgtaaagagcgtattaagaaaactaaaacagtgtgtacwtattgtggtgtgggytgttcatttgaagtttggactaaagatagagaaattttaaaagtacaaccatcacatgattctccagcaaataaaattgyracttgtgttaaaggtaagttttcatggggacatattaattcagatcaacgmttaackaaaccaytagtaaggaaaaatggtgagttccatgaagtagaatgggatgaagcwttaaaygtcattgcagataattttacakctattaaagaaaagyatggyccagatgcaytatcattcatttcttcttctaaagcgacgaatgaagaatcgtatttaatgcaaaaattagcaagacaagttattggmacaaataacgttgataactgttcaagatattgccaagcacctgcaacaaaaggcttatttagaacggttggacacggcggtgactcaggtagtattgaagatytagaaaaagcrgcaatgtctgtattgatwggtacbaatacagcygaagcwcayccrgttatygcatcacgcatgaarcgtgcwcaaaaattatttggwcaaaaaatacatgtrtttgatattagaaaacatgaaatggcwgaacgygcrgatcgtttttatcaacckaaaccaggtacrgatttrgcktggttaagygcagtgackaartatatyattgatcatgayttacacgataaagcmtttatygawgagtgggtwgawgattttgatgaatattacaartcattagaaacatttacaatggcwttygctgaagargcwacwggtattccwgaakcagarttgattaarttygctgaagaatgtgcyaaagctgartcygttgtmatttgttgggcaatgggtatyacacaacaagacattggwagtgaytcaagtacagcratttcaaacttattattagtwacwggwaattatcgtcgwcctggtacwggygcgtatccattacgtggacataataatgttcaaggwtgtagtgatatrggwagtatgcctgataarattactggytatcaaagtattgaagcggaygatattcgcgctaaattygaaaaagaatatggcgttaaattgaatccraaagctggtaaagataatcatgaaatggtwgaaggtatmcatgayggrsaartwcactcattrtayytatatggwgaagatackggtattgtrgattcaaatattaattttgtacaagctgcktttgaaaaattagatttcatggtagtccaagatgaatttttaacattcacagcaacataygcagatgttgtmttgccagcaagtccttcaytwgaaaaagayggtacttttacaaatacmgarcgwcgtattcaacgtttataccaagcattrraaccwytwggtgattcwaaacctgactggaaaatwttccaagcaattgctaatarattargwttygattggaattacaarcatccwagygaaattatggatgaartwgcwmgmytaacaccwytatatgctggsgtaagytaygawcgtttagaaggattyaatagtttacaatggccwgtrcawccwgatggtacwgatgarccwatwctwtayttagaaggattyaatttygataatggtaaagcaaaattattcccattatcatttgataattactttaagcaagatgaartttatgatattcatgtaaacaatggtcgattgttagagcacttccaygaaggtaayatgacwtatcaaacaccaatgmttaaatacaaagtgccacgtgcatttgttgaaatttctccagarcttgctgaagatagaggcattcatgaaggtgcagaagttaagytgatwtctgaaacaggagaagcggtattacaagttcacgtgacagatcgtgttaaaggtaaagaaatctatattccattaaataatgatgcgatggaaaatggagatctaggygcaattaacttattaactaatagtgatgttgatcaatacacggatacaccatcttataaacgtacwagctgtcgtwtggaggtaattacgaaacgtggtaagtcaccgttgaaccctaataatttccgtgtcaataaaaaacgtcawccgcagtacagtgttcaagtacagaaaaaatgggaacgtycagattatgttttcccgggaaatcaggtggataaataa

SEQ ID NO: 184 - DNA, 2403 bp, Staphylococcus aureus
gtgagtgaaataattcaagatttatcacttgaagatgttttaggtgatcgctttggaagatatagtaaatatattattcaagagcgtgcattgccagatgttcgtgatggtttaaaaccagtacaacgtcgtattttataygcaatgtattcaagtggtaatacacacgataaaaatttccgtaaaagtgcgaaaacagtcggtgatgttattggtcaatatcatccacatggagactyctcagtgtacraagcaatggtccgtttaagtcaagactggaagttacgacatgtcttaatagaaatgcatggtaataatggtagtatcgataatgatccrccagcggcaatgcgttacactgaagctaagttaagcttactagctgaagagttattacgtgatattaataaagagacagtttcyttcattycaaactatgatgatacgacrctcgaaccaatggtattgccatcaagatttcctaacttactagtgaatggttctacaggtatatctgcaggttacgcgacagatataccaccacataatttagctgaagtgattcaagcaacacttaaatatattgataatccggatattacagtcaatcaattaatgaaatatattaaaggtcctgattttccaactggyggtattattcaaggtattgatggtattaaaaaagcttatgaatcaggtaaaggtagaattatagttcgttctaaagttgaagaagaaactttacgcaatggacgtaaacagttaattattactgaaattccatatgaagtgaacaaargtagcttagtaaaacgtatcgatgaattacgtgctgacaaaaaagtcgatggtatcgttgaagtacgtgatgaaactgatagaactggtttacgaatagcaattgaattgaaaaaagatgtgaacagtgaatcaatcaaaaattatctttataaaaactctgatttacagatttcatataatttcaacatggtcgctattagtgatggtcgtccaaaattgatgggtattcgtcaaattatagatagttatttraatcaycaaattgaggttgttgcaaatagaacgaagtttgaattagataatgcwgaaaaacgyatgcatatcgttgaaggtttgattaaagcgttgtcaattttagataaagtaatygaattgattcgtagctctaaaaacaagcgtgacgctaaagaaaaccttatcgaagtatwcgagttcacagaagaacaggctgaagcaattgtaatgttacagttatatcgtttaacaaayactgayatagttgcgcttgaaggtgaacataaagaacttgaagcattaatcaaacaattacgtcatattcttgataaccatgatgcattattgaatgtcatmaaagaagaattgaatgaaattaaaaagaaattcaaatctgaacgactgtctttaattgaagcagaaattgaagaaattaaaattgacaaagaagttatggtgcctagtgaagaagttattttaagtatgacacgtcatggatatattaaacgtacttctattcgtagctwtaatgctagcggtgttgargatattggtttaaaagatggtgacagtttacttaaacatcaagaagtaaatacgcaagataccgtactagtatttacaaataaaggtcgttatctatttataccrgttcataaattassagatattcgttggaaagaattgggrcaacatgtatcacaaatagttcctatcgaagaagatgaagtggttattaatgtctwtaatgaaaaggactttaatacwgatgcattttatgtttttgcgactcaaaatggcatgattaagaaaagtacagtgcctctatttaaaacaacgcgttttaataaacctttaattgcwactaaagttaaagaaaatgatgatttgattagtgttatgcgctttgaaaaagatcaattaattaccrtmattacwaataaaggtatgtcwttaacktataatacaagtgaactatcagatacyggattaagggcrgctggtgttaaatcaataaatcttaaagywgaagatttcgttgttrtgacagaaggtgtttctgaaaatgatactatattgatggccacacaacgcggctcgttaaaacgtattagttttaaaatcttacaagttgctaaaagagcacaacgtggaataactttattaaaagaattaaagaaaaatccacatcgtatwgtagctgcacatgtagtgacaggtgaacatagtcaatatacattatattcaaaatcaaaygaagaacatggtttaattaatgatattcataaatctgaacaatatacaaatggctcattcattgtagatacmgatgattttggtgaagtaatagacatgtatattagctaa

SEQ ID NO: 185 - DNA, 954 bp, Staphylococcus aureus
gtgggattgaaacgttcgtctaaaagtaaaatgagcctaccgaaaaaaatatttttatgggtattcggtattttagtaatcttagcgattgtagctgttgtgtatgtagctgctaaaatttttattactggtaataagatacacaatccgttagatcgyaatcattcagaattaagagataaaaaagtgagtttaarcratggtgatccattcacaatcgctttatttggtgtcgattcagatgctgatcgtaagaaaaagggtggcgragagcgtagtgatagtattatgattttatctatcaaccctaaaacraagaaaactgaaatagtaagtataccgcgtgatacaagagcggaaattgttggccgtggtactactgaaaaaattgcacatgcctatgcatatggtggaccaaatatggctgttaaatcacttgaaaaattratgaatgtgccaattgatcattatgcgacaatcgatatggatggtttgcataatatgatagatagyatcggcggtgttgatgtagtaagtaatgatacattcactgttgatggtgttcgttttacaaaaggacagcaracacatgtaaatggtgatcaagcattgaagtttattagaagtcgtaaagaagaaggtgctggtggtgactttggtcgacaacaacgtcagcaaattgtrcttgaagcgatggcyaataagattgcaagyccatcatcgattacacattttaatagtctaatgaatgaaattcaaaataatgttaaaacagatttaacattaggtgatttgaatacgattagaagcaattataaagatgctaatgacacrattaataaacatcaattgagtggtcaaggcggcattcaaagtgacggattgtactacttcattcctagtgagcagtcaaaagctgaaagtactaagttattaaaagataatctagagtag

SEQ ID NO: 186 - DNA, 135 bp, Staphylococcus aureus
atgattaaagtaacgataagtaaaactaaaggaatcgttacaattgctgatattaagaataagaaacctgacaagattcttatattcatagatatgagagctaaaaatgaaatcaacaaacaaacaataaagtaa

SEQ ID NO: 187 - DNA, 1476 bp, Staphylococcus aureus
ttgaaagatttcgatagtttaatwcctggatggtttaaagaatttgtccatgttggtaccgatttaatatggtctcaatatttaattggtctattattgacagctggattcttctttacrattagttctaaattcgtycaattacgaatgttacctgaaatgtttagagctttagtagaacgtccagaaactttagaagatggtaagaagggtatttcgccattccaagcatttgcgattagtgctggttcgagagttggtactggtaatattgctggtgttgcgactgcgattgttttaggyggtccaggtgcagtrttttggatgtgggttattgcatttataggtgcagcgagtgcatttatagaagcgactttggctcaggtttataaagtacatgataaagatggtggattccgtggtggtccagcttactatattactaaaggtttaaatcaaaaatggctaggtatcgtatttgcgattttaattacaattacatttgcatttgtatttaacacagtgcaatctaatacaattgcggagtcgttaaatacgcaatataatattagtccagtaatcacaggtattattttagcaatcgtaacwgctattattatatttggtggtgtacgtagtattgctacgttatcttcgttaattgtaccgattatggctatyatttacattggtatggttttagtaatattgctatttaatttagatcaaattgttcctatgataggtacgattattaaaagtgcatttggtatcgaacaagtaactggtggcgctgtaggtgctgcggttcttcaaggtatyaaacgtggtttattctctaaygaagctggtatgggttctgcgccgaatgcagcggcaactgctgcmgtrccacaccckgtyaagcaaggtttaatccaatcattaggtgtgttctttgatacaatgttggtttgtacagcaactgcaatcatgattttaytatattcaggaytgaaatttggtgataacgcacctcaaggtgttgcagttacycaatcagcacttaatgarcatttaggttctgctggaggtattttcttaacaatagcagttacaytrttygcmttttcatctgtkgtaggtaattactattacggtcaatctaatattgaatttttatcaacaaaycgtgtratattatttatytttagatgtyttgttgtagtacttgtctttgtcggtgcagttgtaaaaacagaaacagtatggaatacrgcagacttatttatgggcttaatggcaattgtaaacattatttccattataggactgtccaatgtagcttttgcattgatgaaagattatcaaaagcagaaaaaagaaggcaagaaycctgtytttaaacctgaaaacttagaaattaacttatttggaattagtgcttggggcgctaacaaatataagaactctgataaayaaatatttttaatgtaa

SEQ ID NO: 188 - DNA, 798 bp, Staphylococcus aureus
atgacagataaaacattacagcaaatagataagttaatatgttcgtggttgaaacaaatagacaatgtkattccrcaattaattatggaratgactacagaaacyaagcgtcatcgatttgatttagttacaaatgtagataaacagattcaacaacaattycaacaatttttagcaacayattttccggaacaccaactattagcggaagaaaaaagtaatgmaatgattacgaatgaaattaatcatttatggattatggatcccattgatggaactgccaatttagtaaaacagcaagaagattattgtattatattggcgtatttttatgaaggtaaaccaatgttatcgtacgtatatgattatccgcataaaaagctttataaagcaatacgaggagaaggtgctttttgtaatggawttaagatggaagaaccaccatcgttaaaattggaagacgctattatatcgtttaatgcacaagtgatgaatctrgatacggtgcaagatttatttgacgcctcatttagttatcgtttagttggtgcttgcggattagattctatgcgagtggcaaaaggtcaatttggggcacatattaatacaaatcctaaaccttgggacattgctgcacagtttttatttgcagaactattgaatctaaaaatgacractttagatggtaaggcaattgatcatttaaagggtgcaccttttattataagtaataaagcatgtcatgaaacggtacttaaaattttaaatgcaaatggtggttatcaaaaatacagatag

SEQ ID NO: 189 - DNA, 399 bp, Staphylococcus aureus
atgaaaaaaaatatcacaaaagtaattattgcatctacagtcatcgctacaggtcttctaactcaaactaatgatgctaaggcgttctttagttatgaatggaaaggtttagaaatcgctaaaaatttagcagaccaagctaaaaaggacgatgaacgtgctgataaattaataaaagaagccgatgaaaaaaacgaacactataaaggtaaaactgttgaagacttatatgtaatagctaaaaagatgggtaaaggcaatacaatagctgtagtaaaaatcaaagacggtggtaaaaatggttattataccttcgatatcactcgcccattagaagaacatagaaaaaatattccagtggttaaaaacggcgaaatcgattcgattacttggtattaa

SEQ ID NO: 190 - DNA, 852 bp, Staphylococcus aureus
atgggagaatatattgttactaaaacattgaacaacaatgtcgtagtatgtactaataatgatcaagaagttattttaatcggtaaaggtattggttttaacaaaaaagagggaatgrcgttaaacgaccaaactattacaatagagaaaatttataaattagaragtgarcaacaaaaagcacattataaaagtttagttgaaatcgctgatgataatgtattacaagtaattattgattcgttgaattttatttctaatactgcgatgaatgttgattcaaaacaacttgtagtttcattaacggatcatattatatttgcttataaacgcttaaaacaaaatcaagttattagyaatccatttgttatggaaactatgcagttatatagtgatgcatatcatattgctaaacaggtrattgatcagttaaatgcagcattagatgtrcattttcctgaagatgagataggatttattgcattacatattgcatctaayacagaagatttatctatgcatgagatgaccttgatcaataatgttattaaaaaaggtatagatatcattgaatcagaccttgtgacaactgttgataaggaatcattacaataccaacgttttataagrcaygtacaatttttaattcgccgattaagaagaaaagaatatatacatgcacaagatgattttgtgtctatgattaaaaatcactatccgatttgctataacacagcatataaaattttaactatgatacaaaaacaatttgatgttaatatcagtgagtctgaaattatatatttaacattacacattcatcattttgaagaaaggattaatcaatcctaa

SEQ ID NO: 191 - DNA, 738 bp, Staphylococcus aureus
gtggaaaatgaaaaaaagaaatacacgtttaaagatatagcatggagagatttgcttataattccaattataggtgttatattttatgcactcacaattgcagcttacataggaccaattttgtttggttattatgaaatcgatagtaatctgatatttgtagcgactatcacacaagctttagcatatacgattgggattggcgcattttatttatttcatttaaaagtgatgccatcaaggcttcgagctggttttgcgtatatcaaaaaatattggcttagattgtcaataacgtatattattgctctcatcttaatttatacatatgaatatatgacacagtttctacctaaacatttgcaatatagtgaaacagccaatgaacttgagctaaataaaatgtttgaagtgcctgcatttttacctgtagcattcttattaattgtgattgtaggtccaatagttgaagaaatcgtatttagacatattttaattggagaattaggtaagaagtttaattttatagctatgagtattgtttcggtgttcttatttgcatttattcatgtgactgatgcaaagtcgccgtttgagtttggtccatatctcatactatccatcatattagttttcacttatwtaaaatctggaagaaacctaggttcaacaattgcattacatatagcaaataattttgtttctttcgttatatcagtaataagtatttatgcgtag

SEQ ID NO: 192 - DNA, 168 bp, Staphylococcus aureus
ttgaagaaaggattaatcaatcctaaattaagtgtattacacgggcgtttcgttactgtaaagggtatttgtatggtatcattgatgttagtaattttacataagtggactgtttttatacaacatcttatgaatattttaagtggtggtgaatctataattgaatga

SEQ ID NO: 193 - DNA, 1380 bp, Staphylococcus aureus
atggagaacaatgaactacaaaggggattgagtgcccgtcaaattcaaatgattgcacttggtggtacgattggcgtggggcttttcatgggtgcsacaagtacaattaaatggacaggcccatcagttatccttgcatatttaattgcgggtatctttttatttttaatcatgagagcaatgggggaaatgatttatttaaaccctacaacaggatcatttgcaacatttgcaagtgattatatacatcctgcagcaggttatatgacagcatggagtaatatattccaatggattgtwgttggtatgagtgaggtcatcgcagtaggagaatatatgaagttttggttcccggaattgccaacttggattcctggtgttattgctattttattattaatggcagcgaatttattctcggtaaaagcgtttggagaatttgaattttggtttgctttaattaaagttgtaacaattattttaatgattattgctggttttggtcttattttctttggttttggaaatggtggccatgcggtaggtatttctaatytatggacaaatggcggatttatgccaaatggtattgttggyttcttctttgcattatcaattgtaattggttcataccaaggtgtggaactgataggtattackgcaggtgaaactaaagatcctcagaaaaatatcgttaaagcagtgaatggtgtwatctggagaattttaattttctatttaggygctatttttgttattgtttcwgtgtatccttggaatcaattaggagacattggaagtccgtttgttgcaacatttgctaaaatcggtattacatttgcagctggattaattaactttgttgtattaactgcagcaatgtcaggatgtaactcaggtattttcagtgcgagtcgtatgatttatacacttgctcataaaggtgaaatgccraaaatatttactaaaatmatgagaaatggtgtrccattgtacactgttrtwgcagtatctcttggtattttaattggtgctttattaaaygtaattttacctttatatatcgatggagcgaagagtattttcgtatacgtwtatagtgcgtctattttaccaggtatgattccttggtttatgattttattcagtcayttacgttttagaaaattacayccwgaagaaktggaaggtcacccattcaaaatgcctggtggcgcagtaastaactayttaacaatmttattcttaatattagtattggtyggtatggtatttaatgttgaaactagaatatcagtgctwattggtgtcatcttcttaacgattgtaacgatttattaytttattagatataataaaaataatgtaaaagcaaaatag

SEQ ID NO: 194 - DNA, 1209 bp, Staphylococcus aureus
ttgaatgaaaatgaaaagaatataagaaagaaytttttaaaatttaccgaatcacggtatatgaagtttgttggtgggaatgatttagtcttctcattaatagcrctagtattgttgggtattgttatttttattttcgaaaaagtatcataygtttttgatccttttatcatcgtttttaagacgatagcagcacctatcatcgtctctttaattctattctatctatttaacccaatcgtaaatatgatggarcgttatagaataccaagagttgcaggtatttctattatttatctagctgtagtaggtgttattacgttaattgttaatttattgatacctattattggttcgcaagtagatagtttagttaaaaattcaccgcaatatctagaaaaattaattaattctattgataaaatagcaaataatacgtttttctcttcgtattatagtcaaattaatgattggttaaattctttacctaagaaaataccatctatgttaagtgaatttacagatggctttgggtctaaaattgcaacgtttgcagaaacgattgctaatattggcgttgtgattgtcacaacaccatttgtactattctttatgcttaaagatggacatcacttcaaagaattttcaacgaatattatgccaccgaaattccgaaaagattttcatgatctacttgaaaaaatgagtgttcaagttggttcatacattcaaggacaaattatcgtttcattctgtatcggtatactgttgtttatcggttattcggttatcgggttgaaatatagcttagtattagctagtattgckgcagttacaagtgttgtrccatatttagggcctactatagcgatttcwccagctattgtmatagctgctataacatcgccgtggatgctcttaaaattagcagtagtatggactttagtacaatttgttgaagggcacttcatttcaccaaatatcatgggtaaaacacttaagattcatccacttacaatcattttcattttactgtgtgcaggcaaattgcttggtattgtaggcgttattttaggtattccgggatatgctattttaaaagtattagttactcatttattccaattatttaaacgtcgatacaatcgtttctatggtaatgatgtaggtgaatatgatattaaagaaagtaataaaatagttgaataa

SEQ ID NO: 195 - DNA, 192 bp, Staphylococcus aureus
atgatgggttacattatattgttttttctagctggtccagtaattttaggcgttggaaatttggtgattggtcctatatttaacaaacagacaccatttcgcgtgcaagtaagatcttttgttgttggttcaatgatttacttaatactcgcaayaattggctattttttactattacaaggtaaactttaa

SEQ ID NO: 196 - DNA, 2523 bp, Staphylococcus aureus
atgaatcaggaagttaaaaacaaaatattttcaatcttaaaaattacgtttgctacagctttatttatttttgtagyaatcacrttgtatcgrgagttatctggkattaactttaaagatackttggttgaatttagtaaratyaaccgtatgtccytwgtbttaytatttattggtggtggggcatcgcttgttattctmtcaatgtatgatgtgattttatctagagctttaaaaatggatatwtcmttaggmaaagttttaagagtaagttatatcatyaatgcattraatgcgattgtaggyttyggtggctttattggtgcmggygtwagagcwatggtttayaaaaactatacgcatgataaaaagaaattrgttcactttatwtcmttaatactkatttcaatgttgacaggtttaagyttrttatcattgytaatygtattccatgttttygatgcatcwttaatyttarataarattacrtgggtragatgggtaytwtatgywgtgtcrttkttcttaccattattyattatwtattcaatggttagaccrccygataaaaacaatcgttwtgtaggmttgtaytgyacwttagtgtcrtgtgtkgaatggttagcmgctgcagttgtattatayttctgtggtgtmatwgttgacgyycatgtmtcattyatgtcmtttattgcaatattyatyattgctgcattatcwggwttagtcagctttattccwggtggtttyggygcyttcgayttagttgtwttaytaggmtttaaaackttaggtgtmcctsargaaaaagtattattaatgctactwctwtatcgytttgcgtactatttygtaccrgtrattattgcattaatyytwtcatcatttgartttggtacwtcagctaagaartayattgarggatctaaatayttyattcckgctaaagatgtkacrtcrtttttaatgtcktatcaaaargatattattgctaaaatwccatyattatcattrgcaattttagtattctttacaagtatgatyttytttgtaaataayttracgattgtwtacgatgctttatatgatggmaatcayttaacgtattatmttytattggcaatwcatacwagtgcytgtttattacttttactkaatgtwgtwggtatttataarcaaagtagacgtgccatyatytwtgcwatgatttcrattwtmttaatyaywgtsgcgacrttmttcacttaygcktcatayattttaataacwtggttagytattatytttgytytrcttattgtwgctttccgtagagcacgtaggttraaacgyccartwmgaatgagaaatmtagthgcaatgcttttrttcagywtatttatwytmtayrtyaaccatatatttatwgctggaacrttwtatgcwttagatrtttatacratygaaatgcatacrtctgtaytkmrmtattayttctggmttacsattttaatyatcgcwatyatyrtwggtryrattgcrtggttrttygattatcaatttagyaaagtrcgyatwtcttctaawattgaagaktgcgargagattattratcartayggyggkaattatttragtcayttratwtatagtggtgayaarcagttyttyactaatgaarataaaamwgcatttttaatgtatcgytataaagcaagttcrttagtrgttcttggmgatccrwtmggtgatgaaaatgcctttgatgaattgttagaagcattctataattacgctgagtatttaggctatgatgttatattctatcaagttacagatcaacacatgcctttatatcataatttcggyaaccaatttttcaaattaggtgaagaagcaattattgatttaacgcaattttcaacttcaggtaaaaaacgccgtggatttagagcgactttaaayaaattcgatgaacttaatatttcrttcgaaattattgaaccaccgttttcaactgaatttataaatgarcttcaacatgtmagtgatttrtggytagataatcgtcaggaaatgcatttctctgtkggtsaatttaatgaarmatayttatctaaagcgccaattggtgtratgcgmaatgaarawaatgaagtaattgcattytgtagtttaatgccaacatactttaatgatgccatttcagtcgatttaattagatggttgccagagttagatttaccrttaatggatggwytatacttgcayatgttactttggagtaaagaacaaggttatacaaaatttaatatgggtatggcaacgttatcgaacgttggtcaattgcattattcatatttaagagaamgacttgcaggycgtgtctttgaacatttcaacggtctatatcgtttccaaggattacgtcgttataaatctaaatataatccgaattgggaaccacgctttttagtttatcgtaaagataattcgctttgggaatcactttctaaagtaatgcgtgtaatacgtcacaaataa

SEQ ID NO: 197 - DNA, 636 bp, Staphylococcus aureus
atgtatagagcagttatatttgatttcgatggaacaataatagatacggaacaacatttatttaatgttattaataaacatttagagatgcataatgccgatcctataagcattgatttttatcgttcttctattggaggagcagctacagatttgcatgaccatttaattaaagcgattggttcggaaaataaagataaactttatgaagaacatcatcttactagtacaacattaccgatgattgatacgattaaatcattgatggcatttttaaagcaacgtcacattcctatggcrattgccacaagtagtgtgaaagcggaaataatgccyacctttaaagcattaggtctagaygaktatatagaggtagttgttggtagagaagatgttgaacaagttaaacctgaycctgaattatatttatctgcagtacaacaattaaattatatgcckacacaatgtttggctattgaagattctgtaaatggtgcaacagccgcgattgcagctggattagatgttattgttaatacgaataaaatgacaagcgcacaggacttttctaatgtagattatgtagcaaaagatattgattacgatcaaattgtagcgcgtttctttacgaaatag

SEQ ID NO: 198 - DNA, 984 bp, Staphylococcus aureus
atggataaagaaactaatgacaacgaatatagacgtcaaagtgaacatcgcacttcggcgcctaagcgaaaaaagaagaagaaaattaggaaattacctatcattcttctgattgttgtaattttacttatcgcattagttgtatatattgtrcatagttacaatagcggtgtagaatatgccaagaaacatgcgaaagatgttaaagtacatcaatttaatggaccagtaaaaaatgatggtaaaatttctattcttgtactcggtgcagataaagcacaaggtggacaatcaagaacagattctatcatggttgttcaatatgactttatcaataaaaaratgaaaatgatgtctgtcatgcgtgatatttatgcagatattccaggrtatggaaaacacaaaattaattcagcatacgctttaggtggtccaragctacttagaaaaacacttgataaaaatttaggaattaatcctgaatattatgcagtagttgattttactggatttgagaaaatgattgatgaattaatgccwgaaggtgtaccaattaatgtcgaaaargatatgtcgaaaaatattggtgtatctttgaaaaagggtaaccataggttgaatggtaaagaattacttggttatgcaagattccgtcacgaccctgaaggtgacttcggacgcgtgcgacgtcagcaacaagtratgcaaacwttgaaaaaagaaatggttaattttagaacagttgttaaattaccaaaagttgcaggtattttaagaggctatgtgaatacaaacattcctgattcagggatyttccaaacaggtttgagttttggyatccgaggtgaaaaagatgttaagtcattgactgtgccaatcaagaactcatacgaagatgtcaatacaaatactgatggtagtgcattacagattaataaaaacacaaataaacaagctattaaagactttttagatgaagattaa

SEQ ID NO: 199 - DNA, 558 bp, Staphylococcus aureus
atgaagcgattattcgatgtagtgagttcaatatatggtttagtagttttaagtccgattctgttaattacagcattactaattaaaatggaatcaccyggaccagccattttcaaacaaaaaagaccgacgattaataatgaattgtttaatatttataagtttagatcaatgaaaatagacacacctaatgttgcaactgatttaatggattcaacakcgtatataacaaagacagggaaggtcattcgtaaracctctattgatgaattgccacaattattgaatgttttaaaaggagaaatgtcaattgtaggtcctagaccagcgctttataatcaatacgaattaatygaaaaacgtacaaaagygaacgtgcatacgattagaccaggtgtracaggrctagctcaagtgatggggagagatgatatyactgatgatcaaaaagtagcgtatgatcattattacttaacacatcaatctatgatgcttgatatgtatatcatwtataaaacrrttaaaaatatyrttacttcagaaggtgtgcatcactaa

SEQ ID NO: 200 - DNA, 1347 bp, Staphylococcus aureus
atgcaagcaatccttaattttatagtcgatattttaagtcaaccagccattcttgttgcactgattgcctttataggtttaatcgttcagaaaaaacctgccgcaacratcacttcaggaaccattaaaacgatattrggcttcttaattttaagtgcaggtgctgatgtcgtcgttcgatctcttgarccattcggcaaaatattccaacacgcattyggtgtgcaaggtatcktacctaacaacgaagctatcgtctcactagccttaaaagattttggaacaacagctgcactcatcatggtctgtggcatgattgttaatattttaattgcycgcttcactaatttaaaatatatctttttaacaggtcatcatacattttacatggctgcgtttttagcaatcattttaacagtcagtcatattaaaggctggctaacrattgttatcggcgcactcgtattaggattaatcatggcagtmttacctgcattactccaacctacgatgcgaaaaattacagggaatgaccaagtagckttaggtcattttggctcaatcagttactttgccgcaggtgctgtaggtcaattattcaaaggtaagtctaaatcaacggaagagattaaatttccaaaaggcttaagtttcttacgagaaagtacaattagtatctcgattacratggcattactttacttcatcgcatgcttatttgcgggcgttagttatgtacacgartctattagtratggtcaaaactttattgtmttttcwttaattcaaggtgtgacatttgctgctggtgtatttattattttaacgggcgttcgyttaatcttagctgaaatcgtcccagcatttaaaggmatttcwgaaaagcttgtaccaaattctaaacctgcattagactgccctattgtgttcccttatgcacaaaatgcagtaytaatyggattctttgtcagctttattacaggtgtcatcggtatgtttatcttattcttatttggtggcgtcgtcattttacctggcgtagttgcacacttcttcttaggtgcaacggctgctgtattcggtaatgcaagaggcggtattaaaggtgctrttgctggcgccgctctaaatggtatcctaatmacgtttttaccattattattcttgccatttttaggcgaattaggtggtgctgcaacaacattctcagatacagactttttarctgtcggtatcgtgttcggtaacgcagtaaaatatatgggattatttggtgcgattctatttattatwatcgtaggtgcracarcaattttattaaaaggycgtcaaaarsmacagcaatag

SEQ ID NO: 201 - DNA, 1263 bp, Staphylococcus aureus
gtgtataattatcatttattagaagatagggatgttctatgtattgaycaaaaaagtttttttgcgagtgtttcttgtattgaaaaggggctagatccattagaaacaaagytagctgttgttgcagatactaagcgtcagggttctgtartattggctgcgacacctaaattaaaagaattaggcatcaagacaggrtcgcgattgtttgaaataccacatagaaatgatatttacattatcaatccaagtatgcgtaaatatcttaatgtttcagttgctatttctaagattgcattgcgttatattccacctgaagatttacaccaatatagtattgacgaattttttatggatgttactgatagctatcatagatttagttctacagtacatgcattttgcgaaagacttaaacgtgaaatttatgaagaaacaggcatttattgtactgtgggcattggttctaatatgttattaagtaaaattgctatggatgttgaagckaagcatartcaaaatggtatagctgaatggcgatatcaagatgtaccaacraaattatggccaattcagcccttgmgagatttttggggtattaatcgtcgaacagaagccaaattgaataaaagaggratttttactataggagatttagcraaatatccatataaatttttaaaaaaagagttcggtattttaggtgttgatatgcatctacatgcgaatgggatagatcagagtaaagtacgtgaaaagcayaagatyagcaatccatcgatatgcaaaagtcaaatattaatgagagattatcattttgaygaagcaaaagtagtaatgcaagagttaattgaagatgttgctagcagagttcgagcaagaaaaaaagtggcaagaacgatacattttgcctttggctatagtgatgaaggyggtgtacataagcaatatactttgaaagatccaacaaacytagaaaaagatatttataaagtagtaatgcatttygcagataaattatgtaataaacaagcactatatcgtacgctaagtatatctttgagtcaatttattaatgaggatgagcgacagttaagtctgtttgaagatgaataccaacgcaaacgtgacgaatgyctagctaaaacgatagaccaattacatttgaaatacrgcaaaggtattgtgtccaaagcagtatcgtttacagaagcaggtacaaaacayggyagattaggtttaatggctggacataaratgtaa

SEQ ID NO: 202 - DNA, 1605 bp, Staphylococcus aureus
atgaatgcgataaagcgtttcggtagtgcaatgattgtaccrgtattaatgttcgctttctttgggatagtgcttggctttgcgacattatttaaaaatcctacaatcatggggagtttagcagatcaacatacgttttggtttaaattttggtcagtratagaatctggtggctgggttatttttacgcatatggaagttgtatttgttgtaggtytaccactttctttagctaaaaaagcaccaggtcatgcagcrcttgcagcattgatgggttacttaatgtttaatacatttataaatgccattttaacdcaatggccacatacrtttggcgctaatttagaaaaaggcgttgaaaatgtacctggtttaaaatcaattgcaggtattgccacattggatacgaatattctaggtggtattattatttcagctattattacktggattcacaatagatactayagtaaacgattaccagaaatggttggwgtattccaaggtttaacatttgtrgttacratytcattttttgtgatgttaccattagcagcaattacttgtgttatttggccaactgttcagcacggtattggytcaatgcaacactttatcatygcttcaggctatatcggtgtwtggytgtaycacttcttagaacgtgtattaataccaacaggattacatcactttatttatgcrccaattgaagttggaccagtagtagtcaatcayggcttgaaagctgaatggttacaacatttaaatgagtttgctaagagtastaagccattaaaagagcaattcccttatggctttatgcttcaaggaaatgggaaagtatttggatgtttaggtattgcyttagcaatgtatgctacgacacctaaagaaaatcgtaaaaargtrgcrgcaytacttattcctgcmacattaacagcagtcgttgtaggtattactgagccattagartttacattcttattcatcgcrccatacttatttgttttacaygcagttttagcagcwtcaatggatactttaatgtacgcatttggtgttgtaggtaacatgggtggtggyttgttagactttatttcaacaaactggttrccaytwggkaaagaacattggggyacttatgtwgcacaagttrttatmggyytratatttgtagcgatttacttcttcttattcagattcttaattttgaaatttgatattccattacctggacgtaagaaaacagaagargargttaarttattytctaarcaagaytayaaaaataaaaaaggtgatarcgtwgayyctaaacgtgcttcawcwggtaatgaatacgaagacaaagctgcrtattacctmgacggtttaggcggcaaagaaaatatcaaagatgttactaactgtacaacaagattacgcttaactgtttatgatgaaagtaaagttgmrgatacggaatatttcacgcatcaacaaatggcacacggattagtaaagagtggtaagagtatccaagttgtagtaggtatgacagtaccacaagttcgtgaagcatttgaacaaatggttgaggatcaatcgyccgaagataaataa

SEQ ID NO: 203 - DNA, 1032 bp, Staphylococcus aureus
atggaaccaatattagaaatgattaaaacattaacaggtattaatagtccttcaggagacacagaagaagcaattcaatttgtcgaaaaatatgcaaaagacttgggttatcaaacaacactaacaaataaaggtgcgttattaataacagtgccaggcaaaaatgatgaagtacaacgctgtattactgctcatgttgatactttaggtgcaatggttaaagaaattaaagaagatggkcgcttagcaatagaattaattggaggattcacgtataacgcgattgagggtgaatattgccaaattaaaactgatgctggtcaaatatatacaggaacmatttgtctgcatgaaacaagtgttcatgtatatagaaataatcatgaaatacctagagaycaaaagcatatggaaataagaattgatgaagtaactacatcagaagaagatacaaagagtttaggtatttcagtaggtrattttgttagctttgatccacgtacagttatcacgtcatcaggttttattaaatctcgtcatttagatgataaagctagcgtagcgatkatactamaattactaaagaaattaaaagaagagcaaataatattaccacatacaacgcaattttatatttctaataacgaagaaataggttacggtgcaaatgcatcaattgattcgaaaatcaaagaatatattgcattagatatgggcgcgttgggagacggtcaagcatcsgatgaatatacagtttctatttgtgccaaagatkcttcaggtccatatcataagcaattgaaatcrcacctagttaatctttgcaaaataaataayattccatataaagtmgacatatatccatattatggttcagatgcttcagcagctttacatgctggtgcggatatcagacatggtttatttggcgctggcattgaatcatctcatgcaatggaacgaacacatattgattctattaaagcgacagagaaattactatatgcatattgcttatcaccaattgagtaa

SEQ ID NO: 204 - DNA, 507 bp, Staphylococcus aureus
gtggcaaaatttaatgtagagaatgaacatgtcgaagttgaarttgaaaagctttataaattttctccagagttagtatacgaagcttggacaaagaaagatttgttraaacaatggtttatgacatcrgccagaacgaataaagagattgaagcggaygttaaagaaggcggtaawtatcgtattgtagatcaacaacgtaatggcaaagtaaatgtgattgaaggyatttatgaatctttagttatggatgaatacgttaagatgactatcggtatgcctggactaagtgaaacrcaagatgtcattgaggtagaattttttgaacgtgaaacaggtggcacccaaatgctattttattatcgttcattagttgaaaargaaagacgatttactaatttagaatacaagcaaaagaaaaaagaatatcatgatkccatggtgcatggtttcgaattgatgtttgataaratgtaccacgttatcgaaacatcaacacaacaataa

SEQ ID NO: 205 - DNA, 1407 bp, Staphylococcus aureus
atggatrtattytataaaaaaataaaagcaaatgtaacrcchgaagttttagcacaacttcattccaagaagatcattttggaaagtacaaatcaacaacaaactaarggtcgctattcwrtwgtkatwtttgatatytayggyactttaactttagataaygatgtattatcagtaagyactttaaaagartcgtatcaaatcabtgaaagaccgtaycattatttaacgactaaaataaatgaagactaccataatattcaagatgagcaacttaagycawtaccrtttatatctggatatgttgggacgtgtagctttgatttagtaagacatgaatttcctaaattgcaatcaatacaattagargatcacaagcarcacgatgtamggttatatatggttgaacaagtttatgtatttgaccattacaaagatgagttatatatcatcgcgacgaatcaattttcaaattcaacraaatcagatcttgagaatcgagttawtaagtctatcgaagacttaactaaaatccaaccattcatgcctacacaagattttgattttaaaactaaagaaattcaatcaaayatttctgaagaaagatttatcgaaatgattcagtatttcaaagagaaaataacagaaggggatatgttycaagttgtgccatcaagaatttacaaatatgcgcatcatgctartcagcatttaaatcaacttwcgtttcaactgtatcaaaatttaaaacgacaaaacccaagtccatatatgtattatcttaatatcgatcaaccmtayattgtcggtagttctcccgaaagtttcgtaagtgtcaaagatcaaattgtaacaactaatcctattgcaggtacgattcaacgtggtgagacgacacaaatagataatgagaatatgaaacaactacttaatgatccwaaagaatgcagygaacatcgtatgctwgttgatttaggrcgtaatgatattcatagagtaagtaaaatmggtacctcaaaaattactaaattaatggttattgaaaaatatgaacatgttatgcatatcgtaagtgaartcacaggtraaataaatcaaaatttatcrccaatgacagttattgcgaatttattaccaacaggtaccgtttcaggtgcaccaaaattacgtgcaatygaaagaatwtaygaacaatatccacataaacgdggcgtttatagtggtggtgttggatacataaattgtaatcataacttagattttgcwttagcaattcgaacgatgatgatagatgagcagtatatcaacgtagaagctggttgtggsgttgtatatgattctattcctgaaaaagaactraatgaaacgaaattgaaagcyaaaagyttattggaggtragsccatga

SEQ ID NO: 206 - DNA, 1212 bp, Staphylococcus aureus
atgccattaaatgttgcaattacgataacggtaattgtggcgttattaatgaatcgaaaagaatcatttgctaaaaaagttgaggtyttcacgaaaggtgcaggccattcaaacattrttttaatgatgttgatttttattttagcaggtgcattttcaaatacagctgaaaaaatgggtggcgtaaagtcgacagttaatttaggactatcattaatcccagaaaatttaattattgtaggattgtttgtgatttgtatgtttgtttctatatctatgggracgtcwgtaggractgttgctgcaatagcacctgttggttacggatttgcacaagcgacagatgtaccaactgcgctagcaatggctacagttgttggaggtgcaatgttcggcgataatctatcaatgatttcagatacaacaattgctgcggttagaacacaacatacgaaaatgaaagataaattcagagtaaactttaaaattgtattgccaggtgctattttaacgattattattctktatttcttaacgaatggcatttctttaaatcatgctaaaarctatgattataatytaattaaagttgtaccgtatatyttagtattggtattagcattattaggtgtaaatgtcattatcgtattgattggcggaacattattagcyggaatcattggtctcatagatggttcattcrgttggatgggrctactagatgcagtgtccaaaggtattataagcatggaagatattgctatgattgcrttgctaattggtggtttagtcggtattattcaacacaatggtggtattgaatggttgttgcaatttgttcgctctaaagtgaaatcaaagcgtggcgcagaattaggaattgckagtttggtaagtgtcgcagatattgccacggcaaacaacaccatctctattattatgtcaggtcctttagctaaaaatattgcagatgaatatgatgtagattcaaggaaatcagcaagtattcttgatatatttggaggctgcttccaaggtttattaccatatagcccgcaagtcatttcagcggctggtgtagctggtatttcaccrttaatgttattcccatayagcatttatcctatattattaggtgtatgcggacttrttgcgattttatttaattttccaaagctaaaaaagaacactagtcaagaaatgaaayaktaa

SEQ ID NO: 207 - DNA, 570 bp, Staphylococcus aureus
atggcattaatagtatctagagctatwttatttttgattttagcattagctttwggaatagcgactgtttttcctgaacaaaarttrccaktwtatataktattcacaytrtttgtwgyrgttgcgatyrttwygaatgtatggyttacmcatcaaaacgttaaaaarcatatcattaagtttracaaayaygtygcwtactttttrksctktgtctcagggttactttacattggatttgtaatttatacattaactatagggagctatgatgttttaccaattattatatttgcaataagtatcgtattggttcaaatattagaaaatatactgggaatcagtataaraaatacgcgtcyatcaaacaaacagttgaaagtyatytcyrarcaamgtgywcagcaatttaaagtcatatcattaatattagtaagtgtgtctatcgtgttcatttttattgcattaatgcttaaatggtggcttwtacttgykattagcattattgttttgattattattacagtagcaatgattgtttatgaaaaatattatacgactcctrattaa

SEQ ID NO: 208 - DNA, 882 bp, Staphylococcus aureus
atggcarctcaagatcctagaacaaaatttaaaacmacggawtatgaaaaacaagarcaagaggtaccgggtttacaatctgaaatgacgccagcaccygattgtggcgaaacgtcttaccaaggtmatcaacgcttacaaggctataaaatrttagtcacaggtggtgactcagcaatagggcgtgcagcagcaattgcgtatgctaaagaaggtgcagatgtagcgattaactatcttccgagtgaagaacaagatgcacaagaagtacgccaagtrattgaagaaagtggtcaaaaggcagtgttaattcctggtgatataagagatgarcagttcaactatgaccttgttgaacaagcatatcaacaattaggtggcttagataatgttactttagttgctggacatcaacagtatcatgatgatattcatggatttacaactgaggcatttacwgaaacatttgaaacgaatgtctatccgctattttggacagttcaaaaagcwttggaatatttaaaaccgggtgcgtcaattacracgacatcrtctgtacaaggttatmatcctagtcctattcttcatgattatgccgcttcaaaagcagcaattatttcattaactaaaagtttttcagaagaattaggaccaaaaggaattagagtgaactgtgtagcrcctggtccattctggtcaccattacaaatttctggtggrcaacctcaaagtaaaatcccaacatttggtcaaaaaacacctttaggtcgtgcaggtcaacctgttgagttatgtggaacttatgtgctattagcgtcagargaatcaagttatacaacyggacaagtgttcggtgttagcggtggagtgcaaatagattag

SEQ ID NO: 209 - DNA, 783 bp, Staphylococcus aureus
atgacrattttakmagaaattgttraatataaacagtyacttttacaaaatggctattatcaagacaaacttaataccttgaaaagtgtgaasattcagaataaaaaatcttttataaaygcaattgagaaagaaccaaagctagcaattattgcagaaattaaatcgaagagtcctacagttaatgacttacctgaacgagatttatcgcaacaaatctcagattatgavmartayggtgcaaatgcygtrtccattttractgatgaaaagtactttrgtggtagttttgaaagattacaagcattgacracaaaaacaacattacccgtattatgcaaagaytttattatagayccgcttcaaattgatgttgcyaaacaagctggtgcatctatgattttaytgatygttaayatcttatckgataaacaattgaaagatttatataactacgctatatcgcaaaatytagaagtgttarttgaagtacatgatcgycatgaattagaacgtgcctataaggttaatgctaaattgattggtgtaaataacagggacttaaaacgatttgtyacaaatgtggaacatacaaatactattttagaaaataaaaaamcmaatcatyattatatttctgaaagtggwattcacgatgyatctgatgtaagaaaaatcttgcatagtggtatcgatggcttactaataggtgaggcgcttatgcgttgtgacaatctatctgaatttttaccacaactgaaaatgcaaaaggtgaagtcatga

SEQ ID NO: 210 - DNA, 1122 bp, Staphylococcus aureus
atgggattaaaagatcaagctgttrcctggagaaggtattttcatcaatttccagaactatccgataaagaatttaagactacacaaaaaattaaagatattttaacagaayatmatattagaatattagacttaccrcttrygactggrctkgttgctgaagtgggrcaaggtctgagttgtatagctgttcgggctgacattgatgctttaccrattcaagagcttgttgaacaggattttaaatctgaaaatgaaggtgtkatgcatgcgtgyggtcatgatattcacatggctagtattttggctacrgctgtaaarttaaaagaaattgagggcactcttactgggcgtgttaaattcatttttcaaycagcagaagaactaggacatggcgcttttaaaattattgaaacasatgcattamaagatgtacaagcagtattgggttttcataatgacccatcgcgtycggtaggtacatttgcaatcaaaacaggggcaattacatcagcagtagatcgytttgagtttcatattaaaggcgtgggtggtcatgctgcaaagccagaacaatgcaacgatccagttattgtgttggcgcaattgattaatagtattcaatccatagttagtagaaatctatctgcgtttgatgaagcggtagtaacaattggacaaatatcatgtggtaatacttggaatgtcattgctgatcatgcgtatgtacaaggcacagtgcgtagttttgatcctgtggtrcgaaagcttgtagaaacacgattacaagatattgcggacggrttrgctcaagcatataatatgaaaattaatttaaattatacrcatttacctggcgctgtgatgaatgatgaggcattgacgcataaagcaatwgcagtagccyaacatgttggatataaggtggraatgatggaacagccgcttacgattggagaagatttttcaggttatagtcaacattttccaagtgtatttgcgttaattggttctcatagtgaatatgatttacatcaycctcaatataaaccggatgaaaggattctdgaaaaagtacctgagtattttgttgaatttgtaaaragactattgcatgartaa

SEQ ID NO: 211 - DNA, 633 bp, Staphylococcus aureus
atgaaattgaaattttgtggctttacatcaatwaaggatgttacagcggccagtcaattacctattgatgcgataggtttcatccattatgaaaaaagtaaaaggcatcaaacaattacccaaataaaaaagttagcgtctgctgttccaratcatatygayaaagtatgtgtcrtggtaaatcctgatttaacaacwattgaacacgtattaagcaatacgycaattaacacaatacagttacacggcacagaatctattgattttatacaggaaatwaaaaagaartattcaagcattaaaatyactaaagctttagctgcagatgaaaacataatccaaaacataaataaatataaagggttcgtagatttatttattatcgacacmccctcagtgtcgtatggtggtaccggtcaaacatatgactggactattttgaagmacataaaagacataccttayttgatagcaggaggcattaacwctgaaaatattcaaacagttaatcaayttaaattatcacatcaaggttwtgatcttgcatcaggtatagaagtaaatgggcgaaaagatatagaaaaaatgacagcaattgtaaatattgtgaaaggagatagagamaatgaataa

SEQ ID NO: 212 - DNA, 1239 bp, Staphylococcus aureus
atgaatgatttaataattaatcayatagcagaattaattttaccgaratcaacagataaacctttgaagggtaaggaattagatgaattaaatgttgtgaaaaatggtacagttgtcattaaagatggcaaaattgtatatgctggammacatacagatgactaygatgcgactgagacratwgatgctagtggraargtagtktcyccrgcattagtagatgcwcatacccatttaacatttggtggatctcgagaacatgagatgtcattaaaacgtcaaggtaagtcttaccttgaaatattagaaatgggtggtggcatattatctaccgttaatgctactagagaaacatccgaagatgacttgtttaaaaaagcagagcatgatttgcttactatgattaaacacggcgtgcttgcagttgaaagtaagagtggttatggattagatagagaaaatgaactgaagcaattgaaagtgtctaatcgtttagctgagaaatatgatttagayatgaaacatactttcctagggcctcatgctgtacctaaagaggcaagttcaaatgaggcatttttagaagaaatgattgcgttacttccggaagtaaaacawtatgcagactttgcggatatwttctgtgaaacaggtgtatttacaatagarcaatcgcaacattatatgcaaaaagccaaagaagcaggttttaaagtgaaaatacatgcggatgaaattgatccrttaggcggactggaattagcaattgaygaacaagcaatatcagcwgaccacttagtagcktctagtgayaaaggaaaagaaaagttgcgaaatagtgatactgtagctgtcctcttacctgcaacgacgytctatttaggtaaagaagattatgcagatgcragaggyatgctwgayaataayggtgcsatygcrttagcwactgattataayccdgghagyagtgtmacraayaacwtrcarcttgttatggcsattgcagcvttraaattaaagctwtcrcctartgaagtktggaatgctgttacggtcaaygctgctaaagcaatagayattaacgcgggtacaattaacacaggtgataaggctaatttagtaatttgggatgcaccaaatcatgaatatattccwtatcattttggtatcaatcacgcagaaaaagttattaaagacggtaaggtcatcgtagataacacaktatcttttaaagyataa

SEQ ID NO: 213 - DNA, 1215 bp, Staphylococcus aureus
atgaataaacaaatacaaacagaagcagatgaattaggtttctttggtgaatayggagggcaatatgttccagaaacattaatgccagcaattattgagttgaaaaaagcttataaagaggcaaaagcagacccagagtttcaaagagaactkgaatactatttatcagagtatgtaggacgcgcgacrccacttacatatgctgcatcrtatactgaaagcytaggtrgcgctaaratatatttraaacgagaggatctaaatcatacaggcgcccataaaattaataatgcgttaggtcaagcgttgctygctaaaagaatgggcaagaagaagcttgttgctgaaacwggtgcgggtcaacatggtgtagctagtgctacggttgctgcattatttgatatggaacttgttgtctttatgggaagtgaagatattaaaagacaacaacttaatgtatttagaatggaattacttggtgcaaaggttgtggcagttgaagawggtcaagggactttatcggatgcagttaataaagcattgcaatattgggtaagtcatgtagatgatacrcattatttattaggttctgcattrggtccagacccrttcccaacgattgttagagattttcagagtgtsattggtaaagaaataaaatcacagatattgaagaaagaaggtcgacttccggatgcaattgtagcatgtatcggtggtggctcaaatgcaatcggtacattttatccatttattaaagatgatgttgcwttatacggtgttgaagccgcaggtcaaggcgakgatactgataaacatgcacttgcaattggcaaaggatcacctggcgtattacatggtactaaaatgtatttaattcaagatgaagrtgggcaagtgcaactagcacattctatttcagcaggacttgattatcctggtattggrccwgaacattcttattaccacgacattggtagagtaacttttgaaaatgcwagtgatacacaagcaatgaatgctttaatcaactttacaaaacatgaaggtattatacctgcaattgaaagtgcacatgcactgagttatgttgaaagactagcgcctacgatgtcgaaagaagatattattgtagtaacwatttctggacgtggcgataaagatatggaaacaattagacaatatatggyagagcgaggtcttgcaaatgactaa

SEQ ID NO: 214 - DNA, 1662 bp, Staphylococcus aureus
atgagaaaaattcaagcaaaaaaaggtttgagtattgagtgtaaaggttgggaacaagaagcagtacttagaatgttatacaacaatttagacmcagaagttgctgaaagaccagaagatttagttgtttatggtggtattggaaaagcagcwcgtaattgggaagcttttgaagcaatagagaaaacgttacgmgaattagaatcagatgagacaatgttagtacaatcaggaaagccagttgctgtrtttaaaacacatgaagaagcgccacgtgtattaatttcaaattcagtattagtgcctgaatgggcaaactgggatcattttaatgaattagataaaaaaggtttaatcatgtatggacagatgacagccggtagttggatatatattggttctcaaggtattgtgcaaggtacttatgagacatttgcygagctaggtaatcaacactttaatggagatttagcaggcactgttacactgacagcaggtttaggtggtatgggtggtgcgcaaccgttagcaattactatgaatcatggggtagcaatttgygtggatgttgatgaaacacgtgttgataagcgaattgmtacgaaataytgtgatrttaaaacagctratttagatgaagcattaaaattagcagaagargcgaaagaacgtggagaaggattrtcaatcgggttagttggaaatgctgtagacmtccatcaagcgattctagaaaaaggatttaaaattgacattattactgaccaaacaagtgcacatgatccgctaaatggatatgtgccacaaggatactcygtagaagaagcgaaagtattgcgtgaaaaagatccgaaaaaatatgttgaactgtcacaagcttcaatggcaaagcatgttgaattaatgcttgaattccawaaacgtggmgctgtagcatttgattatggtaacaatattcgtcaagtagccttcaataacggagtgaraaatgcttttgacttcccaggctttgtaccagcttacattagaccattattctgtgaaggtaargggcmattccgctttgctgcrttgagtggtgatccaaaagatatcgagcgtgcggatgaagaaatgcgyaaacttttcccagaaaatgaaaagttattaagatggcttgatttagctgaagaaaaaatttcatatcaaggactaccatcacgtattgcttggttaggctatggagaaagagcraaaatgggcttagctttaaatcgtcttgtacgtgacggtgaaatttcagcaccaattgttattggacgagaccatttagatgctggttcagttgckagtcctaaccgtgaaacagaaagtatgaaagatggyagtgacgcggttggtgattgggctgtattgaatgcactcattaacacrgctgcaggtggttcatggatttcattccatcayggtggcggtgttggcatgggatattcacttcatgcgggtatggttgtygtagcagatggatcagagcgtgctgaaagaagattggaacgygtattgacgactgayccaggtatgggtgttgcmcgacatgttgatgctggctatgacatygctattcaaacagctaaagaaaaaggtattcatattccaatgattgataaagcaggtgataartaa

SEQ ID NO: 215 - DNA, 687 bp, Staphylococcus aureus
ttgattgaaaatgcaacattgttgagtgaaaatggtgcagatataattgaaattggwgtacctttctctgatccggttgctgatggtccagttatcatggaagcaggtcaacaagcgattaaacaaggcatmacgatagattatattttcrakcaattagaaaaacayggtratcaaattaagtgtmastatgtattaatgacgtattataatatwatttgtcattatggagaacaagcgttttttgaaaaatgtcgagatacyggtgtctacggcttaattattcctgatttaccatwtgaattatcgcagcgtttaaaacaacaatttagtcactatggygtcaaaatcatatcgttagttgcgatgactactgatgacaaacgtataaaagatatcgtatchyatgcggaaggctttatttatactgtgacratgaatgcgacracaggrcaaaacggtgcgtttcayccagaattaaaacgaaaaattgagtcaattaaagcgatagccaatgtgccagttgtcgcaggatttggtataagawcwccacaacatgttgcagatataaaagaggttgcagatggyatygtyattggtagygaaatmgtwaarcgatttaaatctaacacgcgtgargaaatcattaratatttacaatctatccarcaaacattgaataattaa

SEQ ID NO: 216 - DNA, 936 bp, Staphylococcus aureus
gtgtacaagcaaggtgaaccaaatttatggactggaaggttagatagtgaaacagacccgaaaaaattyagrcattttcaaacagtracatttgaagatttgtckaarytggaaaaragtagtayrccatcaggggtyggtatattaggctatgctgttgacaaaggtgttgctttaaacaaggggcgcattggtgcaaaagaaggrccagatgcgattaaacaagcatttgcaggtttgccggatttgaatcaatgtgaaactttagtcgattacggaaatgtttatcatgatcatgaggaattaattgatactcaaaaagaatttgcwayrcttgcagcgaagtcaattgytaatcatagacaaacrtttttattaggyggtggacatgatattgcgtatgcwcaatatttagcwacrcgtaaagtytatccaacacartcwatyggtgtgatwaayattgatgcgcattttgatacwcgtgctgaacaasaatcwacatctggwacgagytttagacaaattttagaagargatgamaayacwgrttatttagtkcttggtatwgctcaaggtggkaatacgcaaagtttatttgattatgctaaagagaaaaagattgattatgtctttgcagatgaattattrarycaygtrtcrccamcwatyaaagatatgattgarcgttttrtrcatgaacatgaygtcattatgtttacgatttgtatggatgtcattgatagtgcrtttgcrccwggggtaagtgcgcckgcagtgttaggtttgtatccacatactgttcttgaattrgcaaaacgtattattccaagtgataaggtgtcttcagttagtattgctgagatgaatccaacatatgacgctgacaatagaactgckaagctcgttgctaatttagtgcatcattttttaaaataa

SEQ ID NO: 217 - DNA, 1263 bp, Staphylococcus aureus
atgaagtttacaaatttaacagctaaagagtttggtgcmtttacagatagcatgccatacagtcatttcacgcaaactgttggccactatgagttaaagcttgctgaaggttatgaaacacatttagtgggaataaaaaacaataataacgaggtyattgcagcttgcttacttactgctgtacctgttatgaaagtgttcaagtatttttattcaaatcgcggtccagtgatygattatgaaaatcaagaactcgtacactttttctttaatgaattatcaaaatatgttaaaaaacatcgttgtctatacctacatatcgatccatatttaccatatcaatacttgaatcatgatggcgagattacaggtaatgctggtaatgattggttctttgataaaatgagtaacttaggatttgaacatactggattccataaaggatttgatcctgtgctacaaattcgttatcactcagtgttagatttaaaagataaaacagcagatgacatcattaaaaatatggatggacttagaaaaagaaacacgaaaaaagttaaaaagaatggtgttaaagtaagatwtttatctgaagaagaactrccaatttttagatcatttatggaagatacgtcagaatcaaaagcttttgctgatcgtgatgacaarttttaytacaatcgcttaaaatattacaaagascgtgtgttagtrcctttagcgtatatcaaytttgatgaatatattaaagaactaaaygaagagcgtgatattttaaataaagatttaaataaagcrttaaaggatattgaaaaacgtcctgaaaataaaaaagcacayaacaagcgagataacttacaacaacaacttgatgcwaatgagcaaaagattgaagaaggtaaacgtctwcaagaagaacatggtaatgaattacctatctctgctggtttcttctttatcaayccatttgaagttgtttattatgctggtggtacatcaaatgcwttccgtcattttgccggaagttatgcagtgcaatgggaaatgattaattatgcattaaatcatggcattgaccgttataatttctatggtgttagtggtaaatttacagaagatgctgaagatgctggtgtagttaaattcaaaaaaggttacaatgctgaaattattgaatatgttggtgactttattaaaccaattaataaacctgtttacgcagcatataccgcacttaaaaaagttaaagacagaattttttag

SEQ ID NO: 218 - DNA, 687 bp, Staphylococcus aureus
atgaaagatgtcaaagcactcaagttaatgacattaaatgatgttttaagtcaaatcaatggtgacatgacgctgggaattggtacaggaagtacaatggaattactcttacctcaaatggcgcaactaattaaagaacgtggttacaatattacaggtgtatgcacttctaataaaattgcatttttagcaaaagaaytaggtattaaaatatgygaaatcaatgatgttgatcatatcgacttagcaattgatggtgctgatgaagtagatccatctttaaatataattaaaggtggyggtggtgcgctgttcagagagaaagtkatagatgaaatggcatcrcgttttgttgtggttgtcgatgaaacgaaaatrgttcaatacttaggtgagacgtttaagttaccagtagaggtggataaatttaactggtatcasatattacgtaaaattgaatcatacgctgatataaaagtagaacgycgtgtaaacgaagatgtcgcatttataactgataatggcaattatattttagattgtaagttaccaaaaggaattgacccatataagttccatgagtatttaattcatctgacaggtgtgtttgagacaggmtacttcttagatatggcagatcaagttattgtaggyactcaagagggygttaaaattttagaaaaataa

SEQ ID NO: 219 - DNA, 888 bp, Staphylococcus aureus
atgagaaaaaatattttaattacaggcgtacatggatatatcggtaatgctttaaaagataagcttattgaacaaggacatcaagtrgatcaaattaatgttaggaatcaattrtggaagtcgacctcgttcaaagrttatgatgttttaatycatacagcagctttggttcacaacaattcacctcaagcaaggctawctgattatatgcaagtgaatatgttgctkacgaaacaattggcacaaaaggctaaakctgaagacgttaaacaatttatttttatgagtactatggcagtttatggaaaagaaggtcakgttggtaaatcagatcaarttgatacacaaacaccaatgaaccctacgaccaaytatggtatttccaaaaagttcgctgaacaagcattacaagarttgattagtgattcgtttaaagtagcaattgtgagaccaccaatgatttatggtgcacattgcccaggaaatttccaacggttaatgcaattgtcaaagcgaytgccaatcattcchrwtattaahaatcagcgsagtgcwttatatattaaacatctgacagcatttattgatcaattaatatcattagaagtgacagghgtrtaycatcctcaagatagyttttactttgatacatcgtcagtaatgtatgaaatacgtcgccaatcrcatcgtaaaacgstattgatcaacatgccttcartgytaaataagtattttaataagttgtcggtctttagaaaattattcggcaatttaayatacagcaatackttatatgaaaawaataatgcrcttgaarttattcctggaaaaatgtcacttgttattgcggacatcatggatgaaacgacaaccaaagataaggcataa

SEQ ID NO: 220 - DNA, 285 bp, Staphylococcus aureus
atgaaaattttagtagtatgtggccacggtttaggaagtagttttatggtagaaatgaaygcacaagaagcrcttaggcaacttaatgcaccatctgatatcgaagttgaacatagygacattatgacagcaagtccagagatggctgacttgtttatttgtggtagagatttagctgaaaatgccgaacgyctaggggatgtcttagttcttgataatattttagayaaagctgaattacaacaaaagctctcagaaaaattacaacaacttaacatgatttaa

SEQ ID NO: 221 - DNA, 1260 bp, Staphylococcus aureus
atgaaatttacagagttaactgttaccgaatttgacaactttgtacaaaatccatcattggaaagtcattatttccaagtaaaagaaaatatagttacccgtgagaatgatggctttgaagtagttttattaggtattaaagacgacaataacaaagtaattgcagcaagccttttctctaaaattcctactatgggaagttatgtttactattcgaatcgtggtccagtaatggatttttcagatttaggattagttgattattatttaaaagagttagataaatatttacagcaacatcaatgtttatatgttaaattagatccgtattggttatatcatctatatgataaagatatcgtgccatttgaaggtcgcgagaaaaatgatgccytagtaaacttgtttaaatcrcatggttacgagcatcatggctttacaactgagtatgatacatcgagccaagtacgatggatgggcgtattaaaccttgaaggtaaaacaccygaaacattgaaaaagacatttgatagtcaacgtaaacgtaatattaataaagcgataaactatggtgttaaagtmagattccttgaacgtgatgagttcaatctwttcytagatttatatcgtgaaactgaagagcgtgctggatttgtrtcaaaaacagatgattatttttataactttattgacacatatggagataaagtattagtaccattagcatatattgaccttgatgaatatgtgttaaagytgcaacaggaattgaatgacaaagaaaatcgtcgtgatcaaatgatggcgaaagaaaacaaatcagataarcaaatgaagaaaattgcagaattagataagcaaattgatcatgatcagcatgaattattgaatgcaagtgaattgagcaaaacggacggcccaattctaaaccttgcttctggygtttattttgcaaatgcatatgaagtgaattatttctckggtggttcatcagaaaaatayaatcaatttatgggaccwtacatgatgcattggtttatgattaactattgcttcgataatggytatgatcgttataatttctatggtttatcaggtgattttacggaaaacagtgaagattatggcgtataccgctttaaacgtggatttaatgtacaaatcgaagaattaataggggatttctataaaccaattcataaagtgaaatattggttrttcacaacattggataaaytacgtaaaaaattaaagaaatag

SEQ ID NO: 222 - DNA, 111 bp, Staphylococcus aureus
atgattaaaagtatcggcatttatataatatttatgttatttggcggaattttgaataggttatcaagaatcgtatcaaatgaagtgacatcattaatatacagtttgaaa

SEQ ID NO: 223 - DNA, 768 bp, Staphylococcus aureus
atgaratttgtctttgatattgayggtacrctttgttttgacggccgattaattgaccagactattattgatacattgttacaattacaacatgmtggtcatgaacttatatttgcatcagcacgtccgattcgtgatttgwtgmyrgtwtkamcwtcagtatttyatcagcacacattaattggcgcaaatggtgctatgatttcacagcaatcaawgatttctgttatcaaaccaattcatacwgatacatatcaycatatcttmaaaataattcaaaagwatgagttagattatattattgatgatgattggaattatgctgcacaacttgacgctgagaacgckatttttgagcgtttagatccacataagctggccagttgtattgatgttgcaaatatcgacacrccratcaarrtyattttattaaatatagamccgrcacaaattacaactatattagaygagctmrataaataccatcaagaattggaaatgattcaccattcaaatgartataacattgatataacagcgcaaaatattaayaaatatactgcattacaatatatatttgatgcagatgttaaatatatagcatttggtaatgaycacaatgatattktcatgttacaacatgctagtartggctatattataggaccatcagaagcatacacacacgcaatattgaaacttgataaartcaaacacatcrataataatrcacwagctatttgcaaagtcttaaaatcatataaataa

SEQ ID NO: 224 - DNA, 1020 bp, Staphylococcus aureus
atgatagttgaagttgagcaccaaagacaargtgtagatttaatcaaaattgataatgatgaaactaaaattatttttacgaattatggagcaagagtagtgtcttggaaatatcatgataataatattgttcttggaartgttgttgaagcggatgarttttatcatagtaatccttttaaatttggtgcttctataggaagatatagcggtagaattgataatgctaaatttaagttgmaaggtaaagaatatcagttagaaaaaaacaacggygaacatcatttacatggtggatgtcatggtttggacaataagttatttgattatgaaattagaaatgaaattgctcaaattaaagtkatatttaaracggtgttgaaatcagctgatgatcatttcccrggtgatatcgatgtgacgattacacatatttatgatgcggatcaccaatggtcgattgaatacgaagcagttgcatcagaagacacattgtttagtcctaygaatcatgtgtacttcaatttgaatcgagataataatgtcgttgataatcatcgcatttcaagtaatcaattagatatgtatgtattagatgagcgaaatattgttacaggtgatattctagatttacatgaagtgtttgaagataacaagataaaattgagtgatatttttacatcacaacatgcgcaattaagccaacaaatgacacgttttggtggtctmgatcacccatttacagttggtgaacataaaatgtatgttgaaaatcatgaatttatgttagaggtcgatacagatatgcctcatgttgtrttctttacttttaaycagcctgatgagtgggatagtccatttaatatttataaaccacattctggctttacattagaaacacaatttttaccaaatgatattaatttatatggtgaaaaagcaccgtcaattttaaaagctggtgaagtgttcaattcgaaaacaagtttccgtatcgaagaaaaagtagaaaatgattaa

SEQ ID NO: 225 - DNA, 1815 bp, Staphylococcus aureus
atgtctcaaggtttacctttaagagaagatgttcctgtttcagaaacatgggatttaryagacttatttaaagatgatcaacaatattatgaaagtattgacgctctagtacaacaagcaaatcaatttcatcatacatatgcaacaacattaaattcaatcgaacaaattaatactgctttagctgaattagaaaatattttaattgccttagatcgcttaagtaattatgcagaactacgtttaagtgtagatactagtaatatygaggcacaagtattgagcgctaaattatctactacatacggtaaaattgttagccaattatcatttgtagagtcagaaatacttgaattaccagaagaaatacttcaacaattagaaraatcatgtccatatcaacactatattaaacagttaataaaacaaaagccattccaattatctgcgtcggtagaacaaktattagcaaytttatcacctacgctaaacagtccttacgatttatacggcacgacaaaaatgctagatattacattcgattcatttgaacatgatggtacaacgtaccctgtcgactatgctacgtttgaaaatgattatgaagataataaagakcctgagtttagacgtaaaagtttcaaatcgtttagcgatgggattcgaaaatatcagcatactaccgcggctacatataatatgcaagtacaacaagaaaaaattgaagctgatttacgtggrtttgaatcrgtcatcgattatttattacatagtcaagaagtaacgcgtgatatgtttgaccgtcaaatcgatatgattatgcgtgacttggcaccagttatgcagaaatatgctaaacttttacaacgtattcacggattagataacatgcgttttgaagacttraaratttctgtagaccctgattatgawccagagatttcaattgaagactcaaaaaattatattttcggtgcgttaagtgttttaggtgatgactatacaaacatgttacgtgaagcatacgatcagcgatggattgattttgcacaaaataaaggtaaagatacaggcgcattttgtgcaagtccatactttacacattcatatgtgtttatttcttggactggtaaaatggctgaagcatttgtcttagcacatgaattaggtcatgcaggtcattttacattagctcaaaaacatcaaccatatcttgaatcagaagcatcaatgtactttgttgaagccccttctacawtgaatgaaatgttgatggccaattatttatttaacamaagtgataatccaagatttaagcgttggrttattggctcaattttatctagaacatattatcataatatggttacccayttattagaagctgcttatcaacgtgaagtgtatcrcaaagtagatcaaggtgaatctttaaatgcgccgacattaaatgaaataatgctaaatgtttataaacaatttttyggagatgcagtagacatgactgagggtgctgaattaacatggatgcgtcaacctcattactatatgggattatattcgtatacgtattctgctggcttaacaatcggractgtcgtttctcaaaagattaaaaatgaaggccaaccagctgttgatgcttggttagaaacattgaaaaaaggtggtagtgtatcacctgtcgaacttgcaaacattgcrggtgtagacattactacagaacagccacttaaatctacaattcaatatatttctgatttagtsgatgaagttgaaaaattaacagatgaaattgagcaagcaaataactar

SEQ ID NO: 226 - DNA, 327 bp, Staphylococcus aureus
atgttatatccgatttttatatttatattagctggcttatgtgaaataggtgggggatacctgatttggctgtggcttagggaaggacagtcttcacttgttgggctaataggcggtgygatactcatgttatatggtgtcattgcgacatttcaatcatttccatcattcggaagagtatatgcagcatatggtggcgtatttatcatcatgagtttgatttttgcgatggtcgtagataaacaaatgccagataaatatgatgttatcggtgcaatcatttgtattgtaggtgttttagtaatgttgctrcccagcagagcttga

SEQ ID NO: 227 - DNA, 1233 bp, Staphylococcus aureus
atgcataagttttgggcgacatttactttgacatatatcaaaaaaattaaagctaaatcatttgtaatttttatgattatyattgctgccttaatgattggcctatctaacattgataagattattaacatgtttgatgatggtccagataaaattggtgtagcagcaccgaatgaacaaatctataaggttttcaagcaacaggcgaatacattycatagtgatgctaagtttactaaagtttctatagaagatgctgaaaaagaagtaaaaaaacataaacttgataaagcttatattatcaaggtgaatcaaaatcgcacgttrcaagggacaatcattagtgagaagcgagtaagtcatgaagattcacaaaaagtacaagcactrcttacagctattcaaacaaatatggtagccggggaattaaatatcaacaaagaagacttacaaaaattacaagcacaaagtaaagttgataataaggtgatttctaatgatgaagtcgataaagtatcagaaggacaaaagattttyaactatgctttagcttatggcattatctttctaatgttcttyattgttttaaattatgcatctcaaatagctatggaaattgctagtgagaaaacatcgcgtgtcattgaaatgattattacaagtatttcaccaatccaacatatttttgctaaaattttaggcrttatagcagttgccgtgactcagattattttaattgtattgatggcagtyatatgcatttttgcctttgacttaaaagacttgctacaaggttttaacgtggaaatgaatcaattgtcttggcaaattattattgtcggaattataagtagtattgttggaattayggcgtatgtattacttgcagccatyctcggatcattaacatctagaatagaagatttaaatcaatctttgatgccactgacattacttggtatgattgcattttatatcgcsatattcacgataaataatcctgatggrcracttgctttaatcacaagttatattccgtttttrgcgccatttcaattagttgtacgcgctcaaacttcagggcttcaawtayatgargtcatcttaagttcwttaatctcaattgtaatggtagctgtcttgatatggattgcaattaaaacatataaagattcagtacttacatttgaacgtggcttatttaattcaatgaaacgtgtatttaaaaaataa

SEQ ID NO: 228 - DNA, 1602 bp, Staphylococcus aureus
atgttacaagtaactgatgtgagtttacgttttggagatcgtaaactatttgaagatgtaaatattaaatttacagaaggtaattgttatggattaattggtgcgaatggtgcaggtaaatcaacattcttaaaaatattatctggtgaattagattctcaaacaggacatgtttcattaggkaaaaatgaacgtctagctgttttaaaacaggaccactatgcttatgaagatgaacgcgtgcttgatgttgtaattaaaggtcacgaacgtctttatgaggttatgaaagaaaaagatgaaatctatatgaagccagatttcagtgatgaagatggtatccgtgctgctgaacttgaaggtgaatttgcagaaatgaatggttggaatgctgaagctgatgcwgctaaccttttatcyggtttaggtatcgatccaactttacacgataaaaaaatggctgaattagaaaacaaccaaaaaattaaagtattattagcgcaaagtttattcggtgaaccagacgtactattactggatgagcctactaacggtctcgatattccagcaatcagttggttagaagatttcttaattaactttgataatactgttatcgtagtatcrcatgaccgtcatttcttaaataaygtatgtacwcatatcgctgatttagacttyggtaaaattaaagtttatgttggtaactatgatttttggtatcaatctagtcagttagctcaaaagatggctcaagaacaaaacaagaaaaaagaagaaaaaatgaaagagttacaggactttattgcwcgtttctcagctaacgcttctaaatctaaacaagcaacaagtcgtaaaaaacaactygagaaaattgaattagatgatattcaaccatcatcaagaagatatcctttcgttaaattcacrcctgagcgygaratyggtaaygacttaytaatcgttcaaaatctwtctaaaacrattgacggygaaaaagtattagataayrtwtcmttcacaatgaatccaaatgataaagcrattttaattggrgatagtgaaatygcraaaacmacattrcttaaaatattagcyggygaaatggaaccagacgaaggttcwtwtaaatggggtgtwacwacrtcrttaagttacttccctaaagataactcagarttctttgagggygtwaatatgaayctygtwgattggttaagacaataygcwccdgaagatgarcaaacwgaaacatttttacgyggyttcttaggycgtatgytatttagtggwgaagaagttaagaaaaaagctagtgtrctttcaggtggagaaaaagtacgttgtatgctaagtaaaatgatgttatcaagtgcraaygtwcttttacttgaygaaccwacwaaccacttagacttagaaagtattactgctgtyaatgatgghcttaaatcattyaaaggttctatyatctttacttcwtatgacttygaatttatcaayacratygcaaaccgtgttatcgatttaaataaacaaggyggcgtttcaaaagaaattccatatgaagaatayttrcaagaaatcggcgttttaaaataa

SEQ ID NO: 229 - DNA, 900 bp, Staphylococcus aureus
atgggacttgtaattgarcatgttacgaaacgttttggyaagatgacggcagtaaatgatatktcattaragttagaatcaggyaaaatgttaggttttctaggaagaaatggtgcaggtaaaacaacgacatttcgtatgwttttaggcttaagtgaaccaactgaaggacacattacgtataacggtaaaaaactagataaaacaatgtacaatcgtattggttatttaccggaagaacgcggtttacatgggaaattgacagttgaagaagaattgaaatatttggcaactttaaagggaatgtcaaaaacagaaatacaacagcaaatatcgtattggcttgagcgttttgatattactgaaaaccgyaaaaaacgaattgatagtctatcaaaagggaatcaacaaaaaattcagctgttagcaagtatgttacataaaccagaattactaatattagatgagcctttcagtggtctagacccagttaatgttgagttattaaaagaagcagttaaagacttaaatgattggggcagtacaatcgtttatagttctcaccgtatggarcatgttgaagaattatgtgatgatgtttgtattttagataaaggtcaacttgttgtttctggtgatatcaatcatgtacgtgcatctaatggtaacaagaaagttgtcattgartcagaaacaacactaccagatttaacamacattagaggcatcattcatagtgaaaacatgaagcaaggtcttcagttgacgattgagaatgaagacgtakccaaagatatttatcaagttgtrgcacatcaaggttatgttaaacgattccaagttgtagaaccatcattacaagatatattcattgagaaggttggtggcaaggatgcataa

SEQ ID NO: 230 - DNA, 1206 bp, Staphylococcus aureus
atggtaacaagaagygtgttgaaatwtggcggatcatccgtcagtgattttacaaaawtaaaaaggatcgctgaaatgttaaaggagcgrgtcaatcaagatgaacaattaattgtcgttgtaagtgctatgggtaacacaacagatcaattaatgacgaatgtatcracmttgactaaarcaccaaaacaacaagaactggcattattattgacaaccggagagcaacaaactgtatcttatttatcaatggtattaaatgatatcggtrtgaatgcmaaagcaatgactggctatcaagcgggtattaaaaccattggccatcatttaaaaagtaaaattgctcaaattaatcctcaaacatttgaacaagcctttcaagaaaacgatattttagtagttgctggatttcaaggcatcaatgamcatcaggaattaacaactttaggcagaggyggttctgatacgaccgctgtggcacttgctgttagtaatcaaataccttgtgaaatttataccgacgttgatggtgtgtatgccactgacccaagacttttaccaaargctaaacgactagacatcgtctcatatgaagaaatgatggaaatgagcgctttaggtgctggtgtacttgaaacaagaagtgttgaattagctaaaaactataatatccctttatatttaggaaaaactttatcgaacgtgaaaggaacatggattatgtcaaatgaagaaatattagagaraaaagcagttrctggtgtggctttggataaacatatgatgcatgtaacaattagttatcccctacctgacaatcagctacttacccaactatttacggaacttgaagaaggtgctgtaaatgttgatatgatttcacaaatcgtcaacttggatggrctacaactatccttcacgattaaagatagtgattttcatcaaatttctatgattcttraaacattaaagaatcaatatgaagcattagcttataaaatcaatgagcattatgtcaaaatttcattaattggctcaggcatgcgtgatatgtcaggtgtggcatcaaaagcatttttgacattaattgaaaataatatacctttctaccaaacaacaacwtctgaaataagtatttcatacgtcattgatgattttaatgggcaacaagcggtrgaaaaactatatgacgcatttaacatttaa

SEQ ID NO: 231 - DNA, 96 bp, Staphylococcus aureus
atggaaaaaacatatctagtgctaatgatacttaacatgcaaaaatggcactatttaaatttttcaatttcagaaattttaaaaataaattcattt

SEQ ID NO: 232 - DNA, 990 bp, Staphylococcus aureus
atgacaaarttagcagttgtgggtkcaacaggattagtaggyacaaaaatgttggagacattaaatcgtaaaratattcctttcgatgaattagtattattttcatcagcacgttctgcagggmaagaagttgaatttcaagraaaaacatatacagtwcaagaattaactgatgctcgtgcwagtgaacatttcgattatgtattaatgagtgctggtggcggtacaagcgaacactttgccccactytttgaaaaagstggtgcaatcgttatagacaattcaagtcaatggcgtatggcagaagatattgatttaatcgttccggaagtcaatgaacctacwtttacaagaggtatcattgccaatccaaactgctctacgattcartctgttgtrccwytaaaagtattgcaagatgcttatggtttaaaacgagtggcatatacaacatatcaagctgtatcaggttcagggatgaaaggtaagaaagatttagctgaaggtgtaaatggtaaagcaccagaagcatatccacatccaatttataataatgtgttaccgcatattgatgtgtttttagaaaacggatatacaaaagaagaacaaaaaatgattgatgagacgagaaaaattttaaatgcgccagacttaaaagtaacagcaacatgygcacgtgtkcctgttcaagatagtcatagtgttgaaattgatgtaacrcttgamaaagaarcracwgcagaagatattaaagcrttatttgatcaagatgaycgcgttgttttagtagacaatccagagaacaatgaatatccaatggcaatcaattcyactaataaagatgaagtrtttgttggccgtatacgtagagatgattcattagaaaatactttccatgtatggtgtacatcagacaatttattaaaaggtgctgcattaaatgctgtacaagtattggaacaagttatgcgtttaaaaggagcgaattaa

SEQ ID NO: 233 - DNA, 648 bp, Staphylococcus aureus
atggaacaattacctcaagtaggttttatgaaatcattcgtwttattttggaaaaattatgtwaattttaaggggagatcaagacgtagtgaatattggtatatgryrytrtggcatttratacttatggttccagctgtgtgtgtgctaataataarcctatttmtaktctttatttctatagcggcrgataacgaarcattaatagttatgagtatattgatgattatccttacatctgtgtatacttttgtctatagtttggcaacgtttattccaaatttagcgttgtgcgttcgaagatttcacgatatatcaagaacaatgttatttccaatgattatgacagtattcagtattatattttatatagtattacagattatcgatagttattatgacagtgattttacmttaatgccgatgggtcttaatattttgttagtacttctttattttgtttatttaggcctaacaattgttatgatagtattcctatgctttgacagtaagccggcaaataaatatggcgaaagcccaaaatacccrtctwcaattaaaaatcaaycagtgacatctgaaacaccgraaamascgkddvmwwcwgataatcamyygwaaacaccggaagaaacagataatcaattg

SEQ ID NO: 234 - DNA, 888 bp, Staphylococcus aureus
atgacacatttatttgagggtgttggcgttgcacttacaaccccttttacaaataacaaarttaatmttgaagctttgaaarcacacgttaattttttactagaaaataatgcccaagcaatcatcgttaatggaactactgctgagagccctactttaacaacagatgaaaaagaackcattctaaaaacagttattgatcttgtagataaacgtgttcctgtcatagcwggaactggmactaatgatactgaaaagtcaatccaagcttcawtccaagctaaagccttaggggctgatgcaattatgttaattacrccctactacaacaaaacgaaycaacgtggtttagtmaaacaytttgaagcgattrcagatgctgtgaaattaccagtcgtgctgtacaatgttccttcaagaacgaacatgacaattgaaccagaaactgtagaaatattaagtcaacatccttatatagttgctttaaaagatgctacgaatgattttgagtatttagaagaagtgaaaaagcgmattgatacaaattcatttgcattatatagtggcaatgatgacaacgtcgtygaatactatcaacgtggcggtcaaggggttatctctgttattgccaatgtcattcctaaagaatttcaagcgttatacgatgctcaacaaagtggattagatattcaagatcaatttaaaccaatcggcacactgttatcagcyytatcagttgatattaacccaattcctattaaagctytaacaagttatttagratttggaaaytatgaattacgtytaccattggttagcctagaagatacagatactaaagtgcttcgtgaarcatatgacacatttaaagcgggtgaaaatgagtga

SEQ ID NO: 235 - DNA, 723 bp, Staphylococcus aureus
gtgaaaatattactaattggctatggygcaatgaatcarcgcgttgctagattagcagaagaaaaaggacatgaaatcgttggggtcattgaaaatacaccgaaagcaacaacgccatatcaacaataycaacatattgcwgatgttaaagrtgcmgatgttgcaatagatttttcaaatccraatctrytwttcccwttattagatgaagmktttcatttgccattagtygtggcaacaactggcgagaaagaaaaactacttaataagttagatgaattgagtmaaaatatrcctgtrtttttcagcgcgaacatgagttatggcgttcatgcaytgactaaaattttagcagctgctgttcccctacttgatgawttcgacatcgaattractgaggcacatcataataaaaaagtagatgcaccaagyggtacgttagaaaaattrtatgaygtgatygtatctttgaaagaaaatgtaacwcctgtktatgatagacatgaattaaatgaaaaacgccagccacaagatattggtatwcattctattcgtggaggtacgattgtcggtgaacatgaagttctatttgcyggcactgatgaaacgattcaaatcacrcatcgtgcacaatcaaaagatatttttgcgaatggtgcwatacaagcagcagaacgcttagttaatrrrccaaacggcttttatacgtttgacaacytataa

SEQ ID NO: 236 - DNA, 1050 bp, Staphylococcus aureus
atgagtgattttcaaagagaacagagaaaaaatgaacatgttgaaatagcaatggcycaatctgacgcaatgyattcagattttgataagatgcgttttgtgcatcattctatcccatcaattaatgtaaatgatatcgatttgacatcacagacrcctgacttaacgatgrcatatccgrtttatattaatgcaatgacgggtggtagcgagtggacgaaaaacatcaatgaaaagctagctgtagttgcaagagaaactsgcttagcgatggcagttggatcaacacatgcrgcattgagaaatccacgcatggctgagacrtttacgattgcgcgaaaaatgaatcctgaaggcatgatttttagcaatgttggtgcggacgtaccagtagaaaaggctttggaagcagttgaattacttgaggcacaagcgttacaaatccatgttaattctcctcaagaattagttatgcctgaagggaatcgtgaatttgtgacttggttagataatatagcgtcgattgtatcacgagtrtctgttccagtcattataaaagaagttggatttggtatgagcaaagaattaatgcatgacttacaacaaataggcgtyaagtatgtcgatgttagtggcaaaggtggtactaactttgtagatattgaaaatgaacgtcgtgcaaataaagatatggattacttatcatcatggggacagtctacagttgagtcattacttgaaacaacggcttatcaaagcgaaatttcagttttcgcgagtggtggtttacgtacaccactcgatgcaattaaaagtttagcacttggtgcaaaggcaactggtatgtcwcgtccgtttttaaatcaagttgaaaataatggcattgcacatacagtagcttatgtagaatcatttattgaacacatgaaatcaataatgacgatgttagatgctaaaaatattgacgacttaacacaaaaacaaatcgtatttagtccggaaatawtgtcatggatagaacaacgtarcttgaatatacatcgaggataa

SEQ ID NO: 237 - DNA, 720 bp, Staphylococcus aureus
atggtacaacatttaacagctgaagaaattattcaatatataagtgatgctaaaaartctacaccaatwaaagtatatttaaatggyaattttgaaggcatcacatayccagaaagttttaaagtatttggttcagaacaatctaaagtaatcttttgtgaagcrgatgattggaaacctttttacgaagcatatggtagtcaattcgragatatagaaattgaaatggatcgtcgcaattctgcyattccattaaaagacttaacaaatackaatgcacgwattgaaccaggtgcrtttattagagaacaagcyattattgaagatggtgctgtcgttatgatgggygcaacaattaatattggcgcagtcgttggcgaaggtacratgattgatatgaatgctactctcggtggtcgtgctacaactggtaaaaatgtacatgtaggggctggcgcagtattrgcaggtgtgattgaaccccctagtgcwtcaccrgttataatcgaggatgatgtattaatcggygcaaatgcagttattttagaaggtgtacgtgttggtaaaggtgctattgttgcagctggcgcgattgtgacwcaagatgtaccagctggtgcagttgttgctggtacacctgcraaagtgattaagcaagcttctgaagtacaagatactaaaaaagagattgtagcagcattaagaaaactgaatgactag

SEQ ID NO: 238 - DNA, 948 bp, Staphylococcus aureus
atggctttaamgatacggtatcaaactacataygaaccgtttaaagtagttgatgatatcaaagagataccaaaagatgcgactattgtttggtatgattttgatgaaccgaatgaacaagaaaatgaatggtttaaagcacattttarttttaatgatttagaagtggatgatgcaattaacggtatgccacgagctaaatataaatcttataaagattatcaatacttagtattycatagtattatggggtcaaactattcaccaatagcactaaatatttttatacaagacaatgtattagtaacatatcatcatcaaacgttggaatcattaaataaagtagtctataagtatatgaatacattagatgcagaattagattgtgcagatgtcgtcatattaattttagatatgatggttgataaatatttcaactttgtatatgcacttgaagatagtgtttatcattttgaagaccgccatgtagatgatcgctttaataaaatggtcatggatagtgtctttaagttacgttcggatttgattaaagtaaaacgtgtactgtttcctatgcargagctaattgatacaatgaaacaaaatggtgatttgattatagataataaacattcgctatacattcaacatatcgatgaccacttgattaagcaacgtaatatcattcgtactgcwcaagaaatgacaaaygaaatacgagaaaattttgagtcatacacgtcatttagaatgaatagtattatgcaagtaytracrttagtatcagttatattttcaccgttaacattcatagctgggatttatggtatgaactttgtaaatatgccggcattacatttacattatggatattatatttgcttagctgtaatgtttgttatagctgtcgtattaatcatctttttcagacgtaaaaaatggttttaa

SEQ ID NO: 239 - DNA, 1263 bp, Staphylococcus aureus
atgaagttaacagtagttggcttaggttatattggtttaccaacatcaattatgtttgcaaarcatggcgtcgatgtgcttggtgttgatattaatcagcaaacgattgataagttacaaartggtcaaattagtattgaagaacctggrttacaagagrtttatgaagaggtactgtcatcgggaaaattgaaggtatctacaacgccagawgcatctgatgtttttatcattgccgttccgacrccgaataatgatgatcagtaccggtcatgtgacatttcgctagttatgcgtgcattagatagtattttaycatttttaraaaaaggraatacyattattgtagagtcgacaattgcgcctaaaacgatggatgattttgtaaaaccagtcattgaaaatttaggrtttacaataggtgaagatatttrtttagtgcattgtccagaacgtgtactgccaggaaaaattttagaagaattagttcataacaatcgyatcattggcggtgtgactraagcttgtattgaagcgggkaaayrtgtctatcgcacattygttcagggagaaatgattgaaacagatgcacgtactgctgaaatgagtaagctaatggaaaacacatatagagacgtgaayattgctttagctaatgaattaacaaaaatttgcaayaacttaaatattaatgtattagwtgtgattgaaatggcaaacaaacatccgcgtgttaayatccatcarcctggtccaggwgtaggcggtcattgtttagctgttgatccgtactttattattgctaaagaccctgaaaatgcaaagttaattcaaactggacgtgaaattaataattcaatgccgkcytatgttgttgatacaacgaagcaaatcatcaaagyrttgagygggaataaagtcacagtmtttggtttaacttataaaggtgatgttgatgatataagagaatcrccagcatttgatatttatgagctattaaatcaagaaccagacatagaagtatgtgcttatgatccacatgttgaattagattttgtggaacatgatatgtcacatgctgtcaaagacgcatcgctagtattgattttaagtgaccactcagaatttaaaaatttatcggacagtcattttgataaaatgaagcataaagtgatttttgatacaaaaaatgttgtgaaatcatcatttgaagatgtatygtattataattatggcamtatatttaattttatcgacaaataa

SEQ ID NO: 240 - DNA, 444 bp, Staphylococcus aureus
gtgtcattagacattttgtcaacaacacgcatcattgtaaaagaacaagtaaatgattggactgaagctataactatagcttctcagccattactacaagaacaaattattgaacaaggctatgttcaagcaatgattgatagcgttaatgaacttggaccttatatcgttatcgcacctgaaattgcaattgcacatgcaagaccgaacaatgacgtacatcaagttggtttaagtctattaaagttgaatcaacatgtggcattttgtgatgaagatcactacgcatcwctcatttttgtattgagtgccatcgacaatcattcacacttatctgtattacaaaatttagcaaccgtactgggcgataaccaaacagtccagcaactattaactgcaamaaaygcacaagacattaaaaacattttaaaggagcatgattaa

SEQ ID NO: 241 - DNA, 1152 bp, Staphylococcus aureus
atgaatgaattagaatttgttacgaaacatcgccgtcatttacatcaacatcctgaattaagcttacatgaatttgaaacaactgcttatattaaagcgtttttagatagtttaaatattaaatacgattgcccattggaaactggcgtcattgcatacttagaaggtaatggctcacatacgatagcgtatagagctgatattgatgcvttacctattttrgaggaaaatgatgtrccttatcgcagtcaatctgatcatgtgatgcatgcttgtggacatgatggtcatacaactrcattaatgctttttgtacaacgttgcaaagacatgcaagaygcrggkcaattaccgcaaaatgtcgttttcattttccaacctgcagaagaaactggtggcggtgcaaatcgattaataaaagccggtgcctttgataagtatccaattgaagcggtatttggtattcatgttaacccatttgctgatgaaggcattgcagtgataagagatgaagaaattacggccagcgcaacagagtatcgctttttcttaacaggcctgtcaagtcatgttgctgataaagaacaagstcattcttgtggtgaagcattacaacatgtattaactcaaatatcacaaattcaacaatttcaccttaacggtttraaacgaaatattgttcatattggtcattttaaagctggtgaagcgattaacactgtaccaagtaatggytatttagaaggtacwattcgtacatatgatattgatgatttaacaatcgttaaaaatcaaatgcacaagatagcagaaagtgtcaagcttctgtttaatgtagahtgtgaagttaaatttgcagaaggttatccccctacaatcaatagtccgaaattacgtactcaaatagaggacgccttaataaaagctgatttaaatgtctatgacaaaccaacgccattcttatttggggaagattttagtttttatggtcaacaactagctccagcttactttgtttttataggaacacgaaatgaagataaaggttttgtaactggtttgcacacatcayatttaaattttgatgaaaaagygttaataaacgtgrttaatttttacgaaaatttattaaataattacaaagaggtgtaa

SEQ ID NO: 242 - DNA, 921 bp, Staphylococcus aureus
ttgattagaaaccgtgttatgaatagcgttgtcaataaatatttgcttcacaatcgctcgattatgtttaaaaatgatcaagatgttgaaagatttttttataaaagagaaattgaaaatagaaaaaaacataagcagccttcaacattaaatgttaaagcaaatttagaaaaattrtcattrgatgatatgcaagtctttcgctttaatttcagacatcaaattgataagaaaattttatatattcacggtggattcaatgcactacaaccatcaccgttccattggagattgttggataaaatcactttaagtacattatatgaggttgtactgcctatctatccaaagacaccagagtttcatattgacgayactttccaagcgatacaacgtgtttatgatcaattagtatctgaagtaggmcmtcaaaatgtcgtagtcatgggtgatggttcaggtggtgcactggcattatcctttgtacaatctcttttagayaatcaacagccattaccgaataaattgtatttaatctcaccaattttagatgcaacactatctaataaagatatttcggaygcyttaatcgaacaagatgcggttctaagtcagtttggtgtcaatgagattatgaaaaaatgggcgaatggcctaccattaacagataagcgcatatcrccaattaatggcacaatagaaggattrccaccagtttatatgtttggtggtggacgtgaaatgacacatcctgatatgaagctrttygaacaaatgatgttgcaacatcatcaatacattgagttttatgattatcctaagatggtacatgattttccaatttatccaattagacaatcacataaagctattaaacaaattgccaaatcgatagatgakgatgtaacacaaaayaactaa

SEQ ID NO: 243 - DNA, 1086 bp, Staphylococcus aureus
ttgacagcaacatggtctgtaaataagaaaatatttttacaaaatgcaatcacagtcaaaaacaatcagccattaatggcagttgttaaaaataatgcatatcactatgacctagaatttgctgtaactcagtttatccatgcaggtatagatacatttagcacaacatcactacgagaagcaattcaaattagacaacttgytccagatgcaacaatctttttaatgaatgcagtttacgagtttgatttagtccgygaacatcaaatacacatgactttgccgtcgttgacatattactataaccataaaaatgatttagcwggtattcatgttcacttagaatttgaaaatttattacatcggtctggatttaaagatttaaacgaaattaaagaagtattgaaagatcaccatcataatcaaaatgcaaaaatgattattagtggtttatggacccattttggatatgctgatgaattcgatgtgtcagattataatgttgaacgttcacaatggatggaaattgttgaagcacttttatctgaaggttatcagttcgacctaatccatgctcaaaatagtgcgagtttttatcgggaaggacaaatattactaccccaccatacacatgcrcgtgtaggtattgcgttatacggttcaagaccatatagttcactgaatcaacatgawatagttcagtcattractktaaaagcacatgttattcaagtgcgcgaagtacaagctggtgattattgcggttatagctttgcctttgaagtgactaaaaacaatacaaaattagctgtagttgatatcggttatggcgatggaattttamgaacwcgtgctaaacatgaagcacttatcaatggtaaacgctacccgatacgtgcattaatgatgagccatatgtttgttgaagtagatggcaatgtacatgcacaagatgaagttattctttataataatgatatccgcatcgatgaatatacctttaaaggtgttggtgcaaattctgaacaattaagtgctatgaatcatgattctttaaaaaaggagtacatttcaaatgactgttaa

SEQ ID NO: 244 - DNA, 1933 bp, Staphylococcus aureus
atgactacgaccttcattattagctacattrttttagcgctcattattgttggkgttatcaatttattwttaataagatcaagaaraaaagsmaaacgccaacaaaaggaacaacawtttrcgacacgtcaatcaaatcaatctaaatttaaagcwagtgatttagacaraacaactgatcaatcgwcacaacrtaygrcgcrtgaagagkyrcgtrttgacaatmaagayratcakarycaagttagtctaaayrrwyasacaraggggtctgarmaagatcaagmakcattcactrataataakgvtgakgaagmagttgctgctaaaaatcctramtcagaagaatataaagtraatgaraaaatwaaaaaagaacataaaaactttatttttggtgaaggtgtttcacgcggtaaaatattagcrgcattattattcggtatgtttattgcgattttaaaccaaacattattaaatgttgctttrccaaaaattaatacggaatttaatatttctgcgtcaacagggcaatggttgatgacgggattcatgttagtaaacggtattttaataccaattacggcgtatctatttaataaatattcatatcgaaaattatttttagttgcgttagtactctttacaattggttcattaatmtgtgcgatttcaatgaatttcccaatcatgatggttggacgtgtattacaagccattggtgcaggtgtactaatgccattaggttcaattgttattattacaatttatccacctgaaaaacgtggtgctgccatgggtacaatgggtatcgcaatgattttagcacctgcaatyggtccaacattatcaggttatattgtacaaaattaccaytggaatgtgatgttttacggtatgttcattatcggkattmtygcwatyttarttggttttgtatggtttaagttatatcaatatacaacaaaccctaaagctgatatcccaggyatcatttttagtacgattggttttggtgctttgttatayggyttytcagaagckggsaacaaagghtggggttcwgtwgagatagaaacaatgtttgcgattggtattatctttattattctattygtwatwagagaattaagaatgaarkcrccaatgttgaatttagaagtattraaattyccaacatttacaytaacaacartwattaatatggttgtaatgttragyttrtatggtggtatgattttattaccratttayttacaaaatttacgyggwttctcagcattagattcyggattgttattattacctggttctctaattatgggtctactwggaccatttgcwggtaarttgttagayackattggtttaaaaccwttagcyatytttggtattgctgtmatgacttatgcaacatgggaattaactaaattraatatggatacrccatatatgacaatcatgggyatctatgtactwcgttcatttggtatggcatttatwatgatgccaatggtaacwgcagctattaatgcgttrccgggacgactkgcmtcycatggtaatgcyttcttaaatacgatgcgtcaaytagcwggytctataggwacagcaatcttrgttactgtwatgacaacrcaaacwacacaacayttatcagcttttggggaagagttagataaaacgaatcctgttgtacaagatcatatgcgtgaattagcatcrcaatatggyggwcaagaaggcgcaatgaaagtgytaytacaatttgtaaataaactagcaacrgttgaaggkattaatgatgcatttatagttgcaacgatatttagcatcatcgcyttaattttatgyttatttttacaaagtaayaaaaaagcaaaagctacrgctcaaaagwtagawgcaagmtmawagtawcaatcatgaataa

SEQ ID NO: 245 - DNA, 1266 bp, Staphylococcus aureus
atgactgttaaatataatcaaaatggcgaattaacaatggatggtattagtttaaaaacgattgcrcaaagctttggtacacctaccattgtttatgatgaactacaaattagagaacagatgcgccgttaccatcgcgcatttaaagatagtggattaaaatacaatatttcatacgcctcwaargcatttacttgymttcaaatggtcaaactkgtrgctgaggaagatttacagttagatgttgtttctgaaggtgaattatatacrgcwttagaagcrggwtttgaaccragtcgcatccatttccatggtaacaataaaacgaaacatgaaattaggtatgctttagaaaataayatcggttattttgttatagattcattagaagaaattgaattaatagaccgctatgctaatgatacggtkcaagttgtattacgagttaatccaggtgttgaagcacatacacacgaatttattcaaactggkcaagaagatagtaagtttggattatcaattcaatatggcttagctawaaaagcaattracaaagtscaacaatctaaryacttaaaattaaaaggtgtacattgtcatattggttcacagattgaaggtacagaagcatttattgaaactgctaaaattgttttacgttggcttaaagagcaagrcattcaagttgaattattaaaccttggtggtggctttggtattaaatatgttgaaggtgaygaaagtttccctatcgaaagtggtattaaagatattacagacgcaataaaatccgaaattaaagttctaggtatagatgcaccagaaataggtattgaaccrggacgatcwattgtaggtgaagctggcgttactttatatgaagttggaaccattaaagaaattccagagatwaataaatatgtttcaatcgatggcggtatgagtgatcatatcagaactgcactttatgacgcaaagtatcaagcattgcttgttaatagaaatgaagaagcagatgacagtgtaactatagctggaaaattatgtgagtctggtgatatcattattaaagacgctaaattaccttcatcagtcaaacgtggagactatcttgctatattatcaactggtgcatatcattactctatggcatccaattacaatcaaatgcaaaagccttctgtgtttttyttaaaagatggcaaagcacgtgaagttatwaagcgacaatcgttaagacaactyattattaatgatacaaaataa

SEQ ID NO: 246 - DNA, 270 bp, Staphylococcus aureus
atgagacatatacatttacaagtattcggacgcgttcaaggcgtcggatttagatattttacacaacgcattgcaatgaactataacattgtcggtactgttcaaaatgtagatgactatgtagagatatatgcacaaggggatgacgcagatatagagagatttattcaaggtgtaattgaaggtgcctcaccagcatcaaatgtaacragccatcaacttgaagagttagaactaaatcaaaaattatcggattttcgatcaatataa

SEQ ID NO: 247 - DNA, 1209 bp, Staphylococcus aureus
atgaatgatttaacgcattttaacaagcgttcaccgatatttattattattttaggatctttgackgccattggagcattatcratagatatgtttttgcctggattaccagatattagacatgattttcaaacaacgacgtctaacgcacaattaacattatcgatgtttatgattggtttagcgttyggtaatttgtttgctggtccaatttcagattcaactgggcgcagaaagccgcttattatagctatgattatttttacattagcaagtttaggtattgtttttgtacataatatttggctgatggttgcattaagatttcttcaaggagtgacaggtggmgcagcagcagttatttcaagagctatagcaagtgatatgtatagtggtaatgaactaactaagtttatggcattattgatgcttgttaatggtattgcaccagttgttgcgccaacaatagggggcataattttaaattattctgtctggcgtatggtctttgtcattctgactatctttggyttcgtcatggtcataggttctttattaaaagtacctgaatcattaacagtgacaaatcgtgagtcaagtagtggattaaaracaatgtttaaaaacttcaaaatattattgaagacgccacgttttgtattaccaatgctcattcaaggtatgacatttgtaatattatttacttatatttctgcgtctccgtttattattcaaaaaatttatggcatgactgcaatacaatttagttggatgtttgcaggaattggtattacgctcattatatcaagtcaacttactgggtaccttgttgattttatagactcacaaaaattgatgagaggcatgacgatgattcagattatcggtgtaattttagtgacgattgtattgcttaatcattggaacttttggwttttagcgataggatttatcattttaatagcaccagtgacaggtgttgcgacacttggttttacaatagctatggatgaaagtagtagtggtagagggagttcatcaagtttattaggtttagtrcagtttttatttggtggtrttgcatcgccattagtgggggtaaaaggtgaagataatcctataccttacataattattattatagctacagcagttatattaattattttacagatwtataatatgaaggtatttaaaacaaatcgatga

SEQ ID NO: 248 - DNA, 630 bp, Staphylococcus aureus
atgacagtgagatataatatttctcatatatttggggtgttagtgggaattcctgtagcgtttttaacaagcatatttgggatrattgcacttgatgtatcttttttaattgatatgtctattggtattgttggctttttaatgacatacctaccgatacaaaaactcacttcacgcaaatatttaaacgaaattggtttgactagaaaagactatcgctatattcgaaatcagttaaatcatacacaccaaaaacttagaggtattttaaaaacgtatgtcaatataagatcaattaaagattttaggcarattaatgatatataccaaatttcacgttctatttatacgacagttagacagagacctgcatcattttataaagttgarggctttttttattctcatattgataatgctttaaatttggttgatgcatatacacgtctagcaaaaatgcccaaaaaatcaattaatgaacagcaaaarttagaacaaacacgaattactttggatgaggtcaaacgaacattaatcgctgatttaaagcgtctcaacgaagatgattatgaacgtttagatattgaaatggaattaaataagttacatcaaaarcatcatcaagattga

SEQ ID NO: 249 - DNA, 1137 bp, Staphylococcus aureus
atgactgaaaataaaagtttcaaagaaagccatccactagatgattttataagcgataaagaattatcgaatactactattcaaaaagaaaagttaacaattgaacaacaaaaacaggtagacacaatcagtaaacaaattaaccctttagacaatgaaggtttattagcgtttggttctgatttacagaaacaaatgtctcaattttcacatcaaatgttggatgargtacaaagtaaagatgttggtcctattggagatactttgtcagatctaatrtcaaaactaaagtcagttaatccaaatgagttaaatactgataaaccatctatgttaaaaagaatttttagcagagcaaagtcgtctatcaatgaaatcttttcaagaatgcaatcagttagtgctcaagtcgatcgcataacgattcaactgcagaaacatcaaacacatttaacaagagatattgaattattagatacgctatatgataaaaacaaacaatactttgatgacttatcattgcatatcattgctgcacagcaaaaaaagttgcaattagaaaatgaaaagctaccacaattgcaacagcaagcgcagcaatccactaatcaaatggatattcaacawgttkcagatatgcagcaatttatagatagactagataaacgcatatatgacttacagctttcaagacaaatagckttgcaaactgcgccacaaattcgtatgattcaaaatgttaatcaagcmcttgccgagaagatacaaagttcaattttgacaagtattccactatggaaaaatcaaatggccattgcgcttacattaatgagacagcgtaatgcagttgctgcacaacgagctgtcactgatacaactaatgatttattaacagcaaatgctgaaatgttgaaacaaaatgcgattgaaactgcaacagaaaatgagcgtggcattgttgaycttgatacattgaaacgtacacagcgtaacattattgagacaattgaagaaacattaattattcaacaacacggtcgcgaagaacgacaattagctgaaaaagaattacaacaattagaacaagatttaaagtcacatttagtgaacatcaaaggamcgaataaacaatcataa

SEQ ID NO: 250 - DNA, 1383 bp, Staphylococcus aureus
atgaaatcttgcccgaagtgcggacaacaagcacaagatgatgtacagatatgtacacaatgtggacataaatttgatagtcgtcaagcattwtatagaaagtcaaccgatgaagatatacaaactaataacatcaagatgagaaaaatggtgccttgggcaattggttttttcattttaatcttaattattatattgttctttttactaagaaacttcaattcacctgaagcgcaaactaaaatattagtgaatgcgattgagaataatgataaacaaaaagtagcaacattattaagtactaaagataataaagtagattctgaagaagcraaagtatacattaactatatcaaagatgaagttgggcttaagcaatttgtcagcgaccttaaaaatacggtacataaattgaataagagtaagaccagygtagcttcttatattcaaaccagatctggtcaaaatatattacgtgtaagtaaaaatggcacrcgttatatctttttcgataatatgagctttactgcacctaccaagcaaccaattgttaarccgaaagaaaaaacaaaatatgagtttaaatctggtggtaagaaaaagayggttatagctgaagcaaataaagtgacgccaataggtaattttatacyggggacatatagaattccagctatgaaatcaactgagaacggtgattttgcaggcyatttaaaatttgattttagacaaagtaattctgaaacggtagatgttactgaagattttgaagaagcaaatatawctgtaactttaaaaggcgatacaaaattaaatgatagttctaaaaaagtaactataaatgaccrtgaaatggcattttcaagttccaaaacgtatggtccatatccacaaaataaagatattaccatttcagcttcaggtaaagcgaaagrtaaaacatttacaacacagacgaagacgattaaagcyagcgatttaaaatacaatacagarataactttgaattttgacagtgaagatatcgaagactatgttgaaaagaaagaaaaagaagaaaacagcttgaagaacaaattgatagaattctttgctggatattctttagcgaataatgctgcgtttaatcagtcrgattttgattttgtatcrtcatatataaaaaaaggatcatctttttatgatgatgtaaagaagcgtgtatctaaaggaagtttaatgatgattagttcaccacaaattatagatgcygaaaaacatggtgataagattacygcaaccgtaagattartaaatgaaaacggtaagcaagtagataaagaatatgagcttgaacaaggyycgcaagaccgcttgcaattaatcaagacatcagaaaaatag

SEQ ID NO: 251 - DNA, 192 bp, Staphylococcus aureus
atgccggaacaattatccgtaagaaaatggagacttgtaagggacttgaaacagcaagaagtagcagatatattgggcgtcaatgcaaagacagttggtcattgggaaaaggatgacactaatttaagtaatgttacagtttacgctttagcaaagttatatgatattgaggtagaccagataaaggtctaa

SEQ ID NO: 252 - DNA, 177 bp, Staphylococcus aureus
atgaacgaagaaaaattaaagatgattctcttacttcttgaagatataccaagagacgaatggaatcgattagtaaatgaagtaaataatcaatacagttaccaagctgacaaggtaggacttgccagtgataactgtcaacaaatagcaaataactataagcactatggattttaa

SEQ ID NO: 253 - DNA, 228 bp, Staphylococcus aureus
gtggaacaacaaatgaacaaaaaatcagaagggttagacataatcataccaaggattttcagaagagatcatgcgtcagtagaatctttaacagaaaatgaacgtcgactaagaaaggaaatattaggaagtattaaaaaaggtgattacagctacttagaaataaacaaagttttctatgcattagatagagaacttcaatacagagcgaataataacaaactttaa

SEQ ID NO: 254 - DNA, 261 bp, Staphylococcus aureus
atgactaaaaattataaagacatgactcaagacgaattaagggatttattggctgaaaagaatgcagaattgtttgatttagcgagcgaaatcgatgaagaaactgaatttgacgttttacttttttcaaatgtagggattagcaacggagattttacaccgtcgtcacattgtgtgattgggaatgttgttgatattgctaatttattgaaacgtagagctgtttaccgagatatcgctgatgttatcaaaatgcgttaa

SEQ ID NO: 255 - DNA, 705 bp, Staphylococcus aureus
atgtataatgaaattttaggactagttacgtttattgcaacgttcgtrcttatggtacttatgtatcgcttttttggtaaacaaggtttaattgcatgggttgcaattggcacaatcattgccaacatacaagtgattaaaactgtagaaatctttggtatttcagcaactttaggtaatgtcatgtttgcttctatttatttagcaacagatatwttaaaygatatttatgggcgtagagttgcaaaaagagcagtttggttaggcttttcatcaacattaattatgattattgttatgcaattgtcattacattttattcctgcaccagaagatatggcacaaaaagcattacacgcaatctttgatgttgtgccacgyatwgctttaggctcaatygtcgcatatattattggtcaacatattgatgtatttatcttttcactaattaaaaaagtatttagttctgataaaacgtttttcatccgtgcatayggtagtacatttttaagctcaataattgatacagctwtatttgtagctatcgcwtttatcggaagtttacctggtacagttgtatttgaaatatttattacaacktacgtaytaaaattagcttcaacagttttcaatgtaccatttggatatattgctaaatcattttatcgtaaaggtaagattgataarttagatcaaggctattaa

SEQ ID NO: 256 - DNA, 456 bp, Staphylococcus aureus
atggtaaaacatttacaagaccatattcaatttttagagcagtttataaataacgttaacgcattaactgcaaaaatgttgaaagatttacaaaatgaatatgaaatttcattagagcagtctaacgtattaggtatgttaaataaagaacctttgacaattagtgaaatcacgcaaagacaaggwgtaaataaggccgcagtaagccgacgaattaaaaagttaatcgatgctwaattagttaagttagataaaccaaatttaaatattgatcaacgtttgaaattcataaccttaactgacaaaggtagagcatatttgaaagaacgtaatgcgattatgacagatattgcgcaagatattactaatgatttaaattctgaagatattgaaaatgtaaggcaagtattagaagtcatcaatcatcgcattaaaacatatagcaatcataaatag

SEQ ID NO: 257 - DNA, 666 bp, Staphylococcus aureus
atggcattagtygttraagatatcgtcaaaaatttcggagaaggtttgtctgaaacaaaagttttaaaaggtattaattttgaagtggaacaaggggaatttgtcattttaaatggtgcctctggttctgggaaaacaacattgctaacgatattaggcggattgttaagtcaaacgagtggtacagtgctttacaatgatgcrccattgtttgataaacagcatcgtyctagtgatttrcgattggaagatattggttttatttttcaatcttcacatttagttccttatttaaaagtgatagagcaattgacactcgtaggycaagaagcgggaatgaccaaacaacaaagttcaamaagagcaatacaacttttgaaaaatattggkttagaagatcgcttgaatgtatatccgcatcagttatctggcggtgaaaagcaacgtgttgcgattatgagagcatttatgaataatccgaaaatcattttagcagatgagccyacagcaagtttagatgccgatagagcaacaaaagttgttgagatgatacgtcaacaaattaaagaacaacaaatgattggtattatgattacacacgatcgaagattatttgaatatgcagatcgagtgattgaattagaagatggcaaaataactgattag

SEQ ID NO: 258 - DNA, 525 bp, Staphylococcus aureus
atgaaagaacgactaaaagcatttttatattttttaatgtccatattccttttcccttttacgtttttgtatttgttagcttaccatcactttgaagacaagcaacattttttaacaacatgtatagagtatatagaacttgtttatatattatttatgcatagcattttaggcaaaaaagtaaatgaaccttttaacatcgacgaaatagatttttggttgaggtttggtttcaagctaaaaagatatacaggtttaagtaaagagggaataaagttgttacgtcaagaaatcccagttttacgctacgataaaccagaagtaacaagagactatatagaatacattgatattaattatacggcagacacgtattattgcttttataaagacgggacgtttaggttctatgatgattataccaaccaaaaactaaaaggaaatattgattcagaatttttcaaaaaactagaatcatggaacctcctagtacaaaaaggaaagagaataagtgatgatatttaa

SEQ ID NO: 259 - DNA, 321 bp, Staphylococcus aureus
atgacgaaacaaaacaacacctataagcatggacgtaagtcttaccgatatgattggttctatcattctaaagcatggaaaaagctaagagaaatagcactagatagggataacaacctatgccaaatgtgcttgcgtgaagggaaaattacagatgcaaacatagtgcatcacattgtgtatgtaacagaagacttcagtaaagctttagatttagaaaatttgatgtcagtttgctatacctgtcataaccaaattcatgcaaatgataaaaacaaagataaatatagaaataaaaagtttcgagttgaaaagatttaa

SEQ ID NO: 260 - DNA, 180 bp, Staphylococcus aureus
ttggcaattctcacaggattagcagccgttgatgaagtaccaactcgatatttatcacgcaaaggtttcactgttacattgaacgaagttgtagctgtattgccgcttgtatcagttgctaataaattgattgtcttattagttgctgatgtcacatttggtgccgttgcagaaacatgt

SEQ ID NO: 261 - DNA, 1056 bp, Staphylococcus aureus
atgaaattagcgataaaagagattatgttttacaaatttcgttatattttaatcacattaatyattcttttattaagtattatggtgttatttattagtggtttagctcaagggcttggtagggagaatatttcgttatttgaacactttgataatgatgaatatgttgttcaaaaaatgaaagagccgcaaattgagaaatcgcaacttagtgatacgcaacagaatcaaattaaaaaggtwattcatcaagaaycatataaaatgaatattcaaacattgaaattatctaataaagaacaagatgtgattacaatgaatgacgttaaacaacaacgcatacaacttaaaaaaggtgattatcctaaaaatgctcatgaggtcgctattaatgataagttagctgcagacaacattagagtcggrgatagattacattttaaaaataattcaactagttatagagtttctggtattttaaacgacacaatgtatkcgcatagttccattgtgctattgaacgataacggatttaatgcattgaataaggttaatacggcattttatccagtgaaaaatttaacrcaacaacaacgtgatgagcttaataaaataaatgacgttcaagtkgtgartgaaaaagatttaacagrtaatattgcgagttatcaagcagagcaagcaccgttaaatatgatgattgtkagtttgtttgctattacagcaatygttctaagtgcatttttctatgttatgacgattcaaaaaatatcacaaattggcattttgaaagcaattggtattaagacaagacatttattgagtgcgttagttttacaaattttaacactaacaataattggggtaggtattgctgtgatcatcatagtaggactatcatttatgatgcckgtaacgatgcctttttayttaacaacgcaaaatattttattratggtggggatatttatattagtagcgattttaggtgcctcactatcatttatcaaattatttaargtggatcctatcgaagcaattggaggtgcagaataa

SEQ ID NO: 262 - DNA, 324 bp, Staphylococcus aureus
atgaaagggggttttcttatgaaattaacaaaaaaacagctgaaagaatatattgaagactacaaaaaatctgacgatatgttaattaatttatatttagaaacatatgaattttattgtcgattacgggatgaattgaaaaacagtgatttgatgatggagcataccaataaagctggagcaagtaatattgttaagaatccattaagtattgaactgacaaaaacagttcaaacactaaataacttactcaagtctatgggtttaactgcagcacaaaggaaaaagatagtgcaagaagaaggtggatttggtgactattaa

SEQ ID NO: 263 - DNA, 96 bp, Staphylococcus aureus
ttggcatttattccaacaggattattgattgttggtggaatgtcatctggcaaaatagtaacagcattactcatattagatgcaactactttatta

SEQ ID NO: 264 - DNA, 1479 bp, Staphylococcus aureus
atgacaacacaacatagcaaaacagatgtcatcttaattggtggcggtattatgagtgcaacattaggaacattacttaaagaattatcacctgagaaaaatattaaagtgtttgaaaaattagcacaacctggcgaagagagttcaaatgtatggaataatgccggtacagggcattcagcactttgcgagttgaactatacaaaagaaggtaaggatggcacagttgattgtagtaaagcaattaagataaatgagcagtaccaaatttcaaarcagttttgggcatatttagttaaaacaggacaattagataacccagatcgctttattcaagcggtgccacacatgagttttgtcattggcgaagataaygtagcttttataaaaagtcgtgttgcaacgttaaagaaaartrttttattcgaaaaaatgaaattatcgcaagatgaagaagaaatgaaatcttgggtaccgttaatgattgaaggkcgtaagtctgatgaaccaattgctttaacttatgatgaaactggtacagatgttaactttggtgcgttaactgcaaagttatttgawaatttagarcaacgtggtgtggraattcaatataagcaraatgtattagacatcaagaaacagaaatctggrgyatggctagttaaagttaaagatttagaaactaaygaaacgacaacatatgaatctgattttgtatttattggtgctggcggtgcgagtttaccattactccaaaagactggrattaaacaatcaaaacatattggtggtttcccrgtaagtggattattcctgcgctgtacaaatcaagaagtgattgatcgtcatcatgctaaagtgtacggaaaagcagcagtgggtgcgccaccaatgtcagtgccrcacttagatacacgttttgtagacggcaagcgttcattgttatttggtccatttgcaggtttctcacctaaatttttaaaaacaggttcacatatggatttaattaaatcggttaaaccaaataatatcgtgacgatgttatctgcaggtatcaaagaaatgagtcttacgaagtatttagtgtcacaattgatgttatctaatgatgagcgtatggatgatttaagagtctttttcccaaatgctaaaaatgaagattgggaagtgattacagcagggcaacgtgtccaagtaatcaaggatackgaggattctaaaggtaacttacaatttggtacygaagtyattacgtcagatgatggcacattagctgcattacttggtgcatcacctggtgcgtcaacagctgtagatattatgtttgatgttttacagmgatgctatcgtgatgaattcaaaggrtgggaaccaaagattaaagaaatggtgccgtcatttggttatcgcttaacagatcatgaggatttatatcayaaaattaatgaagaagtaactaagtatttacaagttaaataa

SEQ ID NO: 265 - DNA, 468 bp, Staphylococcus aureus
ttgaaagttattgagaaagttcattatgaagatattttagaaccagaaatagttcaattaattcagccattagttaaggacaaaatggatcaactttttattacttctgaacactttgctattgacatagacaagctattatttcaacttaatttaaaagttaaatatattaaaatggagggtaatacttcgggttatttaagtggaagaacgatttatatcaataataatcactcgattaataatacaagatttgcaatagctcgtgaactcggccgttatttatacaaaattaaagataacaacgataatagtctaaagaatttacatgaaatgatttatgaaagcgacgtaaatcagttttcagtcgacttacttatgccaaaaaagcaaatagaggcattagtctataatttttatgaagtcaataatatcaatttaagttctggtttatctgaaaaagaatga

SEQ ID NO: 266 - DNA, 1146 bp, Staphylococcus aureus
atgaaaaaaattatggttattttcggtacgagacccgaagcaataaaaatggcaccattagtaaaagaaattgatcataatgggaactttgaagcgaacattgtgattacagcacaacatagagayatgttagatagtgtgttaagtatatttgatattcaagctgatcatgatttaaatattatgcaagatcaacaaacrttagcrgrcmttacggckaatgcrcttgcwaaacttgatagcatcattaatgaggaacarccggatatgattttagtacatggtgatactacaacgacttttgtaggaagyttggcagcattttatcatcaaattccggtyggacatgtagaagctggacttcgaacacatcagaaatactcaccatttcctgaagagttaaatcgagtcatggtaagtaatattgctgaattgaattttgcgccaacagtaattgcagctaaaaatttactttttgaaaacaaagacaaagagmgtatctttattacyggaaatacagttattgacgcattgtcaacaacagttcaaaatgaktttgtttcaacgatyattaataaacataaaggcaagaaagttrttttactaacagcgcatcgtcgtgaaaatattggrgaaccgatgcatcagatttttaaagcagtwagagatttggcagatgaatataaagatgttgtcttcatttatccaatgcatcgtaatcyaaaggtaagagcgattgccgaaaaatatttatctgggagaaatcggattgaattaattgagccattagatgcgmttgagttccataattttacaaatcaatcgtacctcgtrctgacagattctggtggtattcaagaggargctcctacatttggaaaacctgtgttggtattaaggaatcatacagagcgtccygaaggcgttgaggcgggaacatcgagagtaattggcacagattatgacaatattgttcgaaatgtgaaacaattgattrwggatgatgaagcrtatcaacgtatgagtcaagcgaataatccatatggtgatggacaagcatcacgacgtatttgtgaagcaatagaatattattttggattgcgywcagacaagccggatgaattcgtacctttacgtcryaaataa

SEQ ID NO: 267 - DNA, 1956 bp, Staphylococcus aureus
ttgttaagttatagacaaatygaaattttgtatcttttaattcatgagcaaacgtttattccaatcaataccattgctaatcaacttggtgtatcacctcgtaccattcaataygatatagcatatattgagcaatatgctgaaacttatcattaccaagtcagccgtaataaagctgcaggcatcaaagtaacaacagctmacrcracrmtattaaatgaattagagcacaatctaacraatcaaattcatttttcaaaagatgarcgactcacacatatcgctttaaagttattcgaaacaacygatcctgtttcaacaaagcaacttgcgcaagatgttaatgtttcgcgtcggacaattgcagatgatattaaaatgattcaagcccaactagatcaataccatttaaagttaaattatgtccacaataaaggattcaatrttattggtgaggaagatcattatcgtaaagcgtatgcacactttatacatcaatatatgaaacaagctgcaccttttatagaggckgatatctttaattcagaatcaatcgcattrgttcgccgtgccattattaagacattaaatagtgaaaattatcatttagttcagtcggctatcgatggcttaatctatcatatackcattgccattcagcgtttaaatgaaaatttttcgttcgatatacctatcaatgaaattgataaatggcgacatactaatcagtatgctattgcttcaaaaatgatagaaaacttagaacgcagttgtaatgtcacatttccagagtctgaaattatctttatcacgttacatttactaggctctaaaatgacygaacatacagcatcttcaattacctttgaataccatgatttatcgcaaaatatacatgaattgatcacttgtgttagccaagaattaggcattgatatgtcaaaagacaacaagttrcataccagtctkatcacacatatcaaaccagctatacatcgtattaaatacgatatgctacaacctaatcctttgaggcaagaagttatgcgtcgctatcctcaaatcattgaagccgttagcaagcatattagyccaattgaacaagatgctgctattcgcttcaacgaagatgaattaacatacattacaattcacttcgcatcaagtatagagcgtgttgcaacacataaacaatcaatgattaaggttgtcttactatgtggttctggtataggcacgtcrcaacttttaaaatcaaaactaaatcayctgtatcctgagtttcacatttgggatgcctattccatttatcaattggaagaaagtcgattattgcaagataacattgattatgtcatttcaacagtaccttgtgaaatmtcagctgtaccagttattcatgtcgatccatttatcaatcarcaatctcgtcaaaaattgaatcaaattatcaatgactcaagagaacaacgagtcatgaaaatggcaactgatggcaagtcactcgcagatttattgcctgaacatcgcatcattataaatraacaaccattatcaattgaatcsgcaattrcagtggctgtgcaacmtttaatcaatgatggcattgtcwattcaaattatacagctgcaattttaaaacaattwgaacaattcgggtcatatatggtcattagtccacayattgcacttattcacgctggtactgattatgtacagaatggtgtaggtttcgcactaacwtatttcactgaagggattatytttggtagtaaagctaacgatcccgttcaccttgtaattacattagcaacggaccaccccaatgcacatttaaaggcattgggacagttaagcgaatgcttaagcaacgacttatrtcgacaagatttcttagatgggaatatttttaaaattaaacaacacattgctttaactatgacaaaggaggyttaa

SEQ ID NO: 268 - DNA, 1341 bp, Staphylococcus aureus
atgaaaaatacatttaatccattacaaagattacatttctaygcagcaatatttattgctccactgttaatcactttaaccatttcgggcattggttayttgttctttccagaagttgaaaataatatttataagaatgagttttttggtgacagtgatgtmaaaacgcatcaaacattaaatgatgcagtacatcaagttgaacracaatatgaaggattctttgtaagtaaagttagcatacttgatgaaccatataacaaacgaattacactgagtgatatggcaggaaatcarcgttacgtctttctagatcataacaatcaatttgttgcagatcaaaatgcgaaacatacgtattctaatgtgatgcgaagtatacatagttctttgtttactgaaaatactattattaattatttagtwgagttaaccgcatgttggaygatattcatgattttatctggtacttatttactcattaagaagcatttaatttctaacaaaagtaaggcacttcrttggcaaaagtggcacgcaatgattggarttatcattgcaattccagtatttgtattagtyttaactggattgccatggtctggttttatgggcagtaaaattgccggtatgatggacacaaacggtgaccttggtcaaggtgaattagcgattaatccacctaaatcagatttgaaygaattaccttgggctacacgtaaaaataaacagccagcttcatccgaaaaaggttcaagtggtcatcatggtaatgcagcaatgcctcaaacyaaattagattatcaaatatctattgataaggtcgttgwacargcgcaaaaakctggtattaaaaagccgttttcaatcgtatatccaagtgataaaawtggyacctttattgtatctaatactagtaattcaggtgttactgggctagatgtatcwccwtacaaggaacaaacactttatttygaycaatatagcggtaaaaagctaggtacgattaaatatgatgactacggtattattgctaaatggtttacrtggggcattccgcttcacgaaggtcatttattcggyattktaaayaaaatcattaatttatttgtatgtatcrctttattagtagccattggyatgggrtttgtctcttggataaakcgtacaaaaaatactgcagtaaaagtamcacatcgcgtaaaaaaaccagcatctatatcactcatmatatgtttaattgtattaggaytattaatgccattatttggattatcacttatcctwgtatttataattgaattaatattatatattaaagatcgtcgtgctaaacaataa

SEQ ID NO: 269 - DNA, 1599 bp, Staphylococcus aureus
atgttagtaaatacgtttaacccatttgataatttattattatcgtctttaattgcagcaataccgattgtactgtttttactwtgtttaactgtttttaaaatgaaaggtatttatgcagcyattacaacacttgttgtaacattactaattgcaataccatttttcaaattgccagttggtatcgcttctggtgcagtagtcgaaggtttcttccaaggyatcattccgattggctatatcgttatgatggcrgtattgttatayaaaattactgttgaatctggacaatttttaacaattcaagatagtattacaaatatttcacaagaccaacgtattcaagttttacttattggatttgcattcaacgcatttttagaaggtgcagcaggatttggtgtaccaattgcaatttgtgcacttttattaacacaattaggatttaatccrttaaaagctgcgatgttatgtttagtcgcaaatgcagcgtctggtgcttttggtgcgattggtatccctgtaggtgttgtagaaacgttgaaattacctggagatgtttcagtattaggtgtttctcaatcagcaactttaacattggcaatcataaatttcattattccattcttacttatctttattattgatggttttagaggtgttaaagaaacattaccagcaattttagtagtttcaatcacwtatacacttackcaaggattattaactgtwttcagyggacctgaattrgcagatattattccrccgttattaacaatgttagcattagcagtattttctaaaaaattccaaccaaaacacatttatcgtgttaataaagatgaagaaattgaacctgcaaaagcacattctgcaaaagcagtattacatgcatggagyccattyattgtattaacagtcattgtaatgatttggagtgcgccattctttaaaaacttattcttaccaaatggtgctttatcatcattagtatttaaattcaacttacctggaacartcagcgaagttacgcataaaccattagtattgactttaaatattattggacaaacaggtacagctattttattaactattattattacaattttaatgtctaaaaaggttaactttaaagatgcwgktagattattcggygttacatttaaagarttrtggttaccagttcttacaatttgtttcatcttagcaatytctaaaatcacaacttatggtggtttaagtgcrgcaatgggtcaaggtatwgctaaagcaggtaatgtcttcccagttctatcaccaatyttaggttggataggtgtgtttatgacaggatcagttgtaaataacaaytcattatttgcaccaattcaagcttctgttgcacaacaaattggaacaagtggttcacttcttgtatctgctaatacagttggtggtgtagcggcaaaattgatttcaccacaatcwattgcaattgcaactgcagcagtaaaacaagttggtaaggaatcagaattattaaaaatgacattgaaatacagtgtatgtttactaatattcatctgtatttggactttcatcttgtcattattataa

SEQ ID NO: 270 - DNA, 630 bp, Staphylococcus aureus
atgaaaarattagttacagggttaytagcattatcattatttttagctgcatgtggtcaagatagtgaccaacaaaaagacrgtaataaagaaaaagatgataaagcgaaaactgaacaacaagataaaaaaacaaatgattcatctaaagataagaaagayaataaagatgatagtaaagacgtaaacaaagataataaagataatagtgcaaacgataaccagcaacaatctaattcaaatgcaacaaacaatgaccaaaaycaaacraataataaccarkcraryartrrmcaarcgamtaayaatcaaaaatcaagttacgttgcaccatattatggacaaaaygcmgcgccrgtkgcwcgtcaaatttatccrtttaatggwaataaawmwcaagcwttacarcaattgccwaatttccaaacagctttaaatgcrgctaayaaygaagcaaataaatttggtartrrtmataaagtktataatgattattcwattgaagaacataatggyaactataagtatgtktttagttttaaagacccaaaygyaaatggaaaatattcaattgtaacggttgattatactggacaagcaatggttactgatccaaactaccaacaataa

SEQ ID NO: 271 - DNA, 516 bp, Staphylococcus aureus
atggctgggataatcaaagaaatttcaraacaaratgctagtgaattagttgaattagcaactagaacattttatgacacgtttggttcttactatgatgacaawgattttgatcaattttttaaagayaattatactgtrgaraaatttacacaagagattaaccatgtagattcatttcattatttttatcaagaagatggtgcgaatgttggttatataaagatgaatattaatagtgctcaaactgaagaaatgggggagacctatttagaagtrcagcgcatataytttttgaaagactttcaaggtggyggaagaggttcacaattgatagmattggccgaaaaaattgcwcaagaacataataaacataaaatttggctaggagtttgggarcataatcctcgtgctcaagcattttataaacgtcatggatttaaagtggttggtgaacatcattttcaaacaggtgatgtaacggatacagatttaattatggaaaaagagttatar

SEQ ID NO: 272 - DNA, 627 bp, Staphylococcus aureus
atgaattatccaaatggtaaaccatatcgtaaaaatagtgctatagacggagggaaaaagaccgctgcctttagtaatattgagtatggtggacgtggtatgtcacttgaaaaagatatcgaacattcaaatrcgttttatcttaaaagcgacattgcagttattcacaaaaagcctacgccagtacaaatagttaatgtcaactatcctaagcggagtaaagctgtgattaacgaagcttattttcgtacaccttcaacaactgattacaacggcgtttatcaaggttattatattgattttgaagcaaaggaaactaaaaacaagacgtcctttcctttaaataatattcatgaccatcaagtcgaacatatgaaaaatgcatatcaacaaaaaggtattgtgtttttaatgattcgttttaaaacgctagatgaagtttatcttttaccctattcaaaattcgaartattttggaagagatataaagataatattaaaaagtctataacagttgatgaaatacgaaaaaatggttaccatattccttatcagtatcaaccaagattagactatctaaaagcagttgataagttgatattagatgaaagtgaggaccgcgtatga

SEQ ID NO: 273 - DNA, 2184 bp, Staphylococcus aureus
atgacggaaaacaaaggatcttctcagcctaagaaaaayggtaataatggtgggaaatccaactcaaaaaagaatagaaatgtgaagagaacgattattaagattattggcttcatgattattgcatttttygttgttcttttactaggtatcttattgtttgcttattatgcttggaaagcacctgcttttaccgaagctaaattacaagatccgattcctgcaaagatatatgacaagaacggagaacttgttaaaacattagataatggccaaagacatgagcatgtaaatttaaaagacgtgccgaaatcaatgaaagacgcagtacttgcaaytgaagacaatcgtttctacgaacatggcgcacttgattataaacgtttattcggtgcaattggtaagaacttgactggtggatttggttctgaaggtgcctcaacattaacacaacaagttgttaaagatgcatttttatcacaacataaatctattggacgtaaagctcaagaagcwtacttatcatatcgtttagaacaagagtatagtaaagatgatatcttccaagtatatctaaayaaaatttactrttctgatggcgtaacaggtattaaagctgctgctaagtattactttaataaagatttaaaagatttaaacttagcggaagaagcttatttagccggtttacctcaggttccaaacaactataatatttatgatcatccaaaagctgctgaagatcgtaaaaacactgttttatacttaatgcattatcataaacgcattacagataaacagtgggaagatgctaagaaaatcgatttaaaagcgaacttagtaaatcgtactsctgaagaacgtcaaaacattgatacaaatcaagattctgagtataattcatacgttaactttgtraaatctgaattaatgaataataaagmattcaaagatgaaaatttaggtaatgtattacaaagtggtattaaaatttatacaaacatggataaagatgttcaaaaaacattacaaaatgatgttgataatggtagcttctacaagaataaagaccaacaagttggtgcaacrattcttgatagtaaaactggtggtttagttgctatatctggyggacgtgatttcaaagacgtcgttaacagaaaccaagcaacagatccwcaccctactggttcatctttaaaacctttcttagcgtatggacctgccattgaaaatatgaaatgggcaacaaaccatgcgattcaagatgaatcttcatatcaagttgayggwtctacatttagaaactatgatacgaagagtcacggtactgtatctatttatgatgctttacgacaaagtttcaatatmccagctttaaaagcwtggcaatcagttaagcaaaatgctggtaaygatgcacctaagaaattcgctgccaarcttggcttaaactacgaaggcgatattggtccatctgaagtacttggtggttctgcttcagaattctcaccaacacaattagcatcagcatttgctgcaatcgctaacggtggtacttataacaacgcgcattcaattcaaaaagtagttactcgtgayggtgaaacaatcgaatacgatcatactagccataaagcgatgagtgattacactgcatacatgttagctgagatgctaaaaggtacatttaaaccatatggttctgcatatggccatggtgtakctggagtaaatatgggtgctaagacaggtactggtacttacggtgctgaaacttattcacaatataatttacctgataatgcagcgaaagmmgtgtggattaacggctttacacctcaatacactatgtcagtgtggatgggcttcagtaaagttaaacaatatggtgaaaactcatttgtgggacatagccaacaagaatatccacagttcttatatgaaaatgtgatgtcaaaaatttcatctagagatggcgaagactttaaacgtcctagctcagtaagtggtagtatcccatcaatcaatgtttctggtagtcaagataacaacactacaaatcgtagtacacacggtggtagtgacacatcagcaaacagcagtggtactgcacaatcaaataacaatactagatctcaacaatctwgaaacagcggtggattaacaggtatattcaactaa

SEQ ID NO: 274 - DNA, 1035 bp, Staphylococcus aureus
atgaaagaygttacaatcattggtggcggtccgtctggtttgtatgcaagcttttatgctggattgcgagatatgtctgtaagattgatagatgttcaatctgaattagggggtaagatgagaatttaccctgaaaaaattatttgggatattggcggcattgcgccaaaaccttgtcatgaaattttaaaagatacaattaagcaaggattatattttaaaccggaagttcatttgaatgaacgtgtggtagatattaggaaaaarkcagaacgtcatttcgaagttgaaacagaagcgggagaaatatatacatcgaaagcagttatcattgcwattggtgcrggtattattaatccaaaacaattagatgttaaaggtgtagagagatatcaattaactaatttacattatgttgtacaaagttacagacgtttcaaagataaagatgtattaatatcaggtggaggaaatacagcattagattgggcgcatgatattgcyaagattgctaaaagcgtgacagttgtttatcgaaaagaagatgtaagtggtcatgaagcgatgaaaacgytggtgacagatttaaatgtgaaactatgcccraaaacacgtattaaatacttggtcggcaatgatgatgaaacgcatataagtgaagttgttttggaacatgttgaaagtggygatasgcatrcagttaaatttgacgatgtcattattagtcatggktttgatcgttgtaatacattattgagtgaaacatcttcaaagctagatatgcatgatgattgtcgtgttaaaggatttggtaatacgacaactagtatacctggtatctatgcgtgtggagatattgtttatcatgatgcaaaatcacatctaattgcaagtgcatttagtgatggtgcwaatgcagcgaaycttgctaaaacatatatccaaccagatgcgaatgcagagggttatgtttcaagtcatcatgaagtgtttaaagaagcgaataagactattgtaaataaacatttatactag

SEQ ID NO: 275 - DNA, 969 bp, Staphylococcus aureus
atgaaacatctacttgttattcatactggtggcaccattagtatgtcacaagaccaatctaataaagtagtaacaaatgatayyaaccctatttcamtgcatcaagatgtcataaatcaatatgcacaaatagatgaattaaatccttttaatgtaccatcacctcatatgacaatccaacatgttaaacaattaaaggatattattttagaagcagtaacaaataaatattatgatggtttcgttatcacgcatggtaccgatacgttagaagaaactgcctttttacttgatttaatattaggtatcgagcaacctgttgttattactggcgcaatgcgctcgtctaatgaaattggttctgacggattatataattatatttccgctattcgcgttgcctctgatgaaaaggcccgwcataaaggcgtgatggttgtatttaatgatgaaatwcatacggcgcgtaatgttaccaaaacacatacgtctaatacaaacacatttcaaagtccaaatcatggtccgctaggtgtattgacaaaggatcgtgtgcaattccatcatatgccatatcgccaacaagcattggaaaatgtcaatgasaaactaaatgtaccattagtaaaagcatatatgggtatgccaggtgacatttttagtttttatagtcgwgaaggtatcgatggtatggttattgaagcgttaggrcaaggcaacatrcctccaagcgcattagaaggcattcaacaattagtatctttaaatatacctattgtgctagtttcacgttcctttaatggtattgtgagtccaacttacgcatacgatggtggtggttaccaactcgcacaacaaggttttattttttctaacggytygaatggtccaaaagcaagattaaaattattagtygcgttaagcaayaatttagataaagctgaaatcaaatcatattttgaattataa

SEQ ID NO: 276 - DNA, 249 bp, Staphylococcus aureus
ttggcaaaatatacaatcgttgatatgsayacttgtattgcatgtggtgcatkcggtgcagcagcgccagatatatatgattacgacgacgaaggtattgctttcgtaatccttgacgataaccaaggtacygcagaagtacctgaggaattatatgaagatatggaagatgcaattgatggatgccctacagattctattaaaattgcagacgaatcatttgatggggacgctttaaaatttgaataa

SEQ ID NO: 277 - DNA, 432 bp, Staphylococcus aureus
atgcgtaggttattatattcatttcttttttatatgatcataggtttatttagtggctttttctatagagagctaacaaaagcatatgattttactggtacaacacaattatcacttgtacacacacatacacttattttaggtatgtttatgtttttaatattattaccattggagaagttatttaaattatcaagttactacttatttaactggttcttctatgtatataacataggtgttatcgttactataggtatgatggtgacaaaaggattcttccaagtcactggtaaatcatactctccagaagcatttgcaggctttgcaggtattgggcacacaggtatgcttgcaggtttattgttgctatttttccttttaagacaagcaattcttaaagaaccacgtgatgagtcttttaaaaaataa

SEQ ID NO: 278 - DNA, 507 bp, Staphylococcus aureus
atgcaacaggcactgataaatttctattatcaatttcatactaagcaacattatttcctatgtcatgacattttagaagatgcatggaaagctgaaaawaactacagtaagcaagatgcagttgttagtttaatcttgtttgcaactgcttgttaccattatcgccgcaataatttaaaaggcgcctataagtcttttaataaatctaaagaaataatacaaaatgctaaagatagagatgcgttataccttaatttaaatgattatcarttgttaattgagmaacagattgcaaaattgaatgcagcaaagcctttttcatctgttatattaccaataactccagwctttgarcgcatcatcaaggccaactatccagaytatgattataatcasgaaacakcaacagatccttttattgtagaccatcacatgcgscgtgatcgttcagaagtgattkcagcaaaagaagaagcgattcaattaagaaaacatagacgtaattaa

SEQ ID NO: 279 - DNA, 1278 bp, Staphylococcus aureus
atgaatatatttaaaaataaattattatggattgcrccaatagcaactatgattatcttggtaatyttttctttagctttttatcctgcatataatcctaaaccaaaagatttaccaattggtatattaaacgaggayaaaggtacaacgattcaagataaaaatgttaacattggtaaaaaattagaggataaattattagatagtgattctaataaaattaaatgggttaaggttgatagtgaaaaagaccttgaaaaagatttgaaagatcaaaaaatctttggagtagctattattgataaagacttttcaaaagatgctatgagtaaaacacaaaaagtagttatggatagyaaaaaagaagaaatgcaacaaaaagttgcttcaggtgaaattccgccacaagtrgttcaacaaatgaaacaaaaaatggggaatcaacaagtagaggttaagcaggctaaatttaaaacgattgtaagtgaaggatcaagcttacaaggttcacaaattgcatcagctgtrttaactggtatgggtgataatattaatgctcaaattacgaagcaaagtttggaaacattaacgagtcaaaatgttaaagtcaatgccgcggacatcaatggtttgacgaatccagtaaaagtggataatgaaaaacttaataaagttaaagatcaccaagcaggtggtaatgcaccattcctaatgtttatgccaatttggataggttcaatcgtaacgtctatcttattgttctttgcatttagaactagtaacaatatcgtcgtgcaacatcgtatcattgcttcaattggacaratgatatttgcagttgttgcagcatttgcaggtagctttgtttatatttatttcatgcaaggcrttcaargatttgattttgaccatccaaatcgtatcgcaatttttgtagcayttgcgattcttggtttcgtgggccttattttaggtgttatggtatggctaggtatgaagtcarttccaattttcttcattttaatgttctttagtatgcaacttgtaacgttacctaaacaaatgttgcctgaaagttatcaaaaatatgtatatgattggaatccattcacacactatgcaacaagtgtaagagaactattatacttgaatcatcatattgaattaaatagtacaatgtggatgtttatagggtttatgatttttggcgctgtatcaagtttartttcagctattgttagaaaacatagcacaaaacgtactgaagtgccgtcataa

SEQ ID NO: 280 - DNA, 786 bp, Staphylococcus aureus
atggcacaagctatatttacaggaattattaactcaagcaacttagatgccaatgatatatatttaacaaataaatctaatgaacaagctttaaaagcattcgctgaaaaactaggtgttaactatagttatgatgatgcgacattattaaaagatgcagattatgtwtttttaggtaccaaaccrcatgaytttgatgctctagcaacacgcatcaaaccacatatyacaaaagacaattgcttcatttcaattatggcaggtattccgattgattatattaaacarcaattagaatgccaaaatccagttgctagaattatgccaaacacaaatgcgcaagtyggacactcwgttactggcattagtttttcaaacaactttgaccctaaatctaaagatgaaattaacgatttagttaaagcatttggttcwgtaattgaagtatcagargatcatttacatcaagtaacagctatcaccggaagcggcccagcatttttatatcatgtattcgagcaataygttaaagctggtacgaaacttggwctagaaaaagaacaagttgaagaatctatacgcaaccttattataggtacaagtaagatgattgaacgttcagatttgagcatggctcaattaagaaaaaatattacctctaaaggtggtacgacacaagctggccttgatacattgtcacaatatgatttagtatctattttcgaagattgtctaaaygctgccgtcgaccgtagtattgaactttctaatrtagaagaccaataa

SEQ ID NO: 281 - DNA, 786 bp, Staphylococcus aureus; identical to SEQ ID NO: 280

SEQ ID NO: 282 - DNA, 786 bp, Staphylococcus aureus; identical to SEQ ID NO: 280

SEQ ID NO: 283 - DNA, 330 bp, Staphylococcus aureus
ttggcactatttttatacaaaaatttaaggaggtcatttaatatggcaaatgaaattatcaaaaaaacagagagatttattttagtacaaattgacaaagagggaacagagcgcgttttgtatcaagattttgtaggcagttttacaacgtccgattcagcaagttatgcacaagattttaaatctgaggaaaacgctaaaaagattgctgaaactttaaatcttttatatcaattaacaggcaatcaaaacggtgtgaaagttgtgaaagaagttgtggatagaactgacttgtcatctgataaatcagttgatagcgaaacaatgtaa

SEQ ID NO: 284 - DNA, 1488 bp, Staphylococcus aureus
atggcagtaaacgttcgagattatatwgcagagaattatggtttatttatcaatggggaatttgttaaaggtagcagtgacgaracaatcgaagtgactaatccagcaactggagaaacactatcacatattacaagagcaaaagataaagatgtcgatcatgcagtcaaagtggcgcaagakgcatttgaatcatggtcattaacttctaaatcagaacgtgcacaaatgttgcgtgatattggtgataaattaatggcacaaaaagataaaattgcaatgattgaaacattaaataatggtaaaccgattcgtgagacaacagcaattgatattccatttgctgcaagacatttccattatttcgcaagtgttattgaaacagaagaaggtacagtraatgatatcgataaagacacaatgagtatcgtacgacatgagccgattggcgtcgtaggtgctgttgttgcttggaacttcccaatgctattagctgcatggaagattgcgccagccattgctgcaggtaatacaattgtgattcaaccttcgtcttcaacaccattaagtttattggaagttgctaaaattttccaagaggtattacctaawggtgttgtcaatatactaacgggtaaaggttcagaatcaggtaatgcaattttcaatcatgatggkgtagataaattatcatttacgggctcaactgatgtaggttatcaagttgccgaagctgcagcraaacatctagtaccygctacwttagagcttggtggtaaaagcgccaatatcatattagatgatgctaatttagaccttgcagttgaaggtattcagttaggtattttattcaaccaaggtgaagtatgtagtgcaggttctcgattattagttcatgaaaaaatttatgatcaattggtgccacgtttacaagaggcattttcaaatattaaagttggaratccacaagatgaagctacacaaatgggtagtcaaactggtaaggatcaattagataaaattcaatcatatattgatgcagcaaaagaatcagatgcacaaattttagcaggyggtcatcgyttaactgaaaatggrttagataaaggrttcttctttgarccracrttaattgctgtgccagayaatcatcayaaattagcrcaagaagaaatatttggaccagtkttaacagtgattaaagtgaaggaygatcaagaagcaattgatatagctaatgattcwgagtatggtttagcwggcggygtattttctcaaaatatcacacgtgcattaaatattgctaaagctgtwcgtacaggacgtatttggattaacacttacaaccaagtaccagaaggcgcaccatttggtggttataaaaaatcaggtatcggtcgagaaacttataaaggtgcgttaagtaactatcaacaagttaaaaatatttatattgatacaagcaatgctttaaaaggtttgtactag

SEQ ID NO: 285 - DNA, 1359 bp, Staphylococcus aureus
atgaattttcttaaacctgcaaagcatattaagcctttgccagaaaatcagatagatgatacctataaacgattacgtctccaagtatttcttggtattttcatcggttacgctgggtactatttattacgtaaaaacttttcrttagcgatgccrgcattgcaagagcaaggttttacaaaagcrgaactaggttttgcrctttctgctgtttccatcgcatatggatttagtaagttctttatgggtactgtaagtgatcggagcaatgcwcggatattcttagttcttggattagyactcactgctatcgtcaatttgttaatgggatttgtaccgttctttacatcaggtatcggtattatgtttgtcctattattcttaaatggatggtttcaaggtatgggctggccaccttcaggccgtgttctcgttcactggtttagtgtaagtgaacgcggaagtaagactgcyctttggaacgttgcgcataatgttggtggaggtattatggcacctattgctgcttggggtattacaacaacwgcatttatcaactttggttatttaaaaggkttygaaggtgtattcatttaccctgcactcttagcacttatcattgccgcaatttcatayrtattgattagagacacacctcaatctcaaggtttacctccaatcgaaatttataaaaaygactttgctacaagcgataagaaaacattagaaacagaattaactacaaaagaaattttatttaaatatgtactraacaataaatgggtatgggcaattgcctttgcaaatatatttgtttatttcgtgcgttatggtgtacttgattgggcgccagtctacttaagtgaagaaaarcatttcgacttaaaagcatcaggttgggcatacttcttatacgaatgggctggaattcctggtacattattatgtggttacatttctgataaattattcaaaggtcgycgwggacctgcwggtttcttctttatgttaggtgtcacagtatttgtattaatttattggttaaatcctccaggcaatgcttrgttagacaatgtctcattaattgccattggtttcttaatatatggaccagttatgttaattggtttacaagcattagattatgtacctaaaaaagcagctggcacagcagctggattaacwggattatttggttatctgtttggtgctgtaatggccaacatcgtcttaggtgctgtagttgataaattcggatgggatgtcggttttattttattaacagcaatyagtgtgtttgcaatgttgagctttatcctcacttggaataaagtaggacaagaaacygttcatcattaa

SEQ ID NO: 286 - DNA, 1485 bp, Staphylococcus aureus
ttgagtactaaaaacaaacacatcccwtgtttaatcacaatctttggtgcaactggtgacttaagccatcgtaagttgtttccatcaatattccatctctaccaacaagacaatttagatgaacatattgccatcatcggtattggacgtcgtgacattactaatgatgatttccgtaatcaagtaaaatcatcaattcaaaagcacgtaaaagatacaaacaaaattgacgcgtttatggaacatgtcttctatcatagacatgatgttagtaatgaagaaagctatcaagaattaytagattttagtaatgaattagayagccaatttgaattaaaaggtaatcgactattctatttagcaatggcaccacaattctttggcgttatttctgattatctaaaatcttctggtcttactgatacaaaaggatttaaacgccttgttatcgaaaaaccattcggtagtgatttaaaatcagccgaagcattaaacaatcaaattcgtaaatcatttaaagaagaagaaatttatcgtattgaccactatttaggaaaagacatggttcaaaatatcgaggtattacgttttgcgaatgcgatgtttgaaccattatggaataacaaatatatttcaaacatccaagttacatcwtctgaaatactaggtgttgaagatcgtggtggttattatgaatcaagtggygcgctaaaagatatggtgcaaaaccacatgttacaaatggttgcattattagctatggaagcacctattagtttaaayagtgaagatatccgtgctgagaaagtaaaagtacttaaatcactgcgtcatttccaatctgaagatgttaaaaagaactttgttcgtggtcaatatggcgaaggctatatcgatggtaaacaagttaaagcataccgtgatgaagatcgcgttgcagatgactctaacacacctacmtttgtttcaggtaaattaacaattgataactttagatgggctggygtaccattctatatycgtactggtaaacgtatgaaatctaaaacaattcaagttgtcgttgaatttaaagaagtaccaatgaacttatactatgaaactgataaactrttagattcaaacctattagtaatcaatatycaaccwaatgaaggtgtatctttacatctaaatgctaagaaaaatacacaaggtatcgaaacwgaacctgtycaattgtcttaytcaatgagcgctcaagataaaatgaatactgtagatgcatatgaaaatctattattygattgtcttaaaggtgatgccactaacttyacgcactgggaagaattaaaatcaacatggaaatttgttgatgcaattcaagatgaatggaatatggttgatccagaattccctaactatgaatcaggtactaatggtccattagaaagtgatttaytacttgctcgtgatggtaaccattggtgggacgatattcaataa

SEQ ID NO: 287 - DNA, 1278 bp, Staphylococcus aureus
atggctctattcaagagaaaaattagcctacctatgcaagtwgttattgcattagtgttaggtgttgtcgtaggacttttattatatggacaagaaaacgtagcaaattacattaaaccatttggtgacgtatttttaaatttaattaaaatgatcgttataccagttgtattttgctcactagcgctttctatttcgaacgttggggaatcgaaaactgtagggcgttatggctggaaaacaattttatactttgaaattattacaacaatcgcaataggtttagggattatcttcggtaacctatttaaaccaggtgctggattagacccaacaaaattacctaaaggtgatatttctaaatatcaatcaactgcacatgcagcagaacaatctacatatggaaatcattttattgataccattgtacatattattccgacaaacttttttgaagctttaaataagggtgaattattacctattatcttyttcgcagtattctttggattaggattagctgcwgtaggtaaaaaagcagaaccagttaaagaatttttaagcggatcgcttgaagctgtgttctggatgattaataaaattttaaaattagcaccacttggagtgtttgcattcatttgtactacaattattacatttggtgcatcmgcattattaccactattaaaattagtattagttgttgtctttgcaatggtgttctttgtattcgctatactaggactagttgcatggatgtgtggtattaatatcatgaatattattagaatcttgaaaagtgaattgcttttagcattttctacatcaagttcggaagctgtwcttcctgtaatgatgaagaaaatggaaaacttyggttcwccaaaagawattacwtcytttgttataccrattggytatacgtttaacttagayggatcagcactttatcaatctattgcagcattattcgttgcacagatgtatggaatgcacttaacattatcagagcaaattgtgttgatgttaacattaatgattacrtctaaaggtatggcggcagtaccaggaacttcaatcgttgttttattaacaacattaggygccatgggcttaccggcacaaggtttagcattaattattggtgttgaccgtatcttagatatggtacgtacatgtgtaaacgttattggtaaygcattatcaacaatygttatwgctaaatgggaaaacgtatatgayaaagcaaaaggtcaagaatatttaaaatcaatttaa

SEQ ID NO: 288 - DNA, 894 bp, Staphylococcus aureus
atgattgaattaattggagtgaaagttttggacgttatcaagcaaatacaacaggcaattgtttatattgaagatcgtttattagagcctttcaatttgcaagaattaagtgattacgttggtctttcgccataccatcttgatcaatcatttaaaatgattgtcggcttatctccagaagcttatgcacgcgcgcgtaaaatgacactcgctgcaaatgatgtgattaatggtgctacacgacttgtagatatcgctaaaaaatatcactatgcaaattcaaatgattttgcaaatgattttagtgattttcacggcgtatcacctattcaagcytctactaaaaaagatgaattacaaattcaagagcgattatatatcaaattatcaactactgagagarcaccytatccatacagattagaagagacagatgatatttcattggttggatatgcacgatttatagacactaagtatttgtcacatccttttaatgttccggattttttagaagacttgctcattgatggtaaaattaaagagttacgacgatataatgacgttagtccatttgaactatttgttattagttgtcctcttgaaaatggtttagaaatatttgtaggtgtaccaagtgaacgttatcctgcacacttagaaagycgatttttacctggcaaacattgtgcgaaattcaatttacaaggtgaaattgattatgcaactaatgaagcttggtactatattgaatcaagtttgcagttaacattgccatatgaacgaaatgatttatatgttgaagtgtaccctctcgatatttcatttaatgacccattcactaaaattcagctttggattcctgttaaacagagtccttatgacgaagattaa

SEQ ID NO: 289 - DNA, 366 bp, Staphylococcus aureus
atgaagaagaaaaaaaacgcgattaaagttatcattatattatttatttcattaattgttgcwgtagcatttttctttggtctgaaaacatatcaaggccataagaatattcaactwattgacagttacttggaagagaaaaatctaaaagataaaattaaatcagaaaaaacagagtatagtgctaaaaaaggtctcttctataaggaagttacrtttaaagatgaacctggtgtaacttatgttgtgcaaccaatcagtactaataaaggattatttgttgaaggctttgatacagagactaagaaaagtttgaaaactgcaaagcataaatatttyaatcaraattataaaccatcaaaatag

SEQ ID NO: 290 - DNA, 177 bp, Staphylococcus aureus
ttgctagttatatcgtctcaagttaaaarttttatatcttatgtcgtaattattaatacaaaggttattcatttggaggcacacaaaatgcaaaataaagttttaagaattatcattatcgttatgcttgtatcagttgtattagcattgttattaacgagtatcattccaatttta

SEQ ID NO: 291 - DNA, 1170 bp, Staphylococcus aureus
atgtacaaaacaaaaggtggctttcaacttacattacaracattaagtttagtggttggrtttatggcttggagtatwattgckccwttaatgccytttattaaacargatgtcaatgtwactgaaggtcaaatatcaatcattttagcgataccagttattttgggatcrgtgctccgtgtgccatttggttatytaacaaayattgttggygctaaatgggtattctttacwagttttatcgtattgttattcccgatatttttcttrrgccaagcacaaacrccgggkatgttaatggcdtcaggatttttccttggygtaggtggygcaattttctcwgttggtgttacatcagttcctaaatatttcccwaaagaaaaagtaggtctagcaaatggtatttatggtatgggraatatcggtacagcagtttcttcatttttagcaccrccratwgcgggtattattggttggcaaacaacwgttagaagttacttaattattatcgctttatttgcattaattatgttyatwtttggtgayacacaagaacgtaaaattaaagtrccattaatggchcaaatgaaaacattatctaaaaactacaaattatattacttaagttattggtatttyattacttttggtgcttttgtwgcatttggtattttcttacctaactacttagtaaatcattttggaattgacaaagtagatgctggtattcgwtcaggtgtattcattgcgctggcaacattcttragaccaataggtggyatwytaggtgataaatttaatgcagttaaagtaytgatgattgattttgttrttatgattatcggtgccrttattttaggtatttcagaccatatcgcattattyactgtaggytgtttaacaataagtatttgtgcaggtattggtaacggcttaatyttyaaattagtaccatcmtacttctyaaatgaagcrggatcmgcaaatggtatcgtatcaatgatgggtggtttaggaggattcttcccaccrytrgtmatcacrtacgtagctaatttaacaggwtcaagycatttagcatttattttcttagcggtattyggatgyattgcattatttacmatgcgycatttataycaaaaagaatatggytcattgaaamacrgttga

SEQ ID NO: 292 - DNA, 582 bp, Staphylococcus aureus
atgaaaaaattggtttcaattgttggcgcaacattattgttagctggatgtggatcacaaaatttagcaccattagaagaaaaaacaacagatttaagagaagataatcatcaactcaaactagatattcaagaacttaatcaacaaattagtgattctaaatctaaaattaaagggcttgaaaaggataaagaaaayagtaaaaaaactgcatctaataatacgaaaattaaattgatgaatgttacatcaacatactacgacaaagttgctaaagctttgaaatcctataacgatattgaraargatgtaagtaaaaacaaaggcgataagaatgttcaatcgaaattaaatcaaatttctaatgatattcaaagtgctcacacttcatacaaagatgctatcgatggtttatcacttagtgatgatgataaaaaaacgtctaaaaatatcgataaattaaactctgatttgaatcatgcatttgatgatattaaaaatggctatcaaaataaagataaaaaacaacttacaaaaggacaacaagcgttgtcaaaattaaacttaaatgcaaaatcatga

SEQ ID NO: 293 - DNA, 654 bp, Staphylococcus aureus
ttgaaaatagtcattgccgatgatcacgctgttgtccgyacgggrttctctatgattttaaattatcaaaatgatatggaagttgttgcaacrgctgcagatggygtcgaagcttaycaaaaagtaatggaatataaacctgatgtgttactaatggatttaagyatgccaccaggtgagtcaggtcttatcgctacgagtaaaattgctgacagttttccwgaaactaaaatwytaatattaacmatgtttgatgatgargagtayttgttccatgtgttgcgtaatggtgcgaaaggttacatattgaaaaatgcacctgatgaacaattattgttagctattcgaactgtatataaaggtgaaacatatgtagatatgaaacttacaacatctttagtgaatgaatttgtatctaattcaaatcaggacactgcaaacacawcagatccttttaaaatcttatcaaaacgagaactagaaatattgccacttattgccaaaggttacgggaataaagaaattgcagagaarttatttgtwtctgtraaracagtagargcacataaracgcatattatgacaaagcttggcttraaragtaaaccwgagctmgttgaatatgcattgaaaaagaaattattagagttttag

SEQ ID NO: 294 - DNA, 219 bp, Staphylococcus aureus
atgcgtaatataatattttaycttgtacttatwattgctgcgattggattagtaatgaatctagatgcctttattttttcaatcgtcagaatgttartmagctttgctgtaatagctggtattatttatctgatttattatttcttcatcttaactgaagaccaacgcaaatatcgcaaagcratgcgtaagtataaaagaaatcaaagaagaaaatag

SEQ ID NO: 295 - DNA, 387 bp, Staphylococcus aureus
atgagtgctagtttgtacatcgcaataattttagttatagcaattattgcttatatgattgttcaacaaattcttaacaagcgagctgttaaagaattagatcaaaatgaattccataatgggattagaaaagctcaagtcatcgatgttagagagaaagttgactatgactacggtcacattaatgggtctcgcaatattcctatgacaatgttcaggcaacgattccaaggattaagaaaagaycaaccggtatacttatgtgatgccaatgggattgctagctatagagccgctcgtattttgaaaaagaatggatatacagatatctatatgttaaaaggcggctataaaaaatggactggaaaaataaagtctaaaaaatag

SEQ ID NO: 296 - DNA, 1392 bp, Staphylococcus aureus
atggcaaaagatatggatacaattgtttcattagcaaaacacagaggttttgtgttccctggtagtgatatttacggtggtttatcaaacacatgggattatggtcctttaggtgttgaattaaagaataatgttaaaaaagcttggtggcaaaaattcattacacaatcaccgtttaacgttggtatcgaygctgcaatcttaatgaatccaaaagtatgggaagcttcaggacacttaaacaacttcaacgacccaatgattgataataaagatagtaaaattcgatatcgcgctgataaattaattgaagattatatgcaagatgttaaaggtgatgaaaacttcattgccgatggtttaagttttgaacaaatgaaaaaaattattgacgatgaaggtattgtttgtcctgtaagtaaaactgctaactggactgaaattcgccaattcaatttaatgtttaaaacattccaaggtgtaactgaagattctacaaatgaaattttcttacgtcctgaaacagcacaaggtatttttgtaaactataaaaacgtgcaacgttcaatgcgtaaaaaattaccatttggtatcggtcaaattggtaaatcattccgtaatgaaatcactccaggtaacttcattttcagaacaagagaatttgaacaaatggaacttgaattcttctgtaaaccwggwgaagaaatcgaatggcaaaattattggaaaacttttgcaagtgactggttaacaagcttaaatatgagyagtgaaaatatgcgtttacgtgatcatgatgaagatgaattatctcattactcaaatgcaacaactgatattgaatataaattcccatttggttggggtgagttatggggtatcgcaagtcgtacagacttcgacttacgtaaacatgctgaacactctggtgaagatttcagataccaygatccagaaacgaacgaaaaatatattccatattgtatcgagccatcacttggtgcagatcgtgtaacattagctttcttatgtgatgcatatgatgaagaaggcgttgaaggtagtaaagatgcacgtacagttttacacttccatcctgcattagcaccatataaagcagcgattttacctttaagyaagaaattatctggcgaagcgattaagatttttgagcaattaagttctaaattctcaatcgatttcgatgaatcacaatctatcggtaaaagataycgtcgtcaagatgaaatyggtacaccttattgtgtaacattcgactttgattcattagaagataatcaagttacagtacgtgacagagattcaatggaacaagttcgtatgccaatctcagagttagaagctttcttaactgaaaaaacaaaattctaa

SEQ ID NO: 297 - DNA, 252 bp, Staphylococcus aureus
atggcaaatatcaaatctgcaattaaacgtgtaaaaacaactgaaaaagctgaagcacgcaacatttcacaaaagagtgcaatgcgtacagcagttaaaaacgctaaaacagctgtttcaaataacgctgataataaaaatgaattagtaagcttagcagttaagttagtagacaaagctgctcaaagtaatttaatacattcaaacaaagctgaccgtattaaatcacaattaatgactgcaaataaataa

SEQ ID NO: 298 - DNA, 591 bp, Staphylococcus aureus
atggagggattttccgtgattaatttcgataattttaaaaartatcaagaaagttttggatatatrgcrcaacagytatgytttccrgaaaaattaacwtttcatccaaaracttttgaagaaacaatttcgamrgatcatccagsrtatgamgatttartagcatttagaaatgtaatgatgacattttcattatcagaaatcaaagcgatttatacwgatacatttgattttacraaaaaagcrccattatatatgacgtataacaartttgatacrcaaaaagaacgtgggcaaatgttagckaaaytaaaggtattrtaygaratgtttggactagaaatggtagayaatgaactttctgattatctaccgttgatgytkcaatttttrcaagtggcagaatggcgaaatgatccaagagctgaagagaatattcaattaatcattatgattattgaggatggaacatatgtgatggcgaatgcacttggtgaagataayaatccatatgcctatgtgattcaagcacttagaaaaacattgaaattatgtttgacatcaccaaaaggagtgaaacatcatgcttaa

SEQ ID NO: 299 - DNA, 270 bp, Staphylococcus aureus
atggctgaaaataatcaaaatagtctcgtaacaaagatagctacatacggcagttttattgcaattgcgtcgtttgtcattttatttataagtatatttttaaagttttcatttaatatcgagtttayagcaacaattatgaacatatgtcgctacactctaattctaggatttatacttatgtccttacctgatgttgttgataaaaacatyaagaaaattatattcgatgcatttattatcatcgtctttatcttctttttactatag

SEQ ID NO: 300 - DNA, 1560 bp, Staphylococcus aureus
ttgaagattaaagcgcaagttgcgatggtattaaatttagataaatgcataggatgccatacgtgtagtgtgacatgtaaaaacacttggacaaatcgtccaggtgctgagtacatgtggttcaayaacgtagarackaagccrggygtagggtatccgaaacgttgggaagaycaagaacaytacaaaggtggttgggtactaaatcgtaaagggaaacttgaattaaaatctggaagtagaatttcaaaaattgcwttaggkaaaattttytataayccagatatgccaytaatwaaagattattaygarccatggaactataattatgaacatttaacaactgcgaaatcaggkaakcattckccagttgctagagcrtattcagaaattacrggggataayattgaaattgaatggggacctaactgggaagatgacttrgcwggtggtcaygttacaggyccaaaagatcctaacatcmaaaaaatagaagaagatattaaattccaatttgacgaaacttttatgatgtatttaccacgtttatgtgaacattgcttgaatccaagttgcgttgcmtcrtgyccttcaggtgctatgtataaacgtgatgaagatggcattgtattagttgaycaagacgcatgtcgtggatggcgttactgtatgacaggttgtccatataagaaagtttacttcaattggaaaacgaacaaagctgaaaartgtacwttctgtttyccgagaatcgaggcgggtatgcctacggtatgctctgaaacttgtacaggacgtatgcgwtacttaggtgttttattatatgatgcagatcgagttcatgaagcrgcttcagcagtagacgagaaagrtttataygaaaaacaattagatatattyttaaayccattygacgaagaagtcattgcwcaagctgaaaaagatggyattrgttaygattggattgaagctgcacaaaactcwccaatttataagttagcrattgaatataaactwgcatttccrttacatcctgaatttagaacgatgccgatggtttggtattgcccaccacttagcccaattatgagctatttygaaggtaaaaatacaamtcaaaatccrgatgcgattttcccagccattgaagaaatgcgyttrcckattgaatayttagckaatattttcackgcaggagatacararccagtaaaagragcmytrcarcgtatggcaatgatgagaagttayatgmgwtcycaagttacwcaacarccatttgayacrtcwcgwttagagcgattaggtwtaacygarcgccaaactaaagayatgtatcgyttattaggactwgchaaatatgargatcgattygttattccaacrtcacayaargaaacmtatttagatacgtatcaygcwcaaggtagtacrggatayaaytayggyggcgarcaytttggwgataactgtgaaggytgtggygttgcagtaggttcaggraaaactggtcaagaaatttataatgagaatttctatggagggattttccgtgattaa

SEQ ID NO: 301 - DNA, 1019 bp, Staphylococcus aureus
atggcgattaaatattcagcattaaaccttgtccctattcgagaaggtgamgatgaacraacagcaattaatratatggttaakctcgcacaacatttagaygaattatcrtatgaaagatattggattgctgaacaccataacgctcccaacctagtaagttcagcractgctttattrattcaacatacgttagaacatacgaaacacatacgtgtaggttctggaggmatcatgttacctaaycatgctccattaatcgttgcggaacaattyggcacgatggcaacattatttccaaatcgtgtcgatttaggattaggacgtgcacctggaacagatatgatgaccgcaagtgcattaagacgagatcaacatgatggtgtttataaatttccrgaagargtttcattattacaacaatatttcggycchgctcaccaacaagcatatgttcgtgcttatccagcagtaggtaaaaatgtgcctttatayattcttggttcttcaacagattctgcacatttagctgctcgyaaagggcttccatatgtgttcgctggacattttgcacctcaacaaatgaaagaagctatcgaaatytacaaaacgttatttgaaccttctgatgtattagacgaaccttatgttattgtatgtttaaatacaatcgttgctgaaaatgatgacgaagcacaatatttagcttcatctatggcacaagtaatggttagtatcactcgtggcagaatgcagcccgttcaaccgccaacacatgawctrcaaaatatattaacgccgagagaataygcgatggctatggaaagacagaaaatatcattaataggttcagaaaatactgttcaacaaaaaattcaagattttatggaaacttatggtgaagtcaacgaaattatggcwataagttatatttatgataaagatatgcaattagactcttatcgtcgrttcaaraatgttataaatcagwtaaatgaaaaaaacactttataatgtga

SEQ ID NO: 302 - DNA, 3690 bp, Staphylococcus aureus
atgggaaaatttggattgaatttctttaagccaacagaaaaatttaatgggaattggtcgatcctagaaagtaaaagtagagaatgggaaaaaatgtacagagaacgttggagycaygataaagaagtaagaacaacacatggtgttaactgtacwggmtcatgttcttggaaagtmtttgtgaaaaatggtgtgattacctgggaaaatcaacaaactgactatccaagttgtggtccggatatgcctgaataygaaccgagaggmtgtccwcgwggtgcrtcattctcttggtatgaatacagyccrcttcgaatyaaatatccatatattcgtggraaactytgggatttatggactgaagcattagaagaaaacwatggyaatcgygtkgctgcatgggcktctattgttgaaaatgaagacaaagccaaacartataagcaagcccgwggtatgggwggrcaygtgcgttcaaattggaaagaygttacrgakatwatcgcagcacaattactrtatacaatwaaaaaatatggtccwgaymgaatygcmggattyacacckattccagcgatgtcwatgattagytatgcagcaggtgctcgattcatcaatttrcttggtggtgaaatgcttagtttttatgactggtatgcagatttaccacckgcctctccacaaatttggggagarcaaacagaygtrcctgaatcaagygactggtataacgcatcatacattattatgtggggstctaatgtaccwytaacrcgtackccrgaygcacattttatgacwgaagtycgctayaaaggwacaaaagtyatttcagtagcaccwgattaygcagaaaatgtgaartttgcwgataactggytagcaccgaatcctggttcagatgctgcaattgcwcaagsaatgacrcatgttattttacaagarcattatgttaatcaacckaatgaacgctttatwaattaygckaaacaatatacagayatgccrtttmtyatcatgytrgatgaagatgaaaatggatataaagcrggtcgatttttaagagcragtgacttaggwcaaacracagagcaargygaatggaarccrgtwatycaygayrcaatcagygayagtttagtrgtacctaatggcacaatgggtcaacgttgggaagaaggtaagaartggaacttaaaactagaaacagaagatggttctaaaattaaccctacattatcaatgrcagaaggtggrtaygaattagaaacaattcaattcccatactttgatagtgatggagatgggatattcaatcgyccaattccaactcgacaagtcactttagcaaatggtgacaaagtccgtattgctacaatttttgacttaatggcaagtcaatatggcgtgcgtcgttttgatcataaattrgaatcaaawggatacgacgatgcagaatcaaaatatacacctgcttggcaagaagccatttcaggcgtaaaacaaagtgttgtcattcaagtagckaaagaatttgcgcaaaacgctatcgatactgaagggcgttcaatgattatcatgggtgcgggtattaaccattggtttaactcagatacgatttatcgttcaatcttaaacttagttatgttatgtggctgtcaaggtgtgaatggtggcggttgggctcactatgtgggacaagaaaaatgtcgyccgattgaaggatggagtactgtcgcatttgcgaaagactggcaaggaccaccacgtttgcaaaayggaacaagttggttctattttgcracagaccaatggaaatatgaagagtcaaatgtagatcgtttaaaatctccattagctaaaacagaggakttaaagcatcaacayccagctgattataatgtkttagcagctagacttggttggttaccatcatatccacaatttaataaaaatagyttgttgtttgcagaagaagctaaagatgaaggyatwgaktcdaatgargcrattttrmaacgwgcratwratgaagtkaartcaaaacaaacrcaatttgcratwgaagatcckgatttgaaaaagaatcatccraaatcaytrtttatatggcgytcaaayytaatytcaagttctgcaaaaggtcaagaatactttatgaagcatttacttggcacaaaatcaggrttattagctacaccaaatgaaratgaaaagccagaagaaattacgtggcgtgargaaacaacaggkaarttagatttagtsgtytctttagayttcagaatgacrgcaacacckttatattctgacattgttttgccrgcagcgacttggtatgaraarcatgatttrtcatcwacrgatatgcatccatatgtacatcctttyaatccwgcyattgatccrttatgggaatcrcgttcagactgggatatttataaaacrttggcaaaagcattttcagaaatggcaaaagactatttacctggaacgtttaaagatgttgtgacaacwccrcttagtcatgatacaaarcaagaaatwtcwacaccatayggcgtagtgaaagattggtcgaagggtgaaattgaagcggtrcctggacgtacaatgcctaactttgcaattgtagaacgcgactacactaaaatttacgacaaatatgtcacrcttggtcctgtacttgaaaaagggaaagttggagcacatggtgtaagtttcggtgtcagtgarcartaygaagaaytaaaaagtatgttaggyacgtggagtgatacaaatgatgattctgtragagcgaatcgtccrcgtattgatacagcacgtaatgtmgcwgatgcmatactaartatttcatcwgctacgaatggwaarttatcacaraaatcatatgargatctygaagaacaaactggwatgccgttraaagatatttctagygarcgygctgctgaraaaatttcgttyttraatataacwtcacaaccacgwgaagtwataccracagcagtattcccrggwtcwaataaacaaggycgacgwtaytcaccatttacaacgaatrtagaacgtytagtaccttttagaacrytaacaggwcgtcaaagttattatgtkgatcaygaagttttccaacartttggdgaragcttaccagtatataaaccgacattgccgccaatggtatttggkaatagagataagaaaattaaaggtggtacagatgctttggtactgcgttatttaacgcctcatggaaaatggaatatacactcaatgtatcaagataataagcatatgttgacactatttagaggtggtccaacggtttggatatcaaatgaagatgctgaaaaacacgatatccaagataatgattggctagaagtgtataaccgtaatggtgttgtaacggcaagagcagttatttcgcatcgtatgcctaaaggtacaatgtttatgtatcatgcacaagataaacatattcaaacgcctgggtcagaaattacagatacacgtggtggttcacacaacgcgccgactagaatccatttgaaaccaacacaactagtcggaggatacgcacaaattagttatcactttaattattatggaccaattgggaaccaaagggatttatatgtagcagttagaaagatgaaggaggttaattggcttgaagattaa

SEQ ID NO: 303 - DNA, 924 bp, Staphylococcus aureus
gtgttttcaaaaatacaacctaaagcaacaatrattgcaacgattrcgttggtatttgtcgctttagctttatatctagtgcctggtttrggactaatatttgcattrtttgcaaccataccaggtatcgttttatggaataaatcaatacaatctttcgggrttagtgcacttattacagtaattataacaactgttttaggtaatactttcgttttaagtgcyatcatattagtcttaattgcaagtttaattattggtcaattgctcaaagaaagaacgtctaaagaaagaatrttatacgtaacaacmgtagcgatgagcttaatttcattaatcgcytttatgttactacaaacattcggaagrattccaccatcagcgagcatagtaaaacctttcaagcaaacattacatgaagcgattacgatgagcggtgccgatgcgaatatgacccaaatattagaagaagggtttagacaagcgaccgttcaattaccaggtttcatcattatcattacatttttaatcgtcttaattaacttaatcgttacatttccgrttttacgaaaatttaaaatcgctacacctgtatttaagccacttttcgcgtggcaaatgagcggtattttattatggatatacattattgttatcatatgtttattatttacaggtcaaccgagtgtgttccagagcattcttttaaayttccaacttgtgttatcattagtratgtatattcaaggtttaagtgttattcatttctttggtaaagcgaaaggtttgccgaatgcagtaacgattttactattgrttatcggtacaatactgacacctacgacrcatattgtaggactacttggtgttatcgatttaagtttgaatttgaagcgaatcatgaaaaataattctaaaaagtga

SEQ ID NO: 304 - DNA, 1794 bp, Staphylococcus aureus
atgactcaaactaacccttcatttaatccttcaccacgatacaaatcaaaaaaaggttggtataaagacaagcctcccaaagaaaaaggaggaatgcctactgaagttgaaatcgcaggtcctatcgttatcgaaaataagtttattgaccctaaaactaacactgaaaaagtaattattacagacgaggatcaaaaagaaattgttgaatctagtgatattttaacaacacaaaaactgccatctttaatgaagtatggatttagtattaatgaaaaatatacaaaagatttaggttatgcgttgcaacaaatgcgcaatcaattacccatttcctacttatatgaaggggtaggtatactggaaacaccgtttggtcctattgtatcgttaagtgaaatctatactactaaagaatttgataataaatctccatctgacgccatttgtgataatscttatgacttaactcctaaaggtacatttgataattggtttaacatgtatctaaaagaggttaaaggttctcttcttttagaattagcagtcgtatttggtatttctgccttagtgacgagtttcctgaagcacaaacatgaaaccgaatttgccggaatcatttttagttttacaggtcaatcctcaaccggtaagtcaactgcagcttctttagctgtatcagtcgctggtaaccctaccaaaggtaatgaaactctctttagaaattggaatgccacacgtaatgcacttgaaggttacttgagtaacaattttggtatacctattgtatttgatgaactctcatcagcaacttttagagatacaacggggttattgtactccatcactgaaggtcaaggtcgtcaacgttcaaacgttcatggagaagttaaaacgcctaagaattggggtacttctgtcatttcaacrtcagaayacagtatttttaatgattcagctcaaaacgatggattacgtgtaagaaccatcgagattaatgaacaattcactacaaatgcgaccaatgctgacaatattaaaaaagctgtagcactaaactatggtcatgttttaccgttagtagctaaatatcttataaatcgtgaagatgaagttattcaatggttttacaaggaagtagattggtttgaagctaaattgaaagatgawamaarcaayacaggyawtcgtatgtttaagcgttatgcagtcattacaacatctgcraaaatattaggtcgtgttttakctacagatattgatatcgctaawataagagactactttattgattatcatrstcatacartctctgaacgctcattagctgataaagctatygatgtcatcattcaatttgtrgcacaaaacagaggtaagttttcagatgaaggtgctttgaaaaatatgtttgagaactatggattaatctcattaaaagatgaccatatcgaagtaaaaatgattgcraacgtttttaaacagatgctaaacaatcatcaatttcaagatgttaataatgttgtcaacgccttaagagataaaggtttcatattagctgaccgtggacgccaaacaactaaaagaagtgtcaaagataatagcggtaaaaaacaatcacttgtattttaccatctaaaattagatgtagagtttgcatctatcctsggattaactaaagataagtcgttamttcaaaattggacaccgkcaaatgataacaaagctgcgaaagaactttttaaatccgctaatgarggkataggccyttcaggagttcacgaagatttctra

SEQ ID NO: 305 - DNA, 1770 bp, Staphylococcus aureus
atgagtcatcatgacatttttagactaggcctataccatttagatacaatgggttggcataaaactatcccacctaaaaaagatggagatgagaaaaaagtagtgactatgtctagttgtatggctgttgaagctaaattttggcatgtcttagaaaatacagaaaaaataattatttctaacggtaaggataaagaacatacatttgactctgatattttaacaactcgaaagttaccttccttgattaaatatggtcacagtatcaatgaaaattatataaaagatttgagctatgcactacaattaatgcgcgatgaaatgcccacttctgatttatatgatggctcgggcatcatagaaacaccccacggttatattgtaatgatagataccatttatacatctaaacaatatgatcaattatcatctttagatcctattgtcgatagtgcttatccattagagcctaaaggtacatttaaagattggttaaatatgtatattaacgaagtcaaaggtcatcttcttctagagttagcggtcgtatttggaatttctgccttagtgacaagctttctgaagtacaaacgtgaaatcgaatttgcaggaattatctttagttttacaggccagtcatcaactggtaaatcaacagcagcagctttagcagtatccgtcgctggaaatccaactaaaggtaatcaaacactttttcgaagttggaatgccacacgtaatgcacttgaaagttacttgagtaacaattttggtatacctattgtatttgatgaactctcatcagcaacttttaaagatacaacggggttattgtactctatcgctgaaggtcaagggcgtcaacgttccaatgtacacggagaagttaaaacgcctaagaattggggcacttctgtgatttcaacctctgaatacagtatctttactgattctgctcaaaacgatggattacgtgtaagaaccatcgagattaatgaacaatttactacaaatgcgaccaatgctgacaatatcaaaaaagctgtggcactaaaccatggtcatgttttaccgttagtagctcaataccttataaatcgtgaagatgaagttattcaatggttttacaaggaagtagattggtttgaagctaaattgaacagtgaaacaaacaatacaggtattcgtatgtttaagcgttatgcagtcattacaacatctgcgaaaatattaggtcgtgttttagctacagatattgatatcgctaaaatcagagactactttattgattatcatgctcatacagtctctgaacgatcactggcagataaagcgatcgaagtcattactcamtttgtagcacaaaaccgtggtaaattttctgatgatacagcgttaaagaatatgttcgagaactatggactaattgccttaaaagataatcatatcgaagtcaaaatcattgcgtctgtatttaaaaatatgttgttagagcatcacttccaaratgttaataatgttgttaatgcgctaagggataaaggatttatcgaatctgaccatgatcgaattacaacaaaaagaacagtcaaagatggcaatggcaaaaaacagtcacttgtcttttaccatttaaagctagattcagaatatgcgtctatttttggtctaactaaagatgctgaacctattaaagctgaaattaacttggataacaaaaagatacttgaatcatggaaaaaacagaatgatgatttaattgatttttaa

SEQ ID NO: 306 - DNA, 960 bp, Staphylococcus aureus
atgaaygggaaaaaggcraatacgataaacagatacaaatattttcatcatgtcratcatcaaaaaattcaacaaagttctaaaaagacgctrtgggcatcactwatcatcacaytrttatttacagtgattgaatttgtyggaggtttagtatctaattcattrgcattrctgtcagaytcatttcatatgcttagtgatgtattagcactyggtttrtcwatgttggcmatttattttgcwagtaaraagccgactgcacgmtacacattyggatatttaagatttgagatattagykgcatttttaaatggtttagcattaattgtaatttcaatctggattttatatgaagctattgtacgtattatttatccgcaaccmattgaaagtggcattatgtttatgattgctagtattggtttactcgtyaatattattttgacwrttatccttgtaaggtctttaaaacaagaagacaatatcaatattcaaagtgcattatggcatttcatgggagacttattgaactctattggtgtcatcgttgcagttgtattgatytactttacaggatggcgcatcatygacycaatcattagtattgtaatttcactcatcattttacgtggtggttataaaattacgcgtaatgcgtggttaattttaatggaaagtgtgcctcaacatttggatactgatcaaattatrgcagatatwaaaaacatagatggcatattagatgtacatgaatttcatttgtggagtattacaacagarcattattcattaagtgcccatgttgtgttagataaaaaatatgagggkgatgattatcaagcgattgatcaagtatcatcattgttgaaagaaaaatatggcattgcacattcaacgttgcaaattgaaaacttgcaattgaatccattagatgagccatacttcgacaaaytaacataa

SEQ ID NO: 307 - DNA, 996 bp, Staphylococcus aureus
atggcatcattgaaaaataagcattttatgattggrctawcaytaacatttatagtcgcattatttagctttttagcwgctaaattgccaatcytagataaggttggcgcattaactatcgcgatattaatcgctattctrtatcgtcactttaraggatatcctgaacaatatagctcaggtattacrttttcatcyaaatatttattaagatttgcaatcatcctatatggacttaaactcaatatattcgatattatcggtcaaggtagtaractattagccatcgatgtaggtgtcgttattttyagtattgtaatgatgctctttgtcaacaaactgttgcrtggtgacaaaaacatcgcattattactaggtgtmggyacaggcgtttgtggtgctgcygctattgcygcagtmgctccaatattcaaatcacgtgaaaargatacagctattagtatcggtatcatcgcattgattggtacgatattytcacttatatatacagctatctaygctatcttttcaatgacgacaaatgtttatggcgcttggtctggygttagtcttcatgaaattgcrcacgttgtcytagctggtggctttggtggtagtgatgcacttaaaatygcacttcttggtaaacttggyagagtattcttactgattccattaaccatcgtacttattttaattatgcgyttccgttcatcagaatcatctagcaakggtcgaataagcattccatactttttaattggatttgtcattatggccttagtgaatacatatgtaactatyccrtcagyattgytaaatattttaaatactrtatcaacaatytgcttattaatggccatggttgctttaggrttaaatgttgcatttaaagatcttaaaaatcgygcacttaaaccgcttatgacaatcattattacctcaatatgcttgtcatcacttgcctttatcgtcgttcaytggctatatagttaa

SEQ ID NO: 308 - DNA, 1275 bp, Staphylococcus aureus
gtgagtacagaaccattagcrtcgagaatgcgcccaaaaaatatagatgaaatcatttcccaacaacayttagttggaccaaraggcattatcagaagaatggttgayacaaaaaaattaacttcaatgattttttatggtccacctggtataggcaaaacaagtattgccaaagcaatttcgggcagtacgcaatataaattcagacaattgaatgctgtaactaacactaaaaaagatatgcaacttgttgttgaagaagctaaaatgtctggtcaagttatcttgttrttagatgaaatmcatcgactagataaagcyaaacaagaytttttattacctcatttagaaaatggcaaaatcgtcttgatyggtgctacaacttcaaatccttatcatgctatcaatccagcgattcgttcaagagcgcaaattttygagttatatcctttaaatgaygaagatgtgcgccaagcgttaactcgtgcaatagaagatgawgagaatggtttgaaaacatatcaacccaaaattgatgaagatgccatgacctacttttctacacaaagycaaggtgatgttcgtagtgcgttaaatgcattggaattagctgtattaagcgcagataatgacaargacggttatcgacatgttacattgcaagatgctaaagactgyttacaaaaaggtgcatttgtaagtgayaaggatggkgacatgcattacgatgttatgagcgctttccaaaaatctatccgtggtagcgacgtcaatgccgctttacattatttagcacgattaattgaagctggagatttacctacaatagttcgacgattacttgtaattagctatgaggatataggcttagcctcacctaatgctggtcagagaacacttgctgctattgaatcagcagaacgtctaggtttaccagaagctagaatyccactaagccaagcagtaatcgaactatgcttatcacctaagtcaaattcagcaatgagtgccattgatagtgcattgtccgatattagaaacggtcatgtgggycaaattccaaaycmtttaaaagatggrcattatcaaggtgctaaagatytaggccgatctattggttacaaatatccacmccaatatgtymatggctatgtttcacagcaatatttacctgataaactwaaaaacaaaatttattaygaaccaaaaacgacatctaaaagtgaacracaactcaaagaaatatataacaayttacttaaacaaaggccrtaa

SEQ ID NO: 309 - DNA, 978 bp, Staphylococcus aureus
atgtctgtarakrrwtayggcaaggtttacttgataggtgcggghccaggtaatccgaattatttgackaaaaaggctgagcgtttaatacgygaagcggatgtyatwctatatgatcgattagtgaatccgttrattttacaatatkcgaaktygacwactgarattatmgatgttggtaaaaagccrtatgcaaaacayattcagcaagaaaaaataaatgamtgtatcgtggaagcagcrcgtcgatataacaaggttgtkagrcttaaaggtggcgayccagcratatttggwcgwgtkcaagaagaagtygacayactaaayaactwtmatattgcgtttgaaattgtaccwggkgtgacatcwgcgagygcwgcagttgctackatgcaracaggwttracratgcgtrcwgttgctaaragtgtkacattttckacrggkyaytttaaagattcagaagaaaatgaagtrgatgtcaaykcyttagtraatggtggyacgttrgcratwtatatgggrgtwaaacgtttagrgaaaattatcrcmcagatacaacartacacagatattgattayccgatagcgattgtytttcaagcatcktgttttaaygarttygtygttaargggcgyttaagtaatattrttksraaaytgsarcaytaykcaattgaggcraaaccaggtatatgtattatwggsgaagtwgtkgrttatacwgaaaatswctcmwmaacwtmtratcckaykmagcaattttatgtagtaagtggttctaracmtgacgcycttatgctctgtgaacatttatatgacgaaggttatggctgtttgctaaacccaaatratacatcgaatggyacatatcattcgtcgcaatatgattactatgatrcrtttattaagcagcaagaaaatgtaacatatatttcaaccgatcgtgcagatrctaatacagtgttatgtcactaa

SEQ ID NO: 310 - DNA, 561 bp, Staphylococcus aureus
atgaatgaatgcgcatttggwactaaagatccagtctacttaractatcatgatcatgtatggggacaaccgctctatgatagcaaggcattgtttaaacttttagcattagaatcacaacatgctgggctatcttggttaactattttaaaaaagaaagaagcctmtgaagaagcattttatgatttcgaaccagaaaaggtagcacaaatgaccgctcawgatatcgaccgcttaatgacttttccaaatatcgttcatcatcgtaaaaaattagaagcaattgttaatcaagctcaagggtatttaaaaattgaacaagcatwtggtagttttagtaaatttttatggtcwtatgtaaatkgtaagcctaaagatttgcagtatgaacatgcttctgatcgtatcacagttgatgatamtgcaacacaactatctaaagatttaaaacaatacgggttyaaatttttaggtccagtaacagtattttcgtttttagargcagcyggtttatatgatgcacatttamaagattgtccatcaaagcctaracayaattaa

SEQ ID NO: 311 - DNA, 2406 bp, Staphylococcus aureus
atggcaaagcaaaaactagtaatgattggtaacggtatggcgggcattcgaacaatcgaagaaatattagagcgygccaaygatttatatgatattacggtaatwggtaaagaaccttatccaaactataaccgcatcatgctttcaaatattttacaaaataaaatgacagttgaagaaacaattatgaatccatatgagtggtatgargaacaygrtatyragttaattacmaatgatccwgtarttgamgtrgatagagcaaatcaawmwgtwackactgcaaatggtattgaagtakcatacgataaattratwtttgcgacaggwtctaaagcattygtcattccagtkccaggttcgacattaccragtgtwattggytggagaacrattgatgatactgaacaaatgatgaacattgckaagactaaaaagaaagcaattgtaattggtggaggmttactaggtttagagtgtgcacgtggtttattagatcaaggtatggaagtaacggtgttacatttagctgaatggttgatggaaatgcarctagaccgtaaagcwggaaatatgcttaaagcagatytagaaaagcaaggtatgaagtttgaaatgcaagccaacacaactgaaatcttaggagaagatgatgttgarggtgttaaattggctgatggacgcgagattccgrcagacttagttgttatggcagtaggtatwcgaccatacacagaagtagccaaagaatcaggtctagatgttaatcgtggtattgttgtcaatgatgtgatgcaaacaagtgatagyaatgtatatgcagttggwgaatgtgcagaacataacggcaaagtttatggactcgttgcaccactatatgaacaaggtaaagtattagctgatcatttaacaaataaagaaacgaacggatacaagggatcaacaacatttacgtcattaaaagtttctggktgtgacytrtatagtgctggtcaaattgtwgaaaatgcwgaaattaaaggtattgaaatatttaatagygttgataataactataaaaaaatctttttaaaagacggtaatgtagttggtgcagtactatatggtgatatcgatgatggttcacgcttttataacatgatgaaaaaaggtgaatcyactgaagaytacacactkgtatcattgcttactaaaggtggagaagaggcatcgctatcaattgctgatatggctgatgatgaaacaatttgtggytgtaatggtgtygataaaggyackatagtaaatgcrattacggaaaatggytttacwacagttgaagaagtwacggctaaaacraaagcrggkaattcatgtggtaaatgtaaaccgcaaattgctcaaatmttrcagcacacbttrggmgatgactttgttgcygcwaaacctgcwgstatatgtggttgyactgatttgacacgygatcaaatwgtwacgcaaatamgagcgaaaggtttaaaaacatctaaagaagttcgacatgttttaaactttaaaaayaaaggtggatgtccaaaatgtcgaccwgcratyaactattatttraayatggtttatccacatgatcatgaagatgaaagagaatcaagatttgctaacgaacgttaccatgcgaatattcaaaatgatggtacattttctgttatacctcaaatgcgtggrggtgttacagatgcagaccaactgattcgtctaggagaagtggctaagaaatatcatgtgccactagttaaagtgacaggttcrcaacgtgttggtttgtatggagttaaaaaagaagaattaccaaatatatgggaagacctaggtatgcgttcagcatcagcttatggtaagaaaacwcgctcagttaaaagytgtgttggtaaagagttttgtcgatttggtacgcaatacacgacacgacttggcattcgtttagaaaaaacatttgaatacatcgatacacctcataaattcaaaatgggtgtatcaggctgcccaagaagttgtgttgaatcaggtgttaaagattttggtattatctcagttgaaaatggattccaaatctatatcggtggtaatggtggtacagaagtygaaaaagctgaatttttaacaactgtagaaacrgaagatgaagtaatcaaattatgtggtgctttgatgcaatattatcgcgaracaggtatwtatgctgaaagaacagcrccrtggttaagaagactwggrtttgaaaatgtwaaagaagtsttrcttgayccagaaagacaraatgaaytatttgaacgyattatggatgctaaaaaagcagtcgaagctgaaccttgggaagcaatmactagyaatgckcaagcwcgwaraatytttgaagtggagaaggtgtaa

SEQ ID NO: 312 - DNA, 414 bp, Staphylococcus aureus
atgtataaaaatatattacttggtgtagacactcagttaaaaaatgaaaaagcactaaaagaagtgtctaaattagctggcgaaggtacagtcgtaacagttttaaacgcaatcagcgaacaagatgctcaagcatcaattaaagcaggtgttcatttaaacaaacttactgaagaacgaagcaagcgattggaaaaaacacgcaaagctttagaagattatggtattgattatgaccaaataattgttcgtggtaatgcaaaagaagaactattaaaacatgctaatagcggtaaataygaaattgttgttttaagtaaccgtaaagcagaagacaaaaagaaatttgtacttggaagtgtcagccacaaagtagcaaaacgtgcgactatccctgtattaatcgttaaataa

SEQ ID NO: 313 - DNA, 132 bp, Staphylococcus aureus
gtgattaaaatgtattttgcacagttagatggtgaaataactaataaacagtcacaagaattattggataaagaatacaagaaagcaatagaattagaaaataagaataaagaacaaaaattagaaaaatag

SEQ ID NO: 314 - DNA, 270 bp, Staphylococcus aureus
atgttacataaccatcctggacaatcaggattttcattgaatggtttaaagatgtttattggaaataaatctatccaaacaacgactattgttactaactatagtgtagtaaaacatataagtaaaacttcattatataatcagtctcaagtttataaaattatgaaagatataaaacaatctataactatgagaaataatgaagcgatagttgataatattctaaagcaactttataataaaacatatataaaacgaaaggacaaatag

SEQ ID NO: 315 - DNA, 123 bp, Staphylococcus aureus
atgtcaattcaacaattagatggttacatttctatagaagatttttttaagcatatggatgaattatcgaagaaagaagaattagaaaaagaaattaatcaatcaaagtctaaatatcaatag

SEQ ID NO: 316 - DNA, 537 bp, Staphylococcus aureus
atgrcaaawaygaygattcgactcgcaartgaamawgatgcagwarmaytrcawcaaytmatgcatgargcrtttacrcckytragagaactwggyatwgaytggccttcrrtwaatgcwaatttagatgctgtkaaagaaaatatagataaaaatactacatttgtcatgacaattgatgatgaaattatatctacgattacggttagatatccttggggaagtgtgaaaagyatttcgggytatccttttgtctggtggtttgcgacaaatcctgagtatgaagggaaaggctatggtagycaattacttacttatgttgaagaarcatttttrcgagatacrttaaagkcagckgcwgtwactttaggtacatctgcaagattgcatccgtggttacttaaaatttatgaaaaaagaggttatgaaatatacagcgaacatgaaaatgatgatggcgatttaggtgtgatcatgcgcaaagtattgatacccgagcgctttgacgaaacaatattaggccaaccaccattttaa

SEQ ID NO: 317 - DNA, 1056 bp, Staphylococcus aureus
atgacaaaaatatcaaaaataatagacgaaytgaacaatcaacaagctgatgcagcatggattacaacaccgttgaatgtatattattttactggataccgtagcgaaccccatgaaagattatttgcattattgattaagaaagatggtaaacaagtactattttgtccaaaaatggaagtcgaagaagtcaaagcatcacctttcacaggtgaaatcgttggatatttagacactgaaaaycctttttcactttatcctcaaacaatcaataaattactaattgaaagcgagcacttaacagtagcacgccaaaaacaattaatctctggtttcaatgtcaattcattcggagatgttgatttaacaatcaaacaattragaaatattaaatcygaagatgaaattarcaaaatacgtaaagctgctgagttagcagataagtgtatcgaaataggtgtttcttatttaaaagaargtgtractgaaygtgaagtagtcaaccatattgagcaaacwatcaaacaatatggcgtcaatgaaatgagttttgatacgatggttttatttggagatcatgccgcatcacctcatggcacaccaggagatcgcagattaaaaagcaatgartatgtactatttgatttaggtgtaatttatgagcattattgtagcgatatgacacgtacyattaaatttggtgaacctagcmaagaagcacaagaaatttataatattgtattagaagcagaaacatctgcaatccaagcaattaaacctggaataccwttaaaagatatcgatcatatcgctagaaatattatttcagaaaaaggttatggtgaatatttccctcatcgcttaggtcatggyytaggattacargaacatgaatatcaagatgtttcaagtactaattctaatttgttagaagctggcatggtyattacaatcgaaccaggtatttatgtaccwggtgttgcaggtgtaagaattgaagatgacatacttgtcactaatgaaggataygaagtattaacacattacgaaaaataa

SEQ ID NO: 318 - DNA, 501 bp, Staphylococcus aureus
atgattacttacaaaaatattttaatcgcagttgacggttcacatgaagcggaatgggcatttaacagagcagttggtgttgctaaacgtaacgatgcgaagttaacaattgtgaatgtaattgattcaagaacgtattcttcttatgaagtttatgatgctcaatttactgaaaaatctaagcattttgcagaagaattattaaatggttataaagaagtagctactaacgctggtgttaaagatgtagaaacgcgtctagagtttggctctcctaaatctatcattcctaaaaagcttgcacatgaaattaatgcagacttgattatgagtggtacatcaggcttaaatgccgtggaaagatttattgttggttctgtatcagaatctatcgttcgtcatgckccatgtgacgtgttagttgttcgtactgaagagttaccagcagacttccaaccacaagttgcaacaactcaattacgtgaaaaatatcaaaattaa

SEQ ID NO: 319 - DNA, 468 bp, Staphylococcus aureus
atgacgattaaagttgaagataataaaattattttttcaagaacgatagaagcaccgattgaaaaggtgtttgatgcctatacgacaaargmattatttgaaaaatggtttcatccaaaagrsgctagyacmaaagtrtttcgctttaatgctgtttcaggcggtgatgcattttaygcgattaaaacaccyacaatgacmagctatacattagcagaatataaaacggttaagcgtccatatttaattgaatatattgactcrtttgcgacacctcaaggtgcaaaagatacaaaaatgccaagcatgaarattactttgtcattttccragwkcaatacaacgaaaacgacagtgacatcaacatcggtatttccaacwaaagaagccgctcaacaagtcataaacatgggtgttgarcaaggkatgaatcaaacwttrgatcaacttgatgcwttattgaaataa

SEQ ID NO: 320 - DNA, 138 bp, Staphylococcus aureus
gtgattatgcttttttcactacttatattaattaaaacaacacatttgattacgtttatctttaaacaattgctatttatatttattgtccctttcatttatccatataaaaaagaagctagacaacgtatcgttggc

SEQ ID NO: 321 - DNA, 1548 bp, Staphylococcus aureus
atgaaaaagaaattaggtatgttacttcttgtaccagccgtaactttatcattagccgcatgtgggaatgatgatggaaaagataaagatggcaaggtaacaattaaaacgacagtttatccattgcaatcatttgcagagcaaattggtggaaaacacgtgaaggtatcatcaatctatccagcagggacagatttacatagctatgaaccaacacaaaaagatatattaagtgcaagcaagtcagacttgtttatgtatacaggggataatttagatccggttgctaagaaagttgcatctactatyaaagataaagataaaaaackgtctttagargataaattagataaagcaaagcttttaactgatcaacacgarcatggtgaagagcatgaacatgagggrcatgatcatgrgaaagaagaacatcatcatcatggyggatatgatccacacgtatggttagatcctaaaattaaycaaactttcgctaaagaaattaaagatgaattagtgaaraaagatccaaaacataaagatgactatgagaaaaactacaaaaaattaaacgacgatcttaagaaaattgataacgatatgaagcaagttacwaaagataagcaaggtaatgcagtattyatttcacatgaatcaattggatacttagctgatygttatggttttgttcaaaaaggtattcaaaayatgaatgctgaagatccatcacaaaaagaattractaaaattgttaaagaaattagagatagcaatgctaaatatattctttacgaagataatgttgcgaataaagtgactgaaacaattcgtaaagaaacagatgcgaagcctttaaaattctacaacatggagtctttaaataaagaacaacagaaaaaagataatattacstatcaatcattaatgaaatckaatattgaaaatatcggtaaagctttagacagtggtgttaaagtgaaagacgacaaagctgaaagtaaacaygayaaagcaatttctgatgggtwttttaaagatgagcaagttaaagaccgtgaattaagcgattatgctggtgaatggcaatctgtttacccttacttaaaagacggtacgcttgatgaagtgatggaacataaagctgaaaatgatccgaagaaatctgctaaagatttaaaagcttattatgacaaaggatataaaactgatattactaacattgatataaaaggaaatgaaattacatttactaaagatggtamgaaacacactggtaaatatgaatacaatggtaagaaaacattgaaatatcctaaaggtaaccgtggcgtgagatttatgtttaaattggtcgatggtaatgataaagacttaccgaaattcatccaatttagcgatcacaacattgcacctaaaaaggcagaacacttccatatctttatgggtaatgataatgacgcgttattaaaagaaatggataactggccaacatattatccttcaaaattaaataaagaccaaatcaaagaagaaatgttagcrcattaa

SEQ ID NO: 322 - DNA, 465 bp, Staphylococcus aureus
atgacaacaattaacccaacaaactacacattattaaagaaacaagcagcaagccttattgaagatgaacatcayatgattgckattttaagtaacatgtctgccttattaaatgataatctaratcaaattaattgggtyggcttttacttattggaacaaaatgaacttatacttggacctttccaaggacaccccgcttgtgtccacattccaatyggaaaaggtgtatgyggtacagccgtttcagaacgtcgtacacaarttgtagctgatgtycatcaattcraaggacatatcgcttgtgatgctaatagtaagtctgarattgtcgttccaattttyaaagatgataaaattatcggygtcttagatatcgatgcccctataackgatcgatttgatgacaatgacaargaacatcttgaagcaattgttaaaattattgaaaagcaactcgcataa

SEQ ID NO: 323 - DNA, 267 bp, Staphylococcus aureus
atggytaggttaaatattacgttttcgcctcaagcctttgaagattataagtattttcagcagaacrataaaaaaatggtgaagaarattaatgagttamttaaaagtattgacagaaatggtgcrttgraaggtataggtaagcctgaaaagttaaaatcgaatctgactgggtattatagtagacgtatcaatcacgaacatagattggtttatacagtagatgacaatcatataaaaatagcatcatgtaaataccattattaa

SEQ ID NO: 324 - DNA, 603 bp, Staphylococcus aureus
atggctcgattcagaggttcaaactggaaaaaatctcgtcgtttaggtatctctttaagcggtactggtaaagaattagaaaaacgtccttacgcaccaggacaacatggtccaaaccaacgtaaaaaattatcagaatatggtttacaattacgtgaaaaacaaaaattacgttacttatatggaatgactgaaagacaattccgtaacacatttgacatcgctggtaaaaaattcggtgtacacggtgaaaacttcatgatyttattagcaagtcgtttagacgctgttgtttattcattaggtttagctcgtactcgtcgtcaagcacgtcaattagttaaccacggtcatatcttagtagatggtaaacgtgttgatattccatcttattctgttaaacctrgtcaaacaatttcagttcgtgaaaaatctcaaaaattaaacrtcatcgttgaatcagttgaaatcaacaatttcgtacctgagtacttaaactttgatgctgacagcttaactggtactttcgtacgtttaccagaacgtagcgaattacctgctgaaattaacgaacaattaatcgttgagtactactcaagataa

SEQ ID NO: 325 - DNA, 252 bp, Staphylococcus aureus
atgattattaaaaattattcatacgctcgacagaatttaaaggcacttatgacaaaagtaaatgatgatagtgatatrgtaactgtaacatctactgatgataaaaacgtagtaatcatgtcagaatcagattataactccatgatggaaacactttacctccaacagaayccaaataatgctgaacacttagctcaatcaattgcagatctagaacgtgggaaaactrtaacgaaagatatagatgtataa

SEQ ID NO: 326 - DNA, 513 bp, Staphylococcus aureus
atgacattatttttattagaagctaacaatcttgattttgcatcaacgaaagaagaactagaagcaaaggcakcatcactatctacgaagacaattccaacattaattgaagtacaagctactgaaaatttaactcatggttattttattgtggaagcaaatgacgaagcagaagctaaacaatttttaacagaagcagrtattagyattcaattagtcaaagaagtacgcttagttggtaaagatttagatgaagtwaaaaatggtgatgcacatgttgattaccttgtaacttggaacattccggaaggcattacgatggatcaatatttagcacgtaaaaagaaaaattctgttcattatgaagaagtgccagaagttgaatttaaacgcacatatgtatgtgaagatatgtctaaatgtatttgtttatacaacgcacctgatgaagaagcggtacgtcgcgcgcgmaaagcagttgatacaccgattgatggcatcgaaaaactttaa

SEQ ID NO: 327 - DNA, 447 bp, Staphylococcus aureus
ttgcatcaacatgactttaaagtcmaaacttcttggcaaggtggtcgtaacaatgtcggaaacgttcaaggcgacatactttcagagaatatttcwatacctgcttcyttaggtggtgttggtwtaggaacaaatcccgatgaawtgttagtatcagccgcktcatcatgttatatcatctcattagcagctactcttgaacgtgcaaagttcacagatatttcaattgaacaacaatcgattggaacagcttgtttaaataayggaaaattcagtatgtcaaaaattgtgcaccatcctcamattsaaattccaagtgatcaaatagcacaattagaaaagcgattaccaaaattgataacaattgcagataataattgcatgatttcaaatgctgtaagaaataatgtrgacataaaaatytatcccatcattcaggccaaataa

SEQ ID NO: 328 - DNA, 96 bp, Staphylococcus aureus
ttgagatcagtaagtgataccaatttattaggacaatacgaaaaggcaatttctattagcgatatgatagagattgtctttttaatgtatgaagtc

SEQ ID NO: 329 - DNA, 1161 bp, Staphylococcus aureus
atgtattatcatcaaccgttgttattaacacctggcccaacccctgtwcctgatgccattatgagagaaattcaagcacctatggttggtcatcgttctaaagattttgaagacatcgcwcaacaagcatttcaaggtctaaagccaatatttgggagtcaaaatgatgtacttatwttaacatctagcggtacaagcgtcttrgargctagtatgttgaacattgtaaaccctgaagatcacttcgttgtcattgtttcaggtgcctttggtaaccgatttaaacaaattgcacaaacttattacaaaaatgtrcayatttatgacgtaacatggggagaagctgtagatgtyaaagatttcatcaattwcctttcaactttaratgttgaagtkaaagcagtatttagtcaatattgcgaaacatctacgacagtgctacaccctattcacgagttaggaaatgccatyaatcaatttaatagtaatatttattttgtagttgacggcgtaagttgcattggtgctgttgatgttgacattaacaaagataaaattgatgtacttgtttctggtagtcaaaaagcaattatgttacctccaggattagcttttgtagcttatagccaccgtgcaaaagaacrtttcaaagaagtaactacrccaaaattttatctagacttaaataaatacatttcgtcacaagctgacaattctacaccgttcacaccaaatgtgtctttatttagaggtgtaaatgcatacgttgaaaccgtaaaagcagaaggtttcaatcacgtaatagcacgacactatgcaattagaaatgcattaagaagcgccttaaargcattagatttaactttattagtcaatgataaagatgcatctccaacggttacrgcattcaaacctaayacaaatgatgaagtgaaaataatcaaagatgaacttaaaaatcgstttaaaataacaattgctggtggtcaaggccatcttaaaggtcaaattttaagaattggtcatatggggaaaattagtcctttcgatattttatcggtagtatctgctttagaaattattttaactgaacaccgtaaagttaactatatcggtaaaggyatatcaaaatatatggaggttattcatgaagcaatttaa

SEQ ID NO: 330 - DNA, 600 bp, Staphylococcus aureus
atgactaaaaaattactaacattatttatagtgagcatgttaattttaacagcttgcggtaaaaaagaatcagcaacgacatcytcgaaaaacggcaaaccattagttgtcrtatatggcgactataaatgtccttattgtaaagaattagatgaaaaagtcatgccaaagttkcgtaaaaattatatagataatcacaaagtggaataccaatttgtcaatttagctttcttaggtaaagactcaattgttggttcrcgtgcgagtcatgcagtattgatgtatgcacctaaatcatttttagattttcaaaagcaattatttgctgcccagcaagatgaaaataaagaatggttaacaaaagaactattagataaacatattaaacaactgcatttagataaagagacggaaaataaaattataaaagattacaagacaaaagatagcaagtcttggaaagctgcagagaaagataaaaaaatagckaaagataatcatataaaaacgacaccaactgcatttattaatggcgagaaagttgaagatccatatgattatgaaagttatgaraarttattaaaagataaaatmaaatag

SEQ ID NO: 331 - DNA, 1605 bp, Staphylococcus aureus
atgaagcaatttaatgtactcgttgcagatcccatatcaaaagatggtatcaaagcattattagatcacgaacaattcaatgtagatattcaaactggyttgtccgaagaagcattaatcaaaattataccttcataccatgctttaatcgttcgtagtcaaactacrgttactgaaaatatcataaatgctgctgattctttaaaagtaatcgcacgcgccggtgttggtgtagataatattaatattratgctgcaacattaaaaggtattttagttattaatgccccagatggtaatacgatttcagctactgaacatwcactrgcaatgttattatcaatggcwcgaaatattccgcaagcacaccaatcacttacaaataaagaatggaatcgaaatgcatttaaaggtactgagctttatcataaaacattaggtgtcattggtgctggtagaattggtttaggtgttgctaaacgtgcrcaaagyttcggwatgaaaatactagcttttgacccttacttaacggatgaaaaagcaaaatctttaagyattacgaaggcaacagttgatgagattgcccaacattctgatttcgttacattrcatacaccactaacacctaaaacaaaaggcttaattaatgctgwcttttttgccaaagcaaaacctagtttgcaaataatcaatgtggcacgtggtggtattattgatgaaaaggcrctaataaaagcattagacgaaggacaaattagtcgrgcagctatcgatgtgtttgaacatgaacctgcaactgaytcgcctcttgttgcacatgataaaattattgttacacctcatttgggtgcwtcaacagtcgaagctcaagaaaaagtggcaatttctgtttcaaatgaaatcatcgaaattttaattgatggtactgtaacgcatgcagtgaatgcacctaaaatggacttaagcaatatwgatgatactgtaaaatcattcatcaatttaagccaaacagttggtgaattagctattcaattaatgtacaatgcaccaagctctattaaaattacstacggtggcgacttagcctctattgatagtagtttattaacacgtacaattattactcatattttaaaagatgatcttggtcctgaagtcaatattatcaatgctctaatgttgttaaatcaacaacaagtgacattaaatattgaaaataataaagcagagacaggttttagtaactacttagaggtagaaytatcaaacgatagcgattccgttaaagttggygcttctgtctttacaggtttcggtccaagaattgttagaattaataatttttctgtagacttaaagccaaatcaatatcaaattgtgtcatatcataatgatacwccaggyatggtaggwaaaactggcgcattgttaggtaaatacaatatcaacattgcatctatgactttaggtagaactgaagcgggcggagatgcgctaatgattttatccgttgatcaacctgtttcaaacaatataattgatgaacttaaacaagttggtgaatacaatcaaattttcacaactgaattgacggtacagtcataa

SEQ ID NO: 332 - DNA, 363 bp, Staphylococcus aureus
ttgaagcgatttgtggcgacggtattattattactagtctttatatcaggatgtggtaatgataaatatgtgaaagaaatagatgaagcagttaaaattcaaaatcaaaaacaagaacaacttgccaaaaaaggcaacggtgatcgtgttgatcattttgaacgcaaagatgctaatatttatgtctatgataaggataaaattatcattttagcttataaacctttgagtaatgatgatgaagtgcattattatgcatatgattttagtgataaacgtgtatcatataagcaagattttgattcgagacgatattatcaacaacatgatgcggattatcatgaagaaaatatgacgaactag

SEQ ID NO: 333 - DNA, 1275 bp, Staphylococcus aureus
atgtcagattttaatcatacagatcattcwacaacaaaccatagccaaacacctagatacagaagacctaaatttccatggtttaaaacagtcatcgttgcattgattgctggaatyattggtgcacttctagtacttggtataggcaaagtattaaatagtacaattttaaataaagatggttcaactgtycagacaacaaataataaaggtggcaatcaattagacggtcaaagcaagaaattcggtaccgttcatgaaatgataaaatctgtctcccctacaattgttggagttattaayatgcaaaaagcatcaagtgtagacgacttattaaaaggcaaatcatctaaaccatctgaagcyggwgtaggytcaggtgtyatctatcaaataaacaacaattcagcttatatcgttacaaacaatcatgttattgatggcgcaaatgaaattagagtccaattacataataaaaaacaagttaaagcgaaattagttggtaaagatgcagtaactgatattgctgtacttaaaattgaaaatacaaaaggtattaaagcgattcaattygccaactcttcaaaagtacaaactggcgatagcgtattcgcaatgggtaacccattaggattacaatttgctaactctgtaacatctggtatcatttcagcaagygaacgtackattgacgcwgagacaactggtggyaatacaaaagtyagcgttcttcaaacagatgctgctattaacccaggtaactcaggtggcgcattagtagatattaatggtaatttagttggtattaactcaatgaaaattgctgcgacacaagttgaaggtatygggtttgctattccaagtaatgaagttaaagtaacaattgaacaacttgtaaaacatggtaaaatwgaccgcccttcgattggtattggtttaattaatttgaaagatatwcctgaagaagagcgcgagcaacttcatactgatagmgaagacggtatttatgtcgcmaaagctgatagtgatattgatcttaaaaaaggtgatattattacagaaattgatggcaagaaaattaaagatgatgttgatttaagaagctatttatatgaaaataaaaarcctggtgaatcagtcactgttaccgttatccgtgatggtaaaacwaaagaagttaaagtgaaattaaaacaacaaaaagaacaaccaaaacgtcaaagccgatcagaacgtcaatcacctggccaaggcgatagagatttctttagataa

SEQ ID NO: 334 - DNA, 906 bp, Staphylococcus aureus
atgacgaatcaagacaacaatcatcaattgaatcatcgtatatatcawtttgaaaagatatataaagctatcaaacatgtcattgtttttatatttatgattttcattgccatcgttgctatcgctgtgattgcgatgtctttatattttcatcatttaactaaaacgtccgactcattatcagatgatgctttaataaaaaaagttcgacaaatacctggcgatgaattattagatcataataacaaaaatttrttatatgagtataaccattctcaaaactcactcattataggmcctaaaacatcaagtccaaatgtcattaaagcattaacrtcatctgaagacactttattttataaacatgatggcatcttaccaaaggcgattttaagagcaatgatacaagatatttttaatactratcaaagttcaggtggtagcacaattacacaacaacttgttaaaaatcaagttcttaccaacgaaaaaacatatagtagaaaagcaaatgaacttcgcctagcaattagattagaacacctactctcaaaagatgaaattatatatacrtatttaaatatagttcccttcggtaragattataatggcgctaatatttcyggaattgcatccgcttcatatagtytrtttggtrttccaccaaaagatttatcaattgcacaatctgcataccttatcggtttgttgcaaagcccwtatggctatacaccctacgaaaaagatggaacrttaaaatcggataaagatttgaaatatagtatycaaagacaacattatgtattaaagcgtatgttaatcgaagatcaaatcactraaaaagaatacaacgacgcattaaaatatgatattaaatcacatttgttaaatcgaaaaaagcgttaa

SEQ ID NO: 335 - DNA, 729 bp, Staphylococcus aureus
ttggtcaagatgtttctaaatctaaatagygaacaacwacatgcrctwgatgctgcaaaacaagctttyggrcctatgctmgaaggtttggtsaaatattcaattcckattacmytmgtwacatttgtwttaggrttratyattgcattatttacagcattratgcgmatttcaacgagtaaarttttaagaagtattkcacgtgtctatgtatctattattcgwggracaccwatgatagtacaaytatttatcatmttttatggtattccagaattaggtagattattaacmaatgaygcwgayaaycaatggacattggcrcctgtrgtsgctgcyattattggyttrtcattaaatgtaggtgcgtatgcttcrgaaattattcgyggcggtattatttctataccraaaggacaaacrgaagctgcatattcyatyggtatgacrtatsgtcaaacgatacaacgyatcatyttaccgcaggcaattcgagtrtckatwcctgcactaggtaatacatttttaagtttaatcaaagatacatcattaytaggatttattttagtrgcwgaaatgtttagaaaagctcaagaagttgcgtctacaacatatgaatatttaacaatttatgtgttagttgcgctaatgtactgggtggtatgctttattatttcaatwatccaaggtatctaygaatcttatattgaaagagggtatcgctcatga

SEQ ID NO: 336 - DNA, 633 bp, Staphylococcus aureus
atgaatcatttaaagacgtatcaatccgaagattattacatwcatgacaagcaatttgttattgaaggtcctttaacayacgaagatttgaaagcgcttactttcgatgcgyatttaaccgcatttagagatgctgaagatcagtwtraagctttgttagaaattacaacattaccagaaggtagaatttatgttgctcgccaagatvaactcattgtgggttatgtcactttccactatcctgatgaaattgagcgctggtctacaggtaascttccatatttaatcgaattgggggcaattgaagtcagcatcaattttaggcaattacawcttgcagaaaarytratacaacttagcctttctacaccagaattcgagrattatatcgttataactacwgaatattactggcattgggatttaaaaaattcaaagttagatgtatttgactataaaaaattaatgcagcggttaatggcaactggtggacttgaaatattcgctacagatgatccagaaataacaagtmatccagctaattgtttaatggcaagaattggcaaaaayattacattagaacagcaacaagcgtttgatgatattcgttatatgaatcggtttttcttttaa

SEQ ID NO: 337 - DNA, 780 bp, Staphylococcus aureus
atgaaaagacttttatttgtgrtgatagctttcgttttcatattrgctgcatgyggraacaattcgtckaaagacaaggaagctartaaagatagyaagacaattaatgttggkactgagggkacttatgcaccatttagtttccaygataaagatggyaaattaactggttaygatatygatgttattaaagcagtggctaaagmagaaggwttaaarcttaaatttaaygaaacttcttgggaytctatgtttgcaggtttagacgcagggcgttttgatgtaatcgcgaaccaagtrggtattaatcctgatagagaaaagaaatataaattttctaagccttacacattctcaagtgctgttttagttattcgtgaaaatgaaaaagatattaaagattttratgatgttaaaggtaagaagttagcacaaacattcacatctaattatggtaaattagctaaggataaaggtgctgatattacaaaagttgatggctttaaccaatcaatggatttattattgtctaagcgtgttgatggtacatttaatgayagtctgtcatacttrgattataaaaaacaaaaacctaatgctaagatcaargcaatcaaaggtaaygctgaacaaagtaratctgcatttgcattttctaaaaaagyrgatgaygaaacagttcaaaaattcaatgatggcttgaaaaaaatcgaggaaaacggtgaattagctaaaataggtaagaaatggtttggtcaagatgtttctaaatctaaatag

SEQ ID NO: 338 - DNA, 1170 bp, Staphylococcus aureus
atgcaacaacattyatcaaaaactgcatatgtwtattcagataagttattacaatatcgatttcatgaccaacatcccttcaatcaaatgcgtttaaaattaacaacagagctacttttgaatgcaaatttattgtctccagaacaaatagtacaacctagaattgcaacagrtgacgaattaatgttaattcataaatatgattacgtcgaagcwattaagcatgcttcacatggcattatcagtgaagatgaggctawgaaatatggattaaatgatgaagagaatrgtcaatttaagcatatgcaccgccatagtgccacaattgttggaggcgctttaactttagcagatcttattatgtcaggcaaagyattaaatggttgtcacttaggtggtggwttgcatcacgctcaacctggtcgagcwagtggtttttgtatatacaatgatattgcaattacygcacaatacwtagctaaagaatacaatcaacgcgttttaatcatagataccgatgcacatcatggrgatggtacacaatggagtttctatgcygataaccatgttactacttattctatccatgaaaccggaaartttcttttcccaggctctggtcactatactgarcgcggtgaagatatcggctatggacacactgtaaatgtcccacttgaaccgtatacmgaagatkcatcatttttggagtgttttaaattaacagttgagccwgtcgtaaagagttttaaacctgatattattctaagcgtaaatggtgtcgatatacattatcgtgatccactaactcatctaaattgtacgttacattcattatatgaaattccatattttgtaaaatatttagctgatwcttatacgaatggaaagrtaattatgtttggtggcggaggctacaatatttggagagtygtaccacgtgcatggagtcatgtattcttaagtttaattgatcaaccaattcaaagtggttatttaccgttagaatggattaataaatggaaacattattcatctgaattattacctaaaagatgggaagatcgtttaaatgattatacctatgtcccccgcacaaaagaaattagtgaraaaaataaaaaattagctttrcatatagcgagttggtacgaatctactcgtcaataa

SEQ ID NO: 339 - DNA, 1398 bp, Staphylococcus aureus
atgggtggattttttggattattaaatgaaacactattagtgacggctttaccaagtattatgaaagattttgaaatttcatatacacaagttcaatggctgacaacrgcttttttattgactaatgggattgttattcctttgtccgcrcttgttatacaacgttatacaacaagacaagtgtttttagtgggtatttctatctttttcttaggtacattactcggcggyttgagtccgcactttgcaacattattagttgctagaattattcaggcgttaggygcaggtattatgatgccattgatgatgacaacgattttggatgttttccaaccrcatgaacgcggtaaatatatggggatatttggtttggtaattggtttagcaccagctattggacctacwctttcaggttaycttgttgaatatttwaactggagatcgcttttccatgttgtcgctccaattgcagctgtkacatttttaattggatttaaaacgataaaaaatgttggaactacaattaaagtacctattgattttatttctgtcattttttctgtactaggtttcggcgggttattgtatggaacgagttcaatttcagaaaaaggwtttgataatcctatcgtattaktatctatgattggwggyrttgttttagtcgcattatttgtattacgtcaatatcggctatcaacaccwttattaaattttgcwgtatttaaaaataaacaatttacagttggtatcattattatgggtgtcacaatggtatcgatgattggttcggaaacgattttacctatctttgtgcaaaatttattgcatcgttcagctttagattctggrttaactttattaccaggagcaattgttatggcatttatgtcgatgacttcgggtgctttatatgaaaagtttggtcctagaaadytkgctttagtmggtatggcgattgttgttattactacggcttattttgttgtaatggatgaacaaacatcaacaatcatgttggcaacagtttatgcgattcgaatggttggtatcgcgttaggattaattccagtaatgacmcatacgatgaatcaattaaagccagaaatgaatgcacayggttcatctatgacaaacacagtacaacaaattgctggttctatcggaacagctgcattaattactattttatcycatgcaagyaaaaacttttctccaactatgtcagactataatggcatgaacaaaattgakatgatgaatcaaattaaarttgatacgatgttrcatggttatcacgctggatttttatttgcrytattgattacagtkrttagtttcttttgttcatttatgttacaaggdaagaaaaaagaagttgattcwcrtcaataa

SEQ ID NO: 340 - DNA, 312 bp, Staphylococcus aureus
atgactaaactgaaatatataattccaacaataattgcagtagccattgtaattatttctaccatttcaatcatccaatwtattaatcgtaaacgctataatcccgttaaagtacttaatgaagtaaaatcatattttatgaatgtcaaaggctcatatatcgtttatgaaccattcgttcatcctgaaactgataaataccgtttagtttatcaaggtggaattacaactattaaaaatggtcaaaatattcattatgatttttatgcagatgcatatactggtgaagtcattaacattgtagagcgttaa

SEQ ID NO: 341 - DNA, 687 bp, Staphylococcus aureus
atgccaaaattaattttatgtcgtcatggacaaagcgagtggaatgctaaaaacttatttactggatgggaagatgttaatttatctgaacaaggtattaatgaagcgactagagcaggtgaaaaagtaagagaaaataacattgmcatcgatgtagcttttacatcgttattaacacgtgctttagatacaacgcattatattttaactgaatctaaacaacaatggattcctgtatataaaagctggcgtttaaatgarcgycactatggtggattgcaaggcttaaataaagatgatgctagaaaagaatttggagargaacaagtacatatttggcgtcgttcttatgatgtgaaaccacctgctgaaaccgaagaacaacgtgaagcttacttagctgatcgtcgatataatcatttagataaacgtatgatgccttattcygaaagtctgaaagatactttagttcgagtgataccattttggacagatcatatttcacaatatttgctagatggtcaaacggtattagtttctgcacacggaaattcaattcgcgcattrattaaatatcttgaagatgtgtcagatgaagatatcattaattatgaaattaaaacaggtgcaccgcttgtttatgaattaacggatgatttagaagttatagataaatactacttataa

SEQ ID NO: 342 - DNA, 1269 bp, Staphylococcus aureus
atgtatcaaacaattattatcggaggcggacctagcggcttaatggcggcagtagctgcaagcgaacaaartrrcarygtkytactcatygaaaaaaagaaaggtctaggtcgtaaactcaaaatatctggtggcggtagatgtaacgtaactaatcgattaccmtatgctgaaattattaagaacattcctggaaatgggaaatttttatatagtcccttttcaattwttgataatgaatccatcatagatttttttgagtctaggggtgttaaattaaaagaagaagatcacggkcgtatgtttccagtttccaayaargcacaagacgtsgttgatacwttagtgacaactatmgaamrycaacatgtaacgattaaagaagaagaagctgttagtagaatcgaagttaatacagaccaaactttcactgtacatactcaaaataatagttatgaaagccattcgctagtrattgctacaggtggtacaagtgtccctcaaactggttcaacwggtgatggttataagttygcacaagatttaggtcataccattackgagttattcccgaccgaagttccaattacatcagctgaacctttcatyaaatccaatcgtctaaaaggyttaagtttaaaagatgttgaattgtcagtacttaagaaaaatggtaaaaaacgcatcagtcatcaaatggatatgttatttactcattttggtatcagtggtccagctgcattaagatgtagtcagtttgtttataaagaacaaaaaaatcaaaagacacagcayatttcwatggcaatcgatrcatttcctgaattaaaccatgaacaattaaaacaacacatcacatcattattatcggacacaccagataaaatcattaaaaacagyttgcatggwctaattgaagagcgctacttaytgttcatgctggaacaagcwgraatcgatgaaaataccacatcacatcacttatcaaatcaacaattgaacgacttagtaaatatgtttaaagggtttgtatttaaggtraacgggacattacctatagataaggcatttgtcacaggtggtggtgtgtcactwaaagaaattcaacctaaaacmatgatgtctaaattagttcckggattatttttatgtggtgaagtattagayatacatggttatactggtggttataatattacaagtgcactcgtaacaggacatgtcgctggattatatgccggwcattactcacatrcatcaatggaataa

SEQ ID NO: 343 - DNA, 867 bp, Staphylococcus aureus
atgtctcataatgaaaatcttaaattggcgcaacgcggtgcttatttgagtttrattgtatatataatcttatctattgttaagtatgtcacgggttttgtctttaactctgcagctgtaagagcygaygcattaaacaatatgacagatattatcgtttctttagctgttattattggattgaaaatttcaattaaacctgcmgatcgaaatcatccttayggccatttgaagtctgaaaatatttcttcattattggtgtcatttgtcattatgtttgtaggtatccaagtagttattcaaaatgcacctcgtttgttcaaagaagatgacgttgtacctaacgcaataacaattatcgtcagcttaatcagtggtcttgtaatgttgattgtatttgcagtcaatcaaagactagcgaaaagaacgaaaagtagttctttaaattckgctgccaaagataatttatcrgatagtttagtcagcattggaacrgcgataggattaatttttacgcaaatcggtttcccaattgtcgatattattttagcaacattrctaggcttactaatcgtttatactggttttggtatttttaaagaagcaatttttatgttgagtgatggtttcaatgaaactgaattagaagcgtatcgcaatgatattttagaagttgatgaagtacaagaagttaaaagtattaaagggcgttaccatggaagtagtgtgtttattgatgtcacaattgttgtagatgctaacctttccttagtagaagcgcatcaaatttgtgayaatgtcgaacatcatttgcacaaaaaaggtatttcctcagtatacgttcacccagaaccagaccatctataa

SEQ ID NO: 344 - DNA, 945 bp, Staphylococcus aureus
atagcaattgaatgtccagtaacaaatttggaggaagcgtatatgtatcaaacaattattatcggaggcggacctagcggcttaatggcggcagtagctgcaagcgaacaaagtagcagtgtgttactcattgaaaaaaagaaaggtctaggtcgtaaactcaaaatatctggtggcggtagatgtaacgtaactaatcgattaccatatgctgaaattattaagaacattcctggaaatgggaaatttttatatagtcccttttcaatttttgataatgaatccatcatagatttttttgagtctaggggtgttaaattaaaagaagaagatcacgggcgtatgtttccagtttccaacaaagcacaagacgtggttgatacattagtgacaactatcgaacgccaacatgtaacgattaaagaagaagaagctgttagtagaatcgaagttaatacagaccaaactttcactgtacatactcaaaataatagttatgaaagccattcgctagtgattgctacaggtggtacaagtgtccctcaaactggttcaactggtgatggttataagttcgcacaagatttaggtcataccattactgagttattcccgaccgaagttccaattacatcagctgaacctttcatcaaatccaatcgtctaaaaggtttaagtttaaaagatgttgaattgtcagtacttaagaaaaatggtaaaaaacgcatcagtcatcaaatggatatgttatttactcattttggtatcagtggtccagctgcattaagatgtagtcagtttgtttataaagaacaaaaaaatcaaaagacacagcacatttctatggcaatcgatgcatttcctgaattaaaccatgaacaattaaaacaacacatcacatcacttatcaaatcaacaattgaacgacttagtaaatatgtttaa

SEQ ID NO: 345 - DNA, 954 bp, Staphylococcus aureus
atgggcaatcatttccaatacgcttttgaaaacaaacgttatcacacatggaattaccatttaaaaaataaatttggacaaaaaatatttaaagttgcattggatggcgggtttgactgtcctaaycgygatggcactgtagcacatggtggatgtacattttgttctgctgcaggtagyggrgactttgcaggtaatcgtgcagattcaatygcagtacaatttaaagaaattaargaaaagatgcatgagaaatggcacgaaggaaaatatattgcttattttcaggcatttacaaatacacatgcrccrgttgaagtrttaaaagaaaaattcgaacctgtacttaaagaaccgggtgttgtrggattatctattggtacgcgtcctgactgtctaccagacgatgttgtcgaatatttagcagatttgaatcaacgaacatayttatgggttgaattrggactacaaacaatccatcartcaacatctgatttaatcaatcgtgcccatgatatgmaaacttattatgatggygtggcaaaattacgtaarcataatatcaatgtatgtacacacatcattaatggcttacctggcgaagactatgacatgatgatggctactgccaaagaagttgcacaaatggatgtacaaggtattaaaattcatttacttcatttgttaaaaggtacaccgatggtaaaacaataygataaaggtttattaacttttatgactcaagaagartacacaaacctagttgtrgaccaattagaagtgattccccctgaaatgatcgttcaccgaattaccggtgatggtccaatagatatcatggtmggtccaatgtggagtgttaataaatgggaagtattaaatggcatcgaygctgaattagcacgtagaaattcwtatcaaggcttgcgttacaagtctaaggtgaagcaatga

SEQ ID NO: 346 - DNA, 102 bp, Staphylococcus aureus
atgttaactaatagattaactagtgttaactatgtaaaaaagcgtttaattcagaacattcagcgtattttaagtaagraagkactatatggagaaatgcaa

SEQ ID NO: 347 - DNA, 741 bp, Staphylococcus aureus
atgattaaaatwcaacaattacaacatcactttggatcacataaagtaattcataactttaatttggacattagcaarggagaaatagtcactttyataggraaaagtggttgcggraagtctactttactcaatrtyatcggtggatttattcatccatcrtctggwcgtgtcattattgataacgaaattaaacaacagccrtctccagattgtttaatgctatttcaacatcataatytgctgccatggaaaacgattaatgacaacattaggattggatthcracagaaaattagtgatgaagagattaacgcacagcttaaattagttgatttagaagrcagrggaaagcattttcccgagcaactgtccgggggtatgaaacaacgtgtggcactatgtcgagcgcatgtgcataagcctaacgttatattgatggatgagccattaggtgcattagatgcatttacacgytataaacttcaggatcaactagtrcaactaaaacataaaacgsaatcaactattatyttagtsrckcaygayattgatgaagctatttatctttccgaccgcattgttctgttaggtgaagggtgcaatattatttctcaatatgaaattacagcatcacatccacgcagtcgtaatgatagccacctacttaagrttcgtaatgaaattatggaaacatttgcattgaatcatcatcaagttgaacctgaatattatttataa

SEQ ID NO: 348 - DNA, 231 bp, Staphylococcus aureus
gtgaggttgattatcatgataactaacacttttattttaggcatcacaggyccaacaagtcttgtcgtcattagcattatcgctttaattatttttggtccgaaaaaattaccacaatttggycgtgcyatcggttctactttaaaagaatttaaatctgcwacagaagatttagayaaagagtctcacgayacacccagtaaggaatcgaarcaacagcgagagcaatag

SEQ ID NO: 349 - DNA, 564 bp, Staphylococcus aureus
atgaaattagaacgwatactcccyttttcaaaaacacttattaaacaacatataacaccagaaagtattgttgtrgacgcaacttgcggtaacggcaatgacactttatttttagccgaacaagtaccagaaggacatgtttatggtttcgacattcaagatttagctttggaaaatacacgtgataaagttaaggatttcaatcatgtttctttartaaaagatggacatgaaaatattgaacatcatataaatgatgcacataaaggtcatattgatgcagccatytttaacctaggttatttgcctaaaggtgataaatctatcgtgacaaagcctgacacgacaatccaagctattaatkcrttrytatcwttaatgtcaayygaaggtattatygtaytwgttatmtatcatggtcatagygaaggmcaamttgaraagcawgcwttgcttgattayttgagtactttrgakcaaaagcatgcgcaagttttgmaatatcaatttttaaaccaacgtaatcatgctccattcatttgtgccatagaaaaaatttcttaa

SEQ ID NO: 350 - DNA, 468 bp, Staphylococcus aureus
atgacatcaaaagatattactcaaattagtgtcattgctgcgattttaaccattttggcagytttgaaaataccrtccattataccaggattagattttcaattatctgcaccrgcagcattattgatattagctttctttggaattaaaaagtactttttaggtggrytwttatcwagcstattattactrrtatttggcgtatttaatccrattaatgtgattatytctattatatttagagttatagctattgcagttgtttatttattgaaaataaatgtactatcattagttttakcaagtgtattaggcagtttggtatmwagrytrmtaytatckrtyattttaaatttacctgtgtgggtmgtgttrttaaacgcgattccaggcgtaatattcactttaattgtagctattcctttatatctcayattragaaaaagaatggcagtmttactaagataa

SEQ ID NO: 351 - DNA, 1002 bp, Staphylococcus aureus
atggcactattaaagaatttttttatcggattatctaataatagttttttaaacaacgcagcaaaaaaagtgggcccacgtttgggygccaataaagtcgttgccggaaatacaattccagagttaattaatacaatcgaatacttaaatgacaagaatatcgctgttacrgtagacaatttaggggaatttgtcggtacagttgaagaaagtaatcatgctaaagaacaaattttaacaattatggacgcgcttcatcaacatggcgtaaaggcacatatgtctgttaaattgagtcagttaggtgcagaattcgacttagaattagcttaccaaaatttaagagarattttacttaaagcaaatacttacaayaatatgcatataaatattgatactgaaaaatatgctagcctgcaacaaattgttcaagttttagatcgmttaaaaggcgaatttagaaatgttggtactgtaattcaagcatatttatacgatagccayraattagttgataagtaccaagatttacgattacgtttggttaaaggtgcatataaagaaaacgaatcaattgcatttcaatctaaggaagacgtagatgcaaattacatcaarataattgaacaacgtttgttaaacgcacgcaatttcacttcaattgcaacacatgaccatcgcatcattaatcatgtaaaacaatttatgaaagaaaatcacattgaaaaagatcgtatggaattccaaatgctctatggttttagatcagagttagcagaagaaatygcaaatgaaggmtataatttcactatttatgtaccttatggcgatgattggtttgcgtattttatgagaagattagcagaacgcccacaaaacctwtctcttgctgyaaaagaatttgtgaaacctgctggcttaaaacgtgttggcataattgcagctttaggagctacagttatgttakgtttaagtacaattaaaaaattatgccgtaaatag

SEQ ID NO: 352 - DNA, 693 bp, Staphylococcus aureus
atgtatagtataaaaatgcgttctagcaatcaagatrttcatattagtggtgctgaaacgatttgtgagtttgacaaaatagaacagacggtacaaaggttttataataaaggtttttttcatgaaaatgggcaaccggattttctcaatataaaaatacaaaaaatyatggaaccgattmaacaaataaaagcaytacaaattattgaggatgataaagcraatctccaacatttaacacaaraatgtggtgtcactgaacaagcgctaaatcaagggatgacatatattaaaaatgaaacggtttatacaggagctattattctatctgctatatctggtaaacgtttagattcatttggacawagggggattagggcaacacatttttcgtttgaagatataaataataaaggtgatcttaatgaaagagtgactgatgccttagcaattgctagttgtatcaatgcgcatccktatgtcaaaggagaactttgygtgtcmgatgacttaacgtatacgacaggttattttgcckctgctaaaattggttaccatcgattatttgatattaaaccagttaatacgagatatggaggcagaataatatttgtggacgatygtattgatttaaatcattacatatyatttttagaaagcacaccgaagcaagttgtttatgaaasggtatag

SEQ ID NO: 353 - DNA, 315 bp, Staphylococcus aureus
atgacgtataaagaactagcaacatttttaaaagttttatcagattcaagcagattagaaatactagatttactttcttgtggagagttatgcgcttgtgatttgttagcacattttcaattctctcaaccyacacttagctatcatwtgaaagcattagtaaaaaccaacttagttacgacacgaaaaatcggaaataaacatttataccagctyaatcataatatttttgagtccgtaattaataacttgtctaaggttcatacctctaaccaacgatgtwtttgtcataaccttaagactggtgaatgctaa

SEQ ID NO: 354 - DNA, 1116 bp, Staphylococcus aureus
atgawgtttcaagagcaaattgatttattacaacagaaagggttatatcggtcgcttaaatcggtagggtatatagatagacagtatattgaagtagaaaataagmgatgtacgaactatacatctaatgattatttaggattaggtcaaatagcgtttgataaggatgatttcgaaagwtttatgcggaagtatagttatcacttatcaagttcaagattrattagtggaagttcgacagyttatgaagarattgaawcaatgttagcaggytggctcggatatagtgcatgtactatcttaaatagtggttatgatgctaatttggcgttrtttaatattttcaaaaatacaaattgtgtcgtrttttcagatcaagaaaatcatgcgagtattattgacggtattaagytaagtggtttagaaaaagtgatatataagcatttagatattgctgatttagaaaaaaggttagmgraataccctaatcaaaatatacmaaaaataatcatatctgatagtgyattttcaacgaatggcgacgttgtggatattggtcaattagtctcattaaagcataaatataacgcaacactgatactcgatgtttcacatagttttggaatagagaattactcgaattatcaaggyrtagatatactcacttctagtttatctaaagcatgtggtgcatacgggggtgtgattttaagttcaaatgatgtgaaggatatgttaattaatcacggtagaccactcatctactcaagtagtttgccaatttataatttgtattttataaaaagaaayattgaaaagttaataaatgctgatgatagacgcactaaattaaatagyttgagtaaatattttaaccaaaagttaaaagcactcaatgttaattataatagttcaaactcgccgattaagtttattgagtttgatgacatagaagcggctgagaacattcatcaaacattattaaagcatcatgtgtttacaagttatttaaggtatccaactgtgactaagccaatgttaagaatatcattrtcgtattttcatactgaacaagatatagataggttgtttgaaattttgcatcaagaagattga

SEQ ID NO: 355 - DNA, 1293 bp, Staphylococcus aureus
atgatgacaactttagcgacaytcatttttctagtaactttattatttgtattatggcaacctaaaggcctagatattggmwttacygcaytarcwggtgcctttattgctgttattactggtgttgtaagtttttccgatgttttcgaagtaacaggtatwgtytggaatgcyactttracttttgtmtcagtcattcttatttcattaatattagataaagttggattattcgaatggtcagctattcacatgcttcatgcttcaaaagghartggyytaaaaatgttcgyttatatcatattattgggtgccrtkgttgctgcatttttcgcaaatgatggcgcagckttaatcttaacgccyattgtattagcratggtwaaaaatataggttttagtaagcgggccatattyccwtttattattgcragtggttttatwgctgayacaacktctttacctttratcgtgagcaatytrgtsaatatyatwtctgcwgattaytttmayrtwrgwttcdytcratatyttagtagaatgattatmcctaatttattctcrytwttagcwagymttmtagtwttgtggttatattttagaaargcgatwcctaaawcrtttgatgmwaatmayataaarmawcctawagatgccattaatgatttaaagctatttaaaatttcatggattgtkctagttatattacttttcggctatctwatcagtraatttactaaaattccggtatcaattttcacyggaatcattgcttttatwtttctaatrttggctcgtaaatcaaatgctktaaatattaagcaagtcattaagggcgcaccttggaatatagtattattttcaattggtatgtatatcgtcgtattcggcttaagaaatgctggcattactttaatattrgctaaaatattagaatatatttccaattacggtctatttagcacyattttgggaatgggcttcatttcagcrtttttatcatcaataatgaataatatgcctacagttttaatagatgcgattgctattggtcaatcaaatgtccatggcatgttaaaagaaggcctaatttatgcraatgttatcggttctgatttaggtccaaaaattacaccgataggctctytagctacattactgtggttacacgtcttaacacaaaaagatgttaagatttcttggggcacatactttaaaacyggtatcatcattacaattccagtactatttwtmacmctywtaggrttrtatctaacacttatmmtattttaa

SEQ ID NO: 356 - DNA, 1008 bp, Staphylococcus aureus
atgaatttggctaaacgcatattacaaggggaacaattaacaaaagagactgtattgaaaatttatgaggatactaatattgataccttagatttattaaatgaggcgtayattttaagaaaacattatttyggtaaaaaagtaaaattaaacatgattttaaatgctaaaagtggtatatgtcctgaraattgtgggtaytgtggacaatcacgagawattaaacaaaaacagcgatatgctytaattccagaggaacaaattatygatggagcaaaggtggcacatgataatcatattggaacatattgtattgttatgagtggtagaggaccgagcgataaagaagttgatcatattagtaayactgtaagaacgattaaatctcaacacccgcaactraaaatmtgtgcatgtttaggattaacgaatgacgaacaagctaagaaacttaagtcagctggtgtagacagatataaccayaatattaatacaagtgaaaattaccatgataacgtcgtgacaacgcatagttataaagatagaacagatacgatagaactaatgaaagcgaataatatatcaccatgttctggcgtgatttgtggtatgggagaatctaatcaagatattgttgatatggcatttgctttraaagaaatggatgccgacagtattccgattaattttttgcatccaatcaaaggyacaaagtttggaagcatggatgatttaacaccaatgaaatgtttaagaatcgtagcattattccgattaatcaatcctacgaaagaaattcgtattgctggaggaagagaggtcaacttacgttcgttacagccattagcattaaaagcggcgaattcaatatttgtcggtgattatctaattactggtgggcaaccgaaccaattagactacgatatgattaatgatttrggctttgaaattgattatgacacttgtgaaaataaggaaaacaagaatgawgtttcaagagcaaattga

SEQ ID NO: 357 - DNA, 396 bp, Staphylococcus aureus
atgactaaaaaaacaatttattttatatgtacaggcaactcatgtcgaagtcaaatggctgaaggttgggctaaacaaatcttagcggatgattggaatgtatattctgctggtatcgaaacacacggtgttaatcccaaagcgatagaagctatgaaagaagtaggcattgatatatcaaatcatacatcagatttaatcgataataatattattaaaaattcaaatttagttgttacattatgtagtgatgcagacgtaaattgcccttctttaccaacaaatgttaagaaagaacattggggatttgatgatcctgcaggcaagccttggtcagagttccaacgtgtaagagatgaaattaaaatcgcaattgaaaatttcaaatcacgatga

SEQ ID NO: 358 - DNA, 1359 bp, Staphylococcus aureus
atgaattacacacaacaacttaaacaaaaagactcagaatatgtttggcatccatttacacaaatgggtgtatatagcaaagaagaarcaatcatcattgaaaaaggaaagggtagttacctttacgatacgaatggcaataaatatttagatggttatgcatcgttgtgggtcaatgtgcatggtcataataacaaatacttraataaggtaattaaaaagcaactcaataaaattgcccattctacgctgctaggatcatcaaatattccgtcaatagaacttgcggaaaaattaatcgaaatcacgccaagtaatctaagaaaagtattttattctgatacaggcagtgcgtctgttgaaatcgcaataaagatggcatatcagtattggaaaaatattgatagagaaaaatatgccaagaaaaacaagtttataacgctaaatcacggttatcatggggatacgattggtgcggtaagtgttggtggtatcaagacctttcataaaatatttaaagacttaatatttgaraatattcaagtagaaagcccatctttctatcgcagtaattacgatactgaaaatgaaatkatgacagctattttaacgaatatagagcaaattctaattgaaagaaatgatgaaatcgcagggtttatattggaaccgttgattcaaggtgcgacaggcttgtttgttcatcctaaaggctttttgaaagaagtcgagaaattgtgcaaaaaatacgatgtcttattaatttgtgatgaggtagcagttggttttgggagaactggaaagatgtttgcatgcaatcatgaagatgttcaaccggatattatgtgtttaggtaaggcgattacwggtggctacttaccacttgcagctacattgacatctmaaaaaatatacaatrcatttttaagtgattcgcatggtgtkaatacctttttccatggtcatacatacaccggraatcaaatcgtttgtacggttgcattagaaaatataagactttatgaaaaaygtaagttattgtcacawattgaaacgacatcatcaacacttgagaaacagttrcatgcgctgaagcgtcatcgaaatgttggtgatgtaagaggacgaggcttaatgtttggagttgaattagttacagataaagatagtaaaacgccgttagaaattgaaaaagtwgaacgtattgtacgtaawtgtaaagaaaacgggctaatgattagaaatttagaaaatgtcattacgtttgtgccagtgttaagtatgtcaaataaagaagtraaaacgatggtacgtatttttaaaaaggcagtacataacattttagataggaagtgttaa

SEQ ID NO: 359 - DNA, 549 bp, Staphylococcus aureus
atgaatgatttttctaaatattttattctaactttatccggaaatatttgttatacgtataacttggagaatgactacttgaaatttaatgacgtatacaacaaacaccasaaaatcatacacyatcttttaaaaaaatataatattagctataattatgatgagtattatcaactactcttgataaaaatgtggcaattgagtcagatatataaaccctcaagcaagcaatctttatcctcttttttattcactcgattaaattwttaccttatcgatttattcagacaacaaaatcaattaaaagatgtcattttatgtgagaataattcaccaacattaactgaacaaccaacatactttaatgaacatgaccttcgtttacaagatatcttcaagcttttaaatcawagagaaagactatggctcaaactataccttgaaggatacaagcaatttgaaattgctgaaatcatgtcattatcgctttcaacgattaaattaattaagatgtccgttaagcgtaaatgccaacataattttaattag

SEQ ID NO: 360 - DNA, 687 bp, Staphylococcus aureus
atgaggatttttattacaagtacgaatactgatgtaggcaaaacctatgttacaaagcatttataccatgctttgaaaacacgtggtcatcgwgtttgtrtttttaaaccatttcaaactgaggaacgccaagacgggacrtttccagatttagaagtatttaaaaatgaatgtgatttaagctatgacataacgtcactttatacttttaagcaacctgtatcaccacaccttgcatttaaaatgrcaratcaaatttttctaaataagcagygtgtattagataaggtaaaagttttagataaggaatttgattttatcttaattgagggtgctgggggaattgccgtaccaatatatgaaggtacagatgatttctacatgactaaagatctaatcaatgattgtgcagattgtgtcatcagtgtgttgccatcaaaattaggtgctattagcgatgccrttgttcaccaagattatgttaatmagaatgtatcggcgagtaattttttaataatgaatcgctatacagrcagctatattgaaaaagacaatcaaatkacgattggaaaattaacaaataaaacagtctatacatttgaagaacatgccacgtatgaaaatttctcagaagcatttttaaarcaattaataggagttaaaaatgaattacacacaacaacttaa

SEQ ID NO: 361 - DNA, 549 bp, Staphylococcus aureus
atgaatgatttttctaaatattttattctatctttatccggaaatatttgttatacgtataacttggagaatgactacttgaaatttaatgacgtatacaacaaacaccacaaaatcatacaccatcttttaaaaaaatataatattagctataattatgatgagtattatcaactactcttgataaaaatgtggcaattgagtcagatatataaaccctcaagcaatcaatctttatcctcttttttattcatgcgactaaacttttaccttatcgatctattcagacaacaaaaacgtttaaatgatatcattttatgtgaaaatcattcaccaatactaactgaacagccaacatactttaatgaatatgaccttcgtttacaagatgtttgtgccctactaaaccacagggaacgtcagtggcttatgctttatcttgaaggctataagcaatatgaaattgctgatattatgtcattatcaacttcaacaattaaattaattaaggcatcagttaagcgtaaatgccaacgtttttttaaatag

SEQ ID NO: 362 - DNA, 444 bp, Staphylococcus aureus
ttgcaagacaattctactaaatatctactttatatccaaactgctacttcaaaccatctcgaaacaaattgtgtctttttacattgcgattacattcttaaagttccaattaacaaactcgtttcatattatgcgaaattgcatttatcatcacaaagtgtgctaattgagactgcaaaaaacatactaaatattaataaactggttcctatttacatcaacccaaaaactatactttttccgttaaaacataaacgtgcaccgatacaaatttatatcaatgcacattatattgttggtatgactgccatagagaattcaacattaatacattttcaagaaggcattcagctagaagttgatgagccattttctctagtttcaaaaaaatgtcatgaaagtttagctttgaagcacttcattgaaaatactatttcgaattaa

SEQ ID NO: 363 - DNA, 1266 bp, Staphylococcus aureus
atgaataggtgtgatattttgaaaaagttatataaaaatcgttcgttttctaatttacttatgagtagaattttgataaatgctggtgatagtctctattatgtttctacaacttggatagttttacaatggacgcaaaaccctttactagttggtttaactaatactttattaatgattcctatgtgtatttcatttttatttggtcctttagtagatgccttaccattaaagaagactctatttttaacccctttattacaatgtctattactatcactaattgcttctttaaacctaattggatacttaaatgtatacggcttgatcattttagtggcaattgcaatgttttgcactcaaataggatacccagctcagtctaaagctatacctttattagtaaaaaaagatcaattattagatgcaaattctgctatgagtgtcgcatatcaaggaacagatgttattatgaattcaataagtggtattattgttgcagcaatagctttttttccactatattctattaattcactaatatttctaatagcttgtttatttatgctgaatgtaaatattcctaatataactaaccctgcaagaaataatccttcttatttacaaaatttaaaagaaggtgtgctaggaattaaaaattcactcctactagttgttgcattggtaagtggtgttataaattttggactaggacttctttatacatggatacctttaaaggctgaccatttaggtggagcctattattacggtttattaatggcactattttcaataggtttaattgtaggttcattaatcacaccttatataaaaaaaatcaacttgggatatggaaaattattaatactcttaaatactatttcaggtttaatattaattttagttaactatattccgcgaaatttttttataattttgtttccagtagcttttatgacaattagtattaccaatatatccttagcttctattcaacaaaaggttattccagaacatttgcttgctagattaactacaatcataacaagtatttcagcaatttcattaccgatgggtagttttattggcggaatcctaataaaaaatcttggtattgattatactcttgtaattggtggagcattatttattattgcaagtatcattttctttatatctacaccttacagatcattgcctaaaattgaaaaaatagagcattatcatatattcggaattcagaaaattggaaacaatcattaa

SEQ ID NO: 364 - DNA, 636 bp, Staphylococcus aureus
atgcaaaaattcaaagactttttttacgatgatttatcggttacacgaggaaattattttttaactttaatggcagcattttttattactatcattttatttatcggcatagttgtcagtgaagtacatttactttatagcatgctaattgtattagtaggtttaattctattgaggctattcaaaatcaatttattctcttttaaaaaattaacattgtctcaagttatttatattataggcggtgcactattaatttatgggttagataatctttatttatattttcatgacgtaccggcaaatgaacwacaattagagcaagmaatacgaaatacaccattctatatttctattttcactgttaccatcatccccgctattgtggaagaaattgtttttcgcggtatgataataagggttatmttcagaaaacacttrtttttagggttamttgtgtctagtttagtttttgcatcattacacgaatctgacacttggattggttatttaccttacttatattctggtttgatttttggymtaatttatataaaaacaaaacgattagaagtkgtaatattcatgcacttcttaaataacttgttagctctgctctttataatatggrgataa

SEQ ID NO: 365 - DNA, 1734 bp, Staphylococcus aureus
atgtttcaaattacatttaaaattttaaactggataagaccatataaagcaagaatgattttaggatttagcatgtcatttttaaatgctatttttattgcgytacctatctttttagytgcaaaaatatttaataatgtgctatctcataaacctatttatatgaaagatatattgaatgttgtaattatcatggttttattagtgattggacgatttattacagcatatttcaaaagcaaaagccatgagagcatcgcttatgaaatgagtgcgaaagaacgtttagatataggggataaattgaaaaatgtaaggttaggttattttaattcgcatcattcaaatgagttaacaacaatagtaacaacagatttaacmtttytagaaaactttgcyatgaaaatggtrgayrttgttgttaatggatacatattaattacagtactcatattgtctctacttgtagtttcgtggcaagtatcattattagcatgcattggcgtattactatcattttttgcgattcaattattagaaagaaagagtcgacaaaatgcgccagcgtatcataatgtacaaaaccaattagtggaaaaggtattggaggttattcgtggtattcaagtaataaaatcattcgcgaaagaaaatacgagtcttaaaagttttaaccaagcagtcaatgraagtaaacgtataaatacaaaaatagaaatgcaatwtatcccattcaatttattgcatttacttagtttaaaagttgtttcaataatgattgtattagttgcatgcttattatatatgaatcatagtattgatttacctacccttattatgatttcaattttttcatttgtgatatttgatagtgttgaaaatattaatagtgctgcacacgtacttgaaatgatagatatgacgatagatgatattgaaaagataaaaaatgctccagaactggatgagaatggaaaaaatttgacgattaaaaatgaaaatatcgcttttcaaaacgtgaayttttcatatgatgataaacaagtgataaagaatgtgaattttgagatacctacacaaacatcaacagcaataattggaccttcaggaagtgggaaatctacattatgtcacttactcttgcgcttttatgatatcgatgatggaaatattcgcatcgatggtgttgatattaaagatatgacattaagtacgttaatgtcgaaaattagtgcagtatttcaaaaggtgtatttatttaatgatacgattgaaaataacatattgtttggcratccaggtgcaacgaaagaagaaattattcgtgcarcgaagcaagcatgttgccacgacttcatcatgtcattacctgagggatatcaaacaatgctaaatgaaaaaggtagtaatttatctggcggagaaaagcaaaggatttctattgctagggcgatattaaaagatgcaccaataattattttagatgaagcaactgcaagtattgaccctgaaaatgaacagctgattcaaacggcaattaatgaattaagtaaaggcaaaacagtaattacaattgcacataaacttgaaactattaaaaatgcagatcagattatagtgctcaatgaaggtgaaataattcaaaaaggtagtcatgatgaattaattcgaaaaccaggaatgtatcaagactttataagaataaaaagtaaatcagcaggctggaaattataa

SEQ ID NO: 366 - DNA, 366 bp, Staphylococcus aureus
atgcaatatgtatatatttttatcggtggtgctttaggcgctttattacgttacctcatttcttttctgaatactgacggaggttttccaatcggaacactgatagccaatttgactggtgcytttgtaatgggattgctaacagccttaacaattgcatttttttcaaaccatccgacsctwaaaaaagctattacgactggttttcttggtgctttaacgactttttcaacatttcaattagaattaatacatatgtttgatcatcaacaatttataactttactactatatgctgtaacaagttatgtctttggtattttgttatgttacgtcggtataaaactaggtggtggtttatcatga

SEQ ID NO: 367 - DNA, 1764 bp, Staphylococcus aureus
atgaacaatcagacaaattggataaagatactcagcggatttgcttctgatagtaaatggaaaattatgttatcaattttgttgtctatcatcagtgtcttttctggattagttccwtattgggcagtmtttaaaattattttaatgatgattaacaatrcatatacgattaattcgattatggtttatatctttattgytttaatcrcttatatttcacaagtgtgttgttttggagcgtcaacgatgctatcacatattacggcatatgaaattttatctgaaattcgtaaaaaattagctcaaaaattaatgcgyctccctttaggcgtagtggaatctaagaaaataggtgaattaaaaaatatatttgtcgataaggttgaaacaatagaattacctttagcacatatgattcctgaagttataggaaacttacttttgtcagctgctatctttttatacataatgctcattgattggcgtatggctagtgccttattagtaacgataccaatttcaattttcgcttttaaaaaagttatgtctggatttaatgagacatatgctgaacaaatgaaatcraataattatatgaatagcgcgattgtagagtttatcgaaggcattgaagtgattaaaacatttaatcaatctcaaagttcatataaaaaatataaagatgcagtagataattataagattcacactttgaattggtttaaaaatacatgggggtatatgaatttaggagctagtgtattaccttcaacatttttagggattttaccggtcggcatgtatttgatatctatyaaccaattaaactatgcggaatttttcctatgcatcgtattatctttaggtgtagtagcaccgattaagaattttactaattatgtaaatcatttaaagtctatacaatacgcattaactgaagtgaatcaaatattaagtctagaagagttagtattgtcaacaaaatttaagaagcctcaacattatgaaattgcttttaataatgttggattttcatataacaaagataaggacgatctggtctttaagcatttatcatttacagtaccagaaaataatttcayagctatcgtcggggcwtctggtagcggtaagtcaaccattgccaagcttatatcacgatactgggatgtgacttcaggtgaaattacgattggcggtataratataaaagatattgaatcgaaacaacttaacgatttagttggttttgttggacaagataactttttattaaatcttacttttaaagaaaatattaaacttggcaatccagaagctacggatgaggcagttgaaaaagctgccaagttagcacaatgtcatgaatttattgaaaagttgccagatggatatgatacgaatgttggtacagtgggagataaattgtctggtggtgaaaaacaacgagtcactattgcaagaatgatattaaaagatgcgcctatcattgtattagatgaagcgactgyttacgttgatccagacaacgaacaaaaaattcaagaagcattaaatgtgttgacgcaggataaaacattgattgttattgcacatcggttatctacgattcaacatgcagatcaaattattgttttaggtaaacaacaaattttagaaaaagggtcacatcacttattgctaaaattaaacggtaattataagaaaatgtgggatacgcacatgcatacaaaagattggggaatcaatactggacataattaa

SEQ ID NO: 368 - DNA, 354 bp, Staphylococcus aureus
atgatatcaatcattttagtcatgattggcggcggtttbggygcaattrctagaagtgccattactgattatttyaatcataaattyacttcaaagttacctatcgcaacattgatagtaaatctwgttggtagttttttaattggattaamtataggcytatcaatttcaayctcatggttccctgcgttctttgtyaccggttttttaggtggcttaacaactttctcaacrttagccaargaacttacaytaatgatgacrccaaaatttratattaacctttttctcaattattcacttttacaattcatcattggatttatagcttgttatattggctatcatatttaa

SEQ ID NO: 369 - DNA, 636 bp, Staphylococcus aureus
atgaaaaaagttataagtttatttgttgcaattttatcagtgttgatttttacggataatgcgaacgccgaaaataacaarcctgaaggtgtgaatgaaaacagcaatttaataccagttagacaaccggatgcaaattatccwgggccagttagtgacatagcacgtgtgaaaaaacttgataatttaatagatggcacgaaagatccaratgttatcaagcagttgaaagatgataatgaggtgccgaataatgcggtaaaggcaaaagattctaaaatagtatccgactgcagacatttactaaaacatccagataatttaatagatggcacgaaagatccaaatgttattaatcagttgaaaaacgcaaatggaacatcgaataatagtgctgtaaatccaagtattaaagcaaatgatattcacacaaaaagtaataaacaaatggctaaacaacaaagtattcatttggatagcaagagcaagtcagtacataagcaacaattgaaagaattgccaaaaacaggagtaaacaacgaaagtaatacagcaataatggctttatttattggtttaatattgcttgtagtaagtttagtgacaagatttataaaattaaatagccatcaataa

SEQ ID NO: 370 - DNA, 762 bp, Staphylococcus aureus
atgacacgtcycacaawtaayaaawttatattacctattatcacatttattattttcttaggcatttgggaaatggtcattattattgggcattaccaacctgtattgttacckggtcctgctcttgtaggaaaaagyatatggwctttcattgttactggagaaattttccaacatttagcaattagtttatggagatttgtagcgggctttgttgtcgcattgttggttgctattccattgggcttcttgcttggaaggaatcgttggctatacaacgctatcgaaccgctatttcaattgattagrccgatatctccgatagcwtgggcaccatttgttgttctatggtttggtattggtagtttgccagcgattgcgattatttttatcgcygcttttttyccaattgtgttcaatacyattaaaggcgttagagacattgaacctcaatatttaaaaatagcrgcaaatttaaatttaactgggtggtcattgtatcgcaatatattatttcccggggcatttaaacaaatcatggctgggatacatatggcggtaggaacaagttggatatttttagtttctggtgaaatgattggtgcacaatcgggattaggttttttaatcgttgatgcacgaaatatgttgaacttagaagatgttttagcagcaatattctttatcggattatttggttttattattgatcgattcattagttatattgagcagtttatacttagaagatttggtgaataa

SEQ ID NO: 371 - DNA, 105 bp, Staphylococcus aureus
atgttcaatttattaattracatcatgacttcagctwtaagcggctgtcttgttgcgttttttgcacattggttacgaacgcgcaacaataaaaaaggtgacaaa

SEQ ID NO: 372 - DNA, 1593 bp, Staphylococcus aureus
atgtcagtagacacatacactgaaacaactaaaattgacaaattactgaaaaaaccaacgtcacattttcaactttcgacgacacaactttataataaaatcttagacaataacgaaggggtattaacagaacttggtgctgttaatgcaagtactggaaaatatactggtcgttcgcctaaagacaaattttttgtctcwgaaccttcatatagagataacattgaytggggagaaattaatcaacctatcgatgaagaaactttcttgaagttataccataaagtactagactatttagataaaaaagatgaaytatacgtatttaaaggctacgctggtagcgataaagatacaatgttaaaacttacagtcatcaatgaattagcatggcataatttatttgctaaaaatatgtttattagacctgaatcaaaagaagaagctacaaagattaaacctaacttcactatcgtttctgcmccacattttaaagcagatccagaagttgatggtactaaatctgaaacctttgtcattatttcatttaaacacaaagtcattttaatcggcggtactgaatacgctggtgaaatgaaaaaaggtatcttctctgtaatgaattatctcttaccgatgcaagatattatgagcatgcattgctcagcaaacgttggtgaaaaaggcgatgttgcattattctttggtctatctggcacwggtaaaacaaccttatcggctgayccacaccgwaaactaatcggtgatgatgaacmcggmtggaataaaaacggggtctttaatatcgaaggtggctgctatgcaaaagcaattaatctttccaaagaaaaagaaccacagatttttgacgcaatcaaatatggtgcrattttagagaacactgtagttgcagaagatggttcagtggactttgaagacaatcgttatacagaaaacackcgtgccgcttatccaattaatcacattgacaatattgtagtaccatcwaaagcagcacatccaaatacaattattttcttaactgcggatgcatttggtgttattccaccgatttcaaagttaaataaagaccaagcaatgtatcatttcttgagtggtttcacttctaaattagctggyacagagcgtggtgtgacagaacctgaaccatcattctcaacatgtttcggmgcaccgttcttcccgttacaccctactgtttacgctgatytattaggtgaacttatcgatttacatgatgttgatgtttatcttgttaatactggatggactggcggaaaatatggtgtaggacgtagaatcagcttacattacacacgtcaaatggtaaaccaagcgatttctggcaaattgaaaaatgcagaatatacaaargatagtacgtttggtttaagcattcctgtaraaattgaagatgtaccgaaaacwattttaaatccaattaatgcttggagcgacaaagagaaatataaarcacaagcagaagatttaattcaacgttttgaaaagaacttcgaaaaatttggtgaaaaagttgaacatattgcygaaaaaggtagcttcaacaaataa

SEQ ID NO: 373 - DNA, 387 bp, Staphylococcus aureus
atgaaactaacacaaacgcatgctgaaattttaaaatttatcattgttggcggcattaatacgttaaaytattatgttgtctatttattgctgttaaaattattacacattgaatatatgattagtcatattaccggatttmtagtcgcttttgtgatttcrtattatttgaattgttattttgtttacagggtaaaacctacttggagaaaattcattagttttccaattacgcagattgtcaacrtaagcttacaaacagttttattatatgtwtttgtatcctggctaaatttgccagcrgaaattgcrccatttgcwggtttartkattacgatacccatcacatttrtattatctaaatggattttaaaagatagyaattaa

SEQ ID NO: 374 - DNA, 258 bp, Staphylococcus aureus
atgaaaaagatattcttggcgatgattcatttttatcaacgtttcatttcgccactcactccaccaacttgtcgtttttatccaacatgttcagagtacactagagaagcgattcaataccacggtgctttcaaaggcctttatttaggyatccgtcgtattttaaaatgtcatccgcttcataaaggyggctttgacccwgttccgttaaaaaaagacaagtcagcaagcaagcattcacayaaacataaccattaa

SEQ ID NO: 375 - DNA, 474 bp, Staphylococcus aureus
atggaatatcaattacaacaacttgcgtcgttaacgttagtaggtattaaagaaacgtatgaaaatggacgacaggctcagcaacatatagcmgggttttggcaaagrtgttatcaagagggagtaattgcrgatttacagttaaaaaataatggtgatttagccgggatacttggcttatgtataycygaattagayggtaagatgtcatataygattgcagttaccggagataatagtgctgatattgmaaaatatgatgtcataacattagcaagttcaaagtatatggtatttgaagcacagggmgcagtacctaaagcagttcaacaaaaaatggaagaggttcatcactacatacatcaatatcaagcaratacggtaaaatcagcaccattttttgagttgtatcaggatggtgatactacaagtgaaaaatatattacagaaatttggatgcctgttaaagggtga

SEQ ID NO: 376 - DNA, 651 bp, Staphylococcus aureus
atgaaaataacatataaatatagaggagatttacctttgaatacagagaacaacaagaatcaaaaccratctgytaaaaattctgaaagacgyggcatgttaaaaggatgcggcggttgccttatttctttyattwtattaatwatcttattatcagcctgttcaatgatgtttagtaataatgacaattccactartaatcaatcatcaaaaacgcaattaactcaaaaagaygaarataaaartgaaratawgcctgargaaaaatcagaawcagmwacagatraggatttacaatcaaccgaagaagtaccygcaaatgaaaatactgaaaataatcaacatgaaattgatgaaataacaacaamagatcaatcagaygatgawattaacacaccaaacgttgcagaagawraatcacaagaygacttgaaagatgatttaaaagaaaagcaacaaycaagtraccatcatcaatccacgcaacctaagacytcaccatcaactgaaacaaacavgcaacaatcatttgctaattgtaagcaacttagacaagtwtatccgaatggtgtcactgccgatcatccagcatatcgwccacatttagatagagataaagataawcgtgcatgtgaacctgataaawattaa

SEQ ID NO: 377 - DNA, 807 bp, Staphylococcus aureus
atgaagatagggacaatcgccgatttacatattgatcgtcataataaaaaaacatccgaagattacttagaggcattggttgaaatagttaagtataaraawttggatatattgttgattgcgggrgatatctcaaatcattatcaattgacgcaccaatttataacgcaawtgacaaaacaattagatatacctgtgaaatttgtwcctggaaaccatgatttatgggaagttgaaagtatgactacgcaagacatttggaataattataagagyatgtcacagtgcttggtaggaaaaccatttatagtaaatgaagaatgggcaatmataggacatacwggytggtatgattatagctttgcagcacaacgattttcattagawsakttacaaaraggraaacattatggtgcgacttggcaagataaagaacgaatatcttggggcayatcagatcaaaatttatctaaaatagcggctgaacaagtgaagaaagatmtattagaagtaggaaatagamgagtgattttagtcacacatgttgtgacgcaccctgatttcattgttcctatgccrcatcgtatattcgatttttataatgcatttattgggacaagtgatttcaatcctttgtatgcgatgttcgatataccatatagtattatgggccatgttcattttcgkaaaagtgtgatrgatgatggcagatgttatctctgtccgtgtctaggctatccaagacaatggcgttcagaagatatttaccaggaaataaatgagacgatacaaataatagaaatttaa

SEQ ID NO: 378 - DNA, 996 bp, Staphylococcus aureus
atgagcaatcaattcaaaagygaagaagarcgaagacaatgggaacaattccaagctttccaaaatcaacaaaaccaacagmaccagcaatacggacaaaagaaatctaaaaaaggatggttctggggytgtggtggttgtctagtattattyattttaattatcatcggtatttcagcttgtacagctggtrtyacwggtaaccttggyggaaatagttctaaagaarcgaacaaaacccataaaatyggwgaractgtwaaaaatggygaycttgaagtcacwgtwaattcagtkgaaactatgaaatcwgtwggwccrtctmtygcrccaacaaaygctaaaggtayatttgtcgttgctgatgtgacgattaaaaacaaaggtaaagaagcgttaacaattgatagttcaatgtttaarytraaatcyggtgataaaacatttgaagcagataatacaggytcaatgtctgctaatcaaartgacaayggtagtatagaaaattcatttttcttacagcgtataaatccwgatagcactgcwcaaggtaaaattgttttcgatgtgtcagaaaacatagccaacgcaaaagataaaaaattagaagttatttctagtttatttagcgtcaagaagattacatttgatttatccgatgctaaaaaaacatcaaaagctaaaaaagacaagcaagatacagaagtagctgytgcgagttcaaatagcgataatgtaarttatgaagcttcggctactacacctgctacaacttctagtgcrratamtgattctgaagawarygaamagtctagtaaagatgargataarcagaatgcgtctaaaagtgataawtctagtgtagaaaaaagtgaatctaatgargaaactgctmctgtagarycmryrccycadagcaaacctryyacwagtgaagcaccwcctarycaaaatawtcacaaygaaratarcatgtaygaygcttcaacagaataa

SEQ ID NO: 379 - DNA, 1830 bp, Staphylococcus aureus
atgttcaatcaatttaaaagacttattatagggcaacctaaaaaaaacagagaactaaaagacgaaaagatatcgaagtttaaagggttagcgattctttcgtcggatgcattatcttcagtggcttacggtcccgaacaaatactgattacaytatcagtagtgggtgcagttgcaacttggtatactttaccgattgcaggtgctgttctgatcttattagctgctttaattatgtcttataggcaaattatttatgcatatcctaaaggtggcggcgcgtatatggtgtccaagaccaatttaggagaaaaatggggattgcttgcaggaggctcattattagtcgattacatactgactgtcgctgttagtatatcatctggtgctgatgcatttgttgctgcattcccaagtttatatgggcataaagtactgattgcatgtttacttgtactttttattttaatattaaatttacgtggtttaactgaatctgccaccgtattatcctatccagtatatcttttcattatagggttagtgatattaatatttataggtactttccgtgtggcgacaggwgatattcaaccacatatgcatgcatcagtaggaactgcggttcctggagtaacattattcttgctattaaaagcwttttcatcaggggcttcatcrttaacrggtgttgaagctatttcaaatgcggtaaccaattttagagarccaagtgctaawaatgctgtraaaacgttaattgctatgggttcaattttagcgtttttattagttggtatcgttggtttagcataygtttatggaattwtgccacaaacggaaacgacagttttatcacaattagctatgcaaatatttgrtgataatgctgccttctattttgtacaggcaacgaccgtgatgattttggtattagcagccaacactggatttacagcttttccgatgttagcggcttcaatgtctaaagataaatatatgcctagaatgtttactgttagaggtgatcgcttaggctactctaactcrattattattttaggtgtattagccattattttaattattgtatttgatggtatgactgaagatttaattccattgtatgckgttggtgtattyattccatttacactagcacaattcggtatggttattaaatggattcatgaacgtcctaagaattggttaagtaagttgtctgtgaacttactwggtggtatcgtgacatttattgtttttatgattttactcataactaaatttagccaagtwtggccgatacttattttcttgccgttcgtggtgattttcttcttgaaaattaacaaacattatcgagatatcgcagaacaattacgttctgayattgatgttcwtaatgtrgamgtrgtagatcgtaatttagcaattgtkccgataacaagyattacaacwgcagttgataagtctatttattacgcacaaatgcttgcgaataatgatgtyatwgcagtacatgtatcatttggagatgaagatgaaaaagcattccaagagaaatggaaacgtcatttcccagatgtaagattagttattttacaytcggaatatcgcagtattatacgaccaatttcacgttttatcgataagattaatcgtaaagcmaacgatcaaaactatatgattacagtagtgataccagaatttattactaagaaacgttggcataatttattacacaatcaaactagtttgcgtatgaaattgtatttaatttatcaaaagaatgttaacgtatgtacaattccatttaaacttaaaaaatag

SEQ ID NO: 380 - DNA, 627 bp, Staphylococcus aureus
atgaaattcaaagctatcgttgcmatyrcattatcattktcactattaacygcytgyggtgctaatcaacataaagaaaatartagtaaatcaaatgacactamtaaaaagacgcaasaaactgayaacactacacagtcaaatacagamaagcaaatgacwccacaagaagccgaagatatmgttcgaaacgattacaaagcaagaggygytaaygaawatcaaacwttaaattataaaacaaatcttgaacgragyaatgaacatgaatattatgttgaacatctagtccgcgatgcagttggcacaccwttaaaacgttgygctattgttaatcgacacaatggyacrattattaatatttttgatgatatgtcagaaaaagayaaagaagaatttgaagcatttaaaaagagaagccctaaatacaayccaggtatgaryratcawgmtraaayrgatrrtgagtcrgaagacattcaacatcatgayawtgayaataacaaagcmattcaaaatgaywyaccagatcaaaaagycgwygataaaarygataaaaatgctgttaataaagaagaaaaacaygataaysrkrmaaawaattcwgmagaaactaaagttaaataa

SEQ ID NO: 381 - DNA, 102 bp, Staphylococcus aureus
gtgcctaatgagatttattttattataccagttctattgaataaattaattaaagaggtatatttaccattatttttgacaccttatatgttaataggtgta

SEQ ID NO: 382 - DNA, 852 bp, Staphylococcus aureus
atgagtaaaatttttgtaactggtgcaacgggccttattggcattaaattagttcaaagactaaaagaagaggggcatgaggttgctggttttactacatctgagaatggtcaacaaaagctagctgctrttaatgtaaaagcatatattggtgatatattaaaagctgatacyattgatcaagcgttagcagattttaaaccagaaatcattatcaaycaaattacggatttaaaaaatgttgatatggcagcaaatacgaaagtacgtattgaaggttctaaaaacytaattgatgcggcgaaaaagcatgaygttaagaaagtaattgcccaaagtattgcctttatgtatgaacckggcgaaggattagcaaatgaggaaacttcacttgattttaactcaactgghgatagaaaagtaacggttgatggtgtggttggtytagaagaagaaacggcycgtatggatgaatacgttgttttacgttttggytggttatatggyccaggtacttggtacggaaaagatggcatgatttataatcaatttatggatggtcaagtgacactttcagatggcgtaacatcatttgtgcatcttgatgatgcagttgaaacatctattcaagctattcattttgaaaatggtatctataatgtagcagatgatgcacctgttaaaggttctgaatttgcagaatggtataaagaacaacttggtgttgaaccaaatattgatattcaacctgcrcaaccatttgaacgtggcgtaagcaatgagaagtttaaagcgcaaggtggtactctgatttatmaaacttggaaagayggcatgaatccaattaaataa

SEQ ID NO: 383 - DNA, 198 bp, Staphylococcus aureus
gtgggattgataatgtttggcgatcaaagacaagaagctacaaaatatgtcattaaagaaggttatcaagatatttatttcctcaacaaaaacggggaatggtattatttcgaagtaagaagtgtctggcgtggcaaacatattattagagttaaagatggtttgttaggttggagaaaagaaatagtaactgaataa

SEQ ID NO: 384 - DNA, 441 bp, Staphylococcus aureus
ttggtaataaaacgtttagaaactgtttatttatataattttcgatacttagattatataatgaataatatcttagtgcaagcacctagattattaaataaacacaaaaaatgtaagcgttttattacctcttaccaaactaaaattcggaaagaggtttttattatgtcaattaaactttacaacataaatgaggaatacagagaaaagttttatcaaataccgaaagtattttttacaaatcctaaatatatcaagttatccaatgatgcaaaaatggcatggggtattcttagagatcgtttagatttatcaattaaaaatggttgggttgattctaaaacaggtaatatttatttttattacaaaaatgaaaacccacaaaatatattaaattgtaaaaaagataaagtaattaaaataaagaaagaacttaattga

SEQ ID NO: 385 - DNA, 348 bp, Staphylococcus aureus
atgagttatgaaaatacttgtgatgtgatctgtgtacatgaggataaagttaacaatgctttaagttttttagaagatgataaatctaagaaattacttaacattttagaaaaaatttgtgatgagaagaaattgaaaatcatattatctttgattaaagaagatgagttgtgtgtttgtgatatttctttgatattgaaaatgagtgttgcttcaacttcacatcatttaaggcttttatataaaaatgaggtacttgatttttataaagatggaaagatggcatattattttattaaagacgatgaaataagagagtttttctctaaaaatcaggagggtttttga

SEQ ID NO: 386 - DNA, 573 bp, Staphylococcus aureus
rtggagaaaaaygaatatayagctaaatataatgaatatagtcaattattagacgctacwtactcgcaagcygtagcataccttttaartaaatatggcgctgtaaccgatgaytattataargaaaaatcatacacrcgatttttaaatggagaaatcaaaagtattwcaaaaggaaaatacactagagctrgygaaggattatattgycatcayataagcgargacaaattccaaaayytatctgayctaagattcatttccraatttaagtactcatacraykwtcaaaagaaagaaaacttagtktactgygatytaatcgagcatttaattttacatgcaattattacaaaagaatccmatggccaatttggtgtrgctggattatgtcaaatgatcaaaccaacagtcattgattggtacattrgcgaatatamtccaaaaccagcatggatgcaagccaccaaagcacgtgcctatttgcctrgaatattagtagagaaaytactcattaaaattgacgatatgttaraagrmatagaaatatawgatttccttgagtctagataa

SEQ ID NO: 387 - DNA, 936 bp, Staphylococcus aureus
atgaaaattgcaattgctggatcgggtgcattaggtagtggctttggtgccaaactatttcaagcaggatatgatgtcacacttattgacggatatacatctcatgttgaagcggttaagcaacatggattaaatataacgattaatggagaggcattcgagttaaacattccratgtatcattttaatgatcaacsggacgaaagcatttacgatgttgtctttctatttccaaagtctatgcaattaaaagaagtgatggaagmtatgaagccacatattgataatgaaacgatygtcgtatgtacgatgaatggtytgaagcatgaagaartcattgcgcagtatgttgctcaatcacaaattgtcagaggtgttacgacttggacggcaggtcttgaaagccctggacacagtcatttacttggtagtggaccagttgaaataggtgaactagtkgatgaaggtaaagaaaatgttataaaagttgctgatttacttaacgaagcggaattgaatggtgtcattagtaaagatttataccaatcgatttggaaaaagatttgtgttaatggtacggcaaatgcattaagcacagtgttggagtgtaatatggcatcrctgaatgaaagtagttatgcgaagtgtttgatttataaattaacgcaagaaatagtgcatgtagcgacgattgataatgttcatttaaatgttgatgaagyatttgaatatttagttgatttaaatgaaaaagttggtgcgcattatccatccatgtatcaagatttaattgttaataatagaaaractgaaattgattatattaatgrcgcagttgcaacattrggtaaacaacgtcatattgaagcrccagtcaatcgctttattactgatttaattcatactaaagaaagtcagcgacaygcacaggattaa

SEQ ID NO: 388 - DNA, 975 bp, Staphylococcus aureus
atgagtaatactaaaattaaatatcaaatttttatttcatcaacttatttagatttaatagaagagcgtcaagcagtagtagaagcagttttaaacagtaataatattccagcaggtatggaactttttaactcaagtagtaaaagccaatgggaaataataacacaatggatcaatgaatcagatgcagtgatattattgttaggttctagttatggaacaattgatagtgaagaaaatattagctatacagaaatggagtacaattttgctaaatctttaggtaaacctatatatgtttttgagatgaataaagcatctaccgaatccgcggaaaagtctaaaaaattagatgagtttaagacaaaagttaaagaaaatagactaattagtccaaatattaatgatatttcggaattaaaaagtaaagtatctcagactttaatacaaagtgtacctagtgaaattaaagaaaatagtggatggataagagtacaggattgtggtaaaaatgtaaaaaaaataaaaaaattggatgctatacaaagagatttagatacatatgattttttgaaagaagaactttataaaatattcatgtatgtaaaaactttttatttccagcacacaccatttgatgatagttatattgaagatatagaaaactacctgctaaattatgaaaataatccacataaatcattcatgaaaataaaagtttatgattataaaaactttttaaaacatttaaaaaacatattgattttaattaaacaaggaaaaaagccattagctcaagccggtcattttaaattaagcttttacgaagaggatttaaaattgttacaaaaaaattataaggctacgctagtcgatattaaaggattgaataaacatttttataaggaatgtgataggtgcttaaaagcatataatatttttattgagggtataaataaacatttatatgaatga

SEQ ID NO: 389 - DNA, 99 bp, Staphylococcus aureus
atgcaaggttttaaagagaaacatcaagaactaaaaaaggctctatgtcaaattggactgatgcgttcaatatccgaagttaagcaactaaacattgct

SEQ ID NO: 390 - DNA, 1401 bp, Staphylococcus aureus
atggacacatcaaaacaatttagaggtgacaaccgattgcttttrggtatcgttttaggggttattaccttytggctattcgcgcagtcacttgttaatcttgttgtcccattacaatcaacatatagtagtgacgttggaacgataaatatcgctgttagcttatctgccttatttgctggtttgtttatcgtaggtgctggtgatgttgctgataaatttggtcgcgtcaaaattacttatgtaggattgatattaaatgttgtaggttcattactcatcatyattacacctttgccagcatttttaattataggtagaataattcaaggtttgtctgcagcatgtattatgccatcmacacttgctattattaacgaatattatattggtacaagaagacaacgtgccttaagctattggtctattggttcttggggtggtagtggtatttgtacgttgtttggtggcttartggctacatatataggttggcgttcaatatttgttgtttcaattctattaacattattagcaatgtacttaatcaaacatgcacctgagactaaagcagaaccaatcaaaggtatgaaagcagaagctaaaaagtttgacgttatyggkttagtcattttagtagtgacratgttaagtttaaatgtaatcatyacacagacgtcycattttggtttagtttcaccgttaattctagstttaattgtwgtgtttatctgttcattagttggttttgtatattacgaaaataaaataaagcayccactygttgatttttcaatttttaaaaatagaggatacagtggtgcaactatttcaaacttcttattaaatggtgtagcaggtggtgcacttatcgtyattaacacgtattatcaacaacaattaggatttaattcttcgcaaacgggttatatttcattaacgtatttaatarcagtgttgtcwatgattcgtgtaggtgaaaagattttatctcaacatggtccgaarcgcccactattactaggaagtggctttacagtgattgggttaatcttattgtcgttaacatttttaccagaartgtggtatatcrtatctagtatagttggatatttattgtttggtactggtttaggattatatgctacaccatcaactgatacagcagttgctagtgcgccagatgataagtcgggtgttgcttcaggygtrtataaaatggcgtcatcattaggaaatgcatttggagtagcagtatctggtacrgtttatactgtgttagcagctaatttaaatttgaacttaggtggtttcacaggtatgatgtttaatrccttgctagcaattgttgcatttttagtcattttactattagttcctaaaaatcaaacgaatttgtaa

SEQ ID NO: 391 - DNA, 216 bp, Staphylococcus aureus
atggctccagccaatccattggtaaatccaaaaaataatgccttagaccaaggttttgaaggtccagttaaatttaaatatcgccaaaaaaatccaaaagtttttgtgaaccgtgaaaccgcccagccactcggtgttccttttgttaagccagtaaaaccaatccccccgggccaaccagttgtttttaaccaaggtaaggtgggtcctgggtga

SEQ ID NO: 392 - DNA, 669 bp, Staphylococcus aureus
atgaaaaacaaggagaagtatctaactaatttttctgaagccaaacgtaaaaaagctactcaaaagtacaatattataaaaccttttatcctaggcgaacaatctttatcaagtatttctaaaagtaaagggattgcgttaagcaccctttataggtggaataagtcatataaagaacaaggacttaaaggactaatctatgcgacaagagctgataaaggaacacgtaaaatagaaccaaagataattgatgaaattgaacgccttgcgcttatgaataaaagaaatagtatagccacaattcataggaaaatcactaattactgtaaagaaaataattttgatataccaagttataaacaaatttatagtgttattaaagcgatgcctaagtctgttattgatttctctcatcagggtgaaaaatactatcaaaataagtacgatttaatacaaattagagaatcctcgagacccaatgaaatatggcaagcagaccatactttgctagatatctttatattagaccaaaaaggtaatatcaatagaccatggctaactattattatggatgactatagtcgtgcaattgcaggctatttcttaagttttgatgccccccaatgctcaaaacacagcattaacactacaccaagcaatatggaataa

SEQ ID NO: 393 - DNA, 567 bp, Staphylococcus aureus
atgaatacaaaatttttaggtaaaacattagtagcaagtgctttagtattaacaacattaggaacaggcttacattcttcatacttaggattagatacaaataaagttgttaaaacggctaaagcagaagaaaaaatgacagatggtcaattatggaaaaaagttaragattcattacatgattctgatattattttaagtaacgagtacgaaacaatcaacgttacttatttattaagcaatggatattctagcagcgtttctgctcctggaaatgatgatggaggccatctaacacaatctatagactttaaaggattaaaacaaattgatttaactaaggaaaatgtctacgatgactttaacaaaaagctagatgctaaaaatacatggaattctctaaccgagaagttaaaaggtcttggtttactacaaaatggccaaaaagtatctatttattcttcagatagctcttctccagtctcgggtaaagtgggagaaggagtaactagtggtggcgaaaatactctaactaaacgcttcatcaacaaaatcacaattgattaa

SEQ ID NO: 394 - DNA, 696 bp, Staphylococcus aureus
atggaaggtaatttattacagcaattattcaattattatgttacgaactttggytatctatgggayttatttttcaaacacttattaatgtctgtctatggtgtgctgtttgcagctttaattggtattccattgggaatcttgcttgcaagatacacaaaactttctggatttgtaattacaattgcaaatataattcaaacagttccagtcattgcaatgttagctattttaatgttagtcatgggcttaggytcagaaacagtagttttaacagtgtttttatatgcgttacttccaattataaaaaacacttatactggtatagctagtgttgatgcgaatattaaggatgctggcaaaggtatgggaatgacacgcaatcaagtgctacgaatgattgaattaccgttatctgtttcggttattatcggtggcattcgtattgccttggttgttgcgataggtgttgttgccgttggatcatttataggagcacctacgcttggtgacattgtgattcgtggtacaaatgcgacggatggcacaacgtttattttagcaggtgcgattccgattgctatcattgcaatcgtcattgatgtactattaagatttttagaaaaacgattagacccaacracacgacatcgtaaaaatcaatctaatcatcggccgcaaagtattaatatgtaa

SEQ ID NO: 395 - DNA, 1032 bp, Staphylococcus aureus
atgactttagaaacrcttatcaaagaacaattagatcctcatttagtagaagttgatgaagggacgtattatccgagaacatttatycarcaattatttgtagatggytatttyggtgargcgrcaytgagaaaaaatgctgaagtaatcgaagctgtatcgcagtcttgtttgacaacaggattttgtttatggtgccaattrgctttttcaacgtatttagaaaatgccacrcagccacatttaaataatgacttacaacagcaattgttatctggagaaatattaggtgctaccggattgtctaatccgatgaagtcatttaatgatttagaaaagttgaaccttgaacacacttatgttgatggacaattggttgtcagtggacgtatgccagctgtaagtaatattcaagaagaccattattttggtgcgatttcgaarcatgaatcatcagatgaatttgtcatgttcattctacgtgccaatcaagatggtatcackctygttgaaaaaacmaattttttaggrgtmaayggstcrgcwacgtatcaaatyacwttgaatcaagtcgyagtgccacaatcacaaatyatcacgcatgatgcgaagcagtttgcggcaactattcgcccrcaatttattgcttaycaaattccaataggattaggctcaattaaaagttctttagagttaattgatgcattttcaaatgygcaaaacggaataaatcaatatttagagtatgatgttgaagsttttaaaaaacgytatcgtcaacttagagargaatattatgcaatattagatgacggtaacttaacttcacatttaartgaattaatatcattgaagaaggacatyggctayttattgytagatgtaaatcaagcttctgtygtcaatggtggttcwagagcgtacacaccatattcgccacaagtwcgyaarttaaaagaaggattcttcttygcrgcattracrccracattaagacatttaggtaaacttgargcagagttgaaggggtaa

SEQ ID NO: 396 - DNA, 1134 bp, Staphylococcus aureus
atggttaatgcattaacaccaaaacatttagctgaaaagcgtgcaggattccatgagttgttctttgatttaattttcgtctatgccattcaaaaaattgcacatgtgattttaacaacacaaaayggttccatttcagctgatttatttttcaaatacatcgtcatgagtttgttcttatggttaatgtggtctcatcaaacattttttacaaatcgatttggtcaagttacattcaaagacgtctcgtttatgatgtttaatatgttyatcatggtcttcctatctaacagcctatatccggactttgaaaagacattcttcccattcttcttatgcgtggcaattatgtatttaagtatcggattacagtatttattacatatacgtacaggrttagattatggcgataagcgtacatgtcaagcttttgcgascgtagcctttgtgatttcatttttatcatttctatcattagtactaccacaaagtatccattacatccctggatttttaggcgtattcattgcakcgacaggacttattccatttcaraaatatctygtattatcacctgttaatatgatgcatttagtagaacgtttttcrttactracaattatyatctttggcgaggtactggttggtttagcttcgtcatcatttagcattgatcattttagttacatttatatattccaatttatgattttaattagtcttttcggtgtatattggatcattactgaaaattayattaatcataaattrwcatctatcggtttccgtttatcgtatacgcatytattaatcaatatcgctttaggtgtgattaatgcygcaattgtttttagtaataacaataaaytaaatgacttgtttgaaattaatatgatgtatatcagtgttttaatattctatattggattatggttaatcacgccttatttccataaygaaytgacaaaygcraartatatttcwtmttcactaggbatactygtwrtrtcwtatatyrtcagccttwtmtttaarggkcaygaccawgtaatgattatctcrgtatcmgttgcracyttctgyatcatgctgatttattttaaaaatcaacgtctacgtaataaacatgaataa

SEQ ID NO: 397 - DNA, 942 bp, Staphylococcus aureus
atgaagaaaattaaatatatacttgtcgtgyttgtcttatcgcttaccgtattatctggatgtagtttgcccggactaggtagtaagagcacgaaaaatgatgtcaaaattacagcattatcaacaagcgaatcgcaaattatttcacatatgttacggttgttaatagagcatgatacacayggyaagataaagccaacattagtaaataatttagggtcaagtacgattcaacataatgccttaattaatggggatgctaatatatcaggtgttagatataatggcacagatttaacgggagytttgaaggaagcaccaattaaaratcctaagaaagcaatgatagcmacacaacaaggatttaaaaagaaatttgatcaaacrtttttyrattcgtatggttttgcgaatacgtatgcattcatggtaacgaaggaaacygctaaaaaatatcatttagagacagtttcagatttagcaaagcatagtaaagatttacgtttaggtatggatagttcatggatgaatcgtaaaggcgatggctatgaaggatttaaaaaagagtatggtttygactttggtacagtgagaccaatgcaaataggtctagtctacgacgcattaaacwcagagaagttagacgttgcattaggttattctacagatggtcgaattgcsgcgtatgatttgaaagtacttaaagatgataaacaatttttcccaccttatgctgcgagtgctgttgcaacaaatgaattattacgscaacacccagaacttaaaacgacgattaataagttgacaggaaagatttcracttcagagatgcarcgcttgaattatgaagcggatggtaaaggtaaagaacctgctgtcgtcgcagaagaatttttgaaaaaacaccactattttgataaacagaaaggtggtcataagtaa

SEQ ID NO: 398 - DNA, 540 bp, Staphylococcus aureus
ttggttgtgtatgcatctcacctatcttttttgcttttttcaaataagaaagtattaaaaattaatgcctatacaggaacagacatggctaaacttgatttaaatagtcttracgaygagcacgtaaaattattaataaatgaattaaaatatccagaaactcatatcgatgtaaatgaattaaaaacaatagttgctagtcgaataaatgaaaggcaagaaataataagttttaagttaggaataaagtacttattaacrataaaaagagggaacatagaaaaagataggttttcaatttcaatcattttcaaagatacctatcacaccctagttagaatagatattaacggtggtactcacgataatccagatggaacaatcgctccgaaaagtcatattcacatatataatgataagtatgataaaaaggataggtttgcttatgaaattaacttgaaagatttccccgacatctataacttgtataatgtgtatatgtcgtttttagagtataataatataaaagaccttgaataa

SEQ ID NO: 399 - DNA, 636 bp, Staphylococcus aureus
atgatygagttcctacatgaacatggtggacagttgatgtcgaaaacactggaacatttytatatttctatagtggcattattacttgccatcattgttgcagtacctataggcattttattatcaaaaacaaagcgaactgccaatattrtattaactgtggcaggtgtcttacaaactattccaacactagctgtacttgctattatgataccgatttttggtgttggtaaaacgcctgcaattgtagcgctatttatttatgtattattacctattttaaataacacggtactcggygttcaaaatattgatagyaacattaaagaagctggaaaaagtatgggaatgacacaatttcaattgatgaaggatgttgaattgccgttagcmttrccgcttatmmtwggyggyattcgyttgtcrtctgtgtatgtaattagttgggctacacttgcaagttatgtaggtgcgggtggattaggtgatttcattttcaatggtttaaatttatatgatccactgatgattgtaactgcaacggtactcgttactgcactagcattaggtgttgatgccttattagctttagttgaaaaatgggtagttcccaaaggcttaaaagtatctggataa

SEQ ID NO: 400 - DNA, 789 bp, Staphylococcus aureus
atgactacrtttgatgctaaaaaattaaaaaaagaatatcttgattggtataatcagayyttagagttttctaatttatcaaacaatkyagtaaraatagatacyccttttaaagataattctttagataatttaawaatwtacgctttatacgatcagtccagagacatgattacactgacwgatgacggctatactatatttgrtttagaaaataayggtrtttctwtaaataaatywaaaaaacgtaaaaagatttttgaagagcacctttcagcttacggtattaaatataacgataaaactcacgaaatttttgttcaaactaactttaaaaattttaataaatcgaaacataatttattacagtgccttatatttgttaatgatatgtacttactttctaatcctaagtcacagaacatatttacagaagatgttgcaaacaaattggatgaacataacatttattacggaagagaywtacctattataggaagcagtggtgttgttcataatttcgacttttttattagcgctaagaaaaatcaaaaagaaaaatttatcaatgytwtttctaaccctaataattctatgattattaagtcgaaaataacggatgctatgcaagcaaaaaaaataaaaagacacaggcaaaatgagtttatttttattttaaatgactcaaaaaaagaaataaatgaacataataaaaatcttcttcatgaaaactatattagtacaatagattatagcgaattagatgaaaagataggtttattgatttaa

SEQ ID NO: 401 - DNA, 1227 bp, Staphylococcus aureus
atgttaagtattaagcatttaacgaaaatytattctggtaataaaaaggcagtagatgacatctctttagatattcartctggggaatttatcgcatttattggaaccagtggaagtggyaaaacractgctttaagaatgataaaccgtatgattgaagcgacagaaggacaaattgaaattgatggtaaagaygttcggagtatgaatcctgtcgaattrcgtmgaaryattggytatgttattcaacaaattggsttaatgmctcatatgacgattaaagagaatattgtrttggtacccaaattgttgaaatggactaaagargaaaaggataaacgtgcaaaggaattaattaaacttgtggatttaccggagtcatttttagagcgttatccagcagaactatcaggtgggcaacaacaacgtatcggtgtygtaagagcacttgcggccgaacaagatattattttaatggatgaaccttttggwgcattggatcctattacgagagatacgttacaagatttagttaaaacgttacaacgaaaattaggcaagacgtttatctttgtaacacatgatatggatgaagcgattaaattagcagacaaaatttgtattatgtcagaaggtaaggtggtgcaatttgatacrccrgacaatattttaagacatcccgcaaatgattttgtacgtgattttataggacaaaatagactgattcaagaccgtcccaatgacaagactgtagaaggtgtaatgattaaaccaatcacgatacargcagawgcaacrctkaatgaygcygttcatattatgagacaaaarcgtgttgatactatttttgtmgtwgatagkrayaaccatttactwggwttcttagayattgargatatwaatcarggtatacgwggacacaaaastttrcgwgahaysatgcaacaacatatttataccgttcaaattgattckaarttrcaagattctgtacgyacgattttaaaaagaaayrtyagraatgtwcctgtygtagatgatmarcarcgtttagtaggactgattacgcgtgccaatgttgttgayattgtatatgacacgatttggggcgatagtgaggatrcagtgcaarcagaayatgtgggggaagacactgygtcctcaaaartgcatgagcaacacactactaatgtcaaagtacgtgacataggagatgataaatcatga

SEQ ID NO: 402 - DNA, 768 bp, Staphylococcus aureus
atgaaacgattaaatacattggtattgtacatcagttttttgatattaatcatcagtatcgttgctggttgtggtacagggaaagaagcggaaataaagaaaagttttgaaaaaacattgagtatgtatccaattaaaaatctagaggatttatacgataaagaaggctatcgtgatgacgaatttgataaaaatgataaaggaacgtggactattagttctgaaatggcaattcagaaaaagggagaagccttaaatataaaaggtatggttttgaagttaaatagaaatacaaggagtgcaaaaggattttactatgttaatgcgataaagaaggatgaaaatggcagacctcaggataagcaaatagaatatcccgttaaaatgattgacaataaaatcattccaactaaagatatcaaagatgaaaaaataaaaaaagaaatcgaaaactttaagtttttcgcgcagtatggcaattttaaagatttgacgaagtataaaggtggagatatttcatataatccagaagccccgatttattcagcaaaatatcaactaaccaatgatgattataatgtaaagcaattacgtaaaagatatgatataccgacgaataaagctccaaagttattgttaaaaggttcaggaaatttagatggttcatcaattggatacaaaaaaattgaatttactttcgtagagaaaaaaggagaaaacacttactttacagctaacctacattttaaaccgagtaatgatgaataa

SEQ ID NO: 403 - DNA, 117 bp, Staphylococcus aureus
atgggcggttgtccgtctgtaacaatggatgcgtgtgcattattacaaaaattcgacttttgtaataatatttcacattttcgacacttttttgctataaaacaaccaattgagcga

SEQ ID NO: 404 - DNA, 423 bp, Staphylococcus aureus
atgtcagaaacaattttcggcaaaattttaactggagaaattcctagctttaaagtatatgaagacgattatgtctatgcctttttagatatatcacaagttactaaaggacatacgttattaattcctaaaaaagcttctgctaatatctttgaaactgatgaagaaacaatgaaacatatcggygcagcattacctaaagtagcaaatgctattaagcgtgcatttaatcctgatggtttaaacattattcaaaataatggtgagtttgcagatcaatckgtatttcatattcatttccacttaattcctcgataygaaaatgatattgatggatttggttataagtgggaaacacatgaagayattttagataacgatgcaaaacaacaaattgctgaacaaattcaagcacaattttaa

SEQ ID NO: 405 - DNA, 600 bp, Staphylococcus aureus
atgagtgagaaacaatcraatgaacaagttgargcatttttaaataaagagagtcaatggcaagaagaatataaatatttgagagcgttaatctttaatgaaacagaattagaggaagcgtataaatggatgcatccttgttacacgttgaataataaaaatgtagtacttatccatggcttcaaaaattatgttgcactattatttcataaaggtgccattttggaggataaatatcatacactcattcaacagactgaaaaggtgcaagcagctcgtcagttacgatttgaaaatytarmagagattcaagcacgtmsmgaagaaattaaataytatmtwgcygaagcaattaaagctgaaaaagctggtaaaaaagttgaaatgaagaaaacagaggaatatgttattcctaaagagttagaagctaagttcgaagaaatgccacagytagagtcktcattttataaattracrccaggcagacarcatcaatayatwtatcayattggacaagctaaacgcagtgaaacaaracaaaagcgtgttgaaaagtatattaaccaaatactagaaggtaaagggatgcatgataagtaa

SEQ ID NO: 406 - DNA, 366 bp, Staphylococcus aureus
atgaaagcatcacgcattctattcggtatcggtgttggcgtagcagctggttttgtagttgcacttcaaggacgwgacgacaaaagtgtcaagaacaacacgatygatcgtactgcccctactggttcaaaatcagaactacaacgtgaatttgaaacgattaaacaaagttttaatgacattttaaactatggtgttcaaattaaaaacgaaagtgcggaatttggtagttcaatyggtggtgaaattaagtcattacttggaaacttcaaatctgacatyaatcctaatattgaacgtttacagtcacacatcgaaaatttacaaaatcgtggcgaggatattggaaacgaaatttctaagtag

SEQ ID NO: 407 - DNA, 558 bp, Staphylococcus aureus
atgtttttatgtaaaagacaaattgatatcaatgcacgatttggtttgcctagaattgcatttatgagtgcagttgcaaccatcattatgtttttagttagttatgaagtaatgtattttttatctaatacgccrttatcagatagacattttctcatctttttattacttgtatttatgacgtatccattacataaaagtatacatttrttatttttcttaccatatagaaaatcgtttaaagttcataagttractaaaagaaaatggcttatattctataatacctacgtcaatcaacctgtacacaaattttatttttgcattaacttaatattgccgttaattatcttatctgcaatgttcgtttatctaacaatttyattcccgcaatatggacattattttatgttcttattggcattgaatttcggtatttccattacagatttattatatttaaaaataattatattttctaattatggacaatatatagaagaacatagtacaggtattaatattttgaaaaaaattaaaaatccatatcatttataa

SEQ ID NO: 408 - DNA, 1188 bp, Staphylococcus aureus
wtgtcaatcatgcgactatttacattcattttaagtatttttatcgtaggaatggttgaaatgatggttgcaggaattatgaacttgatgagtcaggacttacatgtatcagaagctgtcgttggtcaattagtgacaatgtacgctttaacatttgcgatatgtggacctattctkgttaaattaacgaaccgtttttcatcaaggcctgtattattatggacattacttatatttatcattggtaatggcattattgctgtagcgccaaatttttcaatattagtagttggtagaattatctcatctgcagcagcagcactaattatcgtaaaagtattagctattacagcgatgttatcagcacctaaaaatcgtggyaaaatgattggacttgtctatacagggtttagtggkgcyaatgtttttggtgtaccaattggaacggttatcggcgatttagtaggttggcgctatacatttctattcttaattattgtgagtattattgttggcttcttratgatgatctatttaccgaaggatcaggaaatacaacgaggccctgtgaatcatgagrcaccatctcatgaaaatcatgttacttcgaaaatattaagacctgctgaagtagcaaaatatttaattattacgtttttagtattgattgcaaactcagtgacattcgtctttataaatccacttattttatctaatggtcatgatatgtcattcgtttcattagcacttctagtaaatggaatcgctggcgttattggaacatcattrggtggtatattctcygataaaattacaagtaagcgttggttaatgatttctgtttctatttttatcgtbatgatgttacttatgaatttratcttacctggttcaggtctattgttagcaggactatttatttggaatatcatgcaatggagtactaatccagcagtgcaaagcggtgtgattcaacatgttgaaggcgacacaagccaagtaatgagttggaacatgtctagtttaaacgctggtattggtgttggmggcattattggaggcttggtcatgacacatgtttctgttcaagctatcacrtatacgagtgccatcattggckcattaggattaatcgttgttttcacattgaaaaataatcattatgctaaaacatttaaatcatcataa

SEQ ID NO: 409 - DNA, 963 bp, Staphylococcus aureus
atgaagatgataaacaaattaatcgttccggtaacagctagtgctttattattaggcgcttgtggcgctagtgccacagaytctaaagaaaatacattaatttcttctaaagctggagaygtaacagttgcagatacaatgaaaaaaatcggtaaagatcaaattgcaaatgcatcrtttactgaaatgttaaataaaattttagctgataaatataaaaataaagttaatgataagaagattgacgaacaaattgaaaaaatgcaaaagcaatacggcggtaaagataaatttraaaaggcccttcaacagcaaggtttaacagccgataaatataaagaaaatttacgtactgctgcttatcataaagaattactatcagataaaattaaaatctctgattctgaaattaaagaagacagcaagaaagcttcacacattttaattaaagttaaatctaagaaaagcgacaaagaaggcttagaygataaagaagcgaaacaaaaagctgaagaaattcaaaaagaagtttcaaaagatccaagtaaatttggtgaaatcgctaaaaaagaatcaatggatactggttcagctaaaaaagatggcgaattaggttatgttcttaaaggacaaactgataaagattttgaaaaagcactatttaarcttaaagatggtgaagtatcagasgttgttaaatcaagctttggatatcatattattaaagctgataaaccaacagactttaacagtgaaaaacaaagcctgaaagaaaaattagtcgatcagaaagtacaaaaaaatccaaaattattractgatgcatacaaagatctattaaaagaatacgatgttgactttaaagatcgtgatattaaatcagttgtcgaagataaaatcttaaaccctgaaaaacttaaacaaggtggcgcacaaggcggacaatccggcatgagccaataa

SEQ ID NO: 410 - DNA, 777 bp, Staphylococcus aureus
atgagtaatacrgcaytwggaytgacggcattgctwttagtyattccrattatyatttcwtataaagaaggtytacatattattaaagatttrattgtkgcgacaytacghgcrrtbgtrcaattaatcattttrggattyttrctgcaytatatttttaaaatwaaygayaaatggctrcttatwttatgtgtattkgtcattattrtyaaygcatcatggaatacrattagtcgakcatcaccwgtsatgcaycatgtsttttkgatwtcmtttstrgctatcttyrttggaacrgcattaccrcttgyaggtactrtwgckacaggggcmattcawtttacmgcmaatgaagttatacctatyggcggcatgcttgcwaataatggcttgattgcaattaatttagcttaccaraatttagatcgtgcattcgtacaagatggtactaatattgaatctaaattatcacttgcagctacamctaaattggcttctaaaggtgcaatacgtgaaagtattcgtttagctatagtgccaacwattgattcggttaaaacatatgggcttgtgtcgattcctggtatgatgacaggcttaattattggtggcgtaccacctttacaagcgattaaatttcaattgttagtcgtgtttattcatacaactgcgaccattatgtctgctttgattgcgacatatttaagctatggtcaatttttcaatgcaagacatcaattagtagcacgaaatackgatgttaagagtgartcatga

SEQ ID NO: 411 - DNA, 822 bp, Staphylococcus aureus
atgaaatttaaaataccagaaaactttaatgacttaagtttacgagatattttccaacaacttaaggtacctaaaaaagatttacatcatttaaatatgtctaaagatattactattaatgataaacctgcgcgattaatggataaagtgcatactggcgacgatgtatttgttccaaccatcgatgaaaaaagtaattatgttccaagttatcgttatgcacaaattaaatacgaagaygatgatatggcaatcgtaatgaaacctaaaggtgttaagacycaccctaatgatttaaaagaaagcaatactttaatgaatcatgtgatttacackrttgatagygaytatgtcgaaccaattcatcgactggaccaggaaacagtaggattattaattgttgctaaaaatcctttaatgaaaaaaattcttgatcgcatgttagaagacaatgatattacgcggatatacaaagcaaatgttaaggcacttttacctttraaaccacaaacgattgatatgccaattggtaaagataaattccattcgaataaacgacgtgtgtctcctactggacagcgtgcaattacacacattttaacttcaaaaatgataaaagaarctgtgtgccaacttgaaatcaagttggatactggacgtactcatcaaattcgtgtgcatttagctgaaattggtcacccwgttattggtgatcctttatayggtgattcaacgttaagacaattagaacttgaaagttacaaaatagagtttgtgcatcccttgactaaggaagtcatttccgtttctttggatgactaa

SEQ ID NO: 412 - DNA, 663 bp, Staphylococcus aureus
atgttgttagaaattaaagatttagtgtataaagcgagcgatagaatcatactagatcatatcagtctaaaagtagataaaggcgagagtattgccattataggtccatcaggtagtggtaaaagtacatttcaaaagcaaatatgtaatttgwttagtccaactagtggagaactttattttaaaggtaaaccctataatgattatgacccggaagaattgcgtcaacgaatcagttatttgatgcagcaaagtgacttgtttggtgaaacgattgaagataacatgatattcccatcacttgcacgtaatgataaatttgatagaaaacgtgcaaagcaattaattaaagatgtcggtttgggacattatcaattaagttcggaagtggaaaatatgtcgggtggtgagcggcaaagaattgctatagcgcgccaactgatgtatacaccggatattcttttattagatgaatcgaccagtgcattagacgttmataataaagaaaagatagaaaatatcatttttaarttagyrgawcargrygtkgcwatyatgtggattacccayagygatgaycaaagtatgmgacaytttcaaaagcgyataacrattgttgatggymaaatttctaakrywgaggagttgaatcaacatgagtaa

SEQ ID NO: 413 - DNA, 360 bp, Staphylococcus aureus
gtgaatactatagatacgcatactaaagaacaacaattctcgaatctagtaagatcttatcgtaaagaatacgtgggtaaaggacccaayagtattcgagtgtcgtttaaagataattgggcgattgcacatatgacaggtgttttgagtaaagttgagagtttttacctaaacgacaaacgcaatgaatcratgctccattatacacgcacagagaagattaaacagatgtataaagaaatagatgtaaatgagatggaaagtsttgtaggcgctaagtttgtaaaattatttacagatattgatttgaatgatgatgaagtcatttcaatatttgttttcgataagtcaatagaataa

SEQ ID NO: 414 - DNA, 753 bp, Staphylococcus aureus
atgacacaatatcctttatggcaacaattaaatactttaaaacaagcaacttgggttgatttaacgcatacrtttgatccrgaaataccacgttttagtgagtttgaaaaaggygaagtttcaactttattcacggttaaagatcatggtttctatgtgcaacgttggaatattgtaacgcaatatggtactcacattgatgcaccaatycactttgtcgagaayaaacgttatttagaagacattgatttaaaagaattggtattgccgttaattgtattagacttttcaacagaagtagcgaacaacaatgatttcatygtaacacgtgcgcatatagaagcatgggaaaaagagcatggtactattgaacctggcacttttgttgcacttcgtaccgattggtcaaaacgttggcctaatattgaaamgtttgaaaacaaagatgcgaacggacaacaacatgcaccgggytggggattagatgctttgaagtrcttaattgaagaacgycgtgttgaagctgttggtcatgaaacattcgataccgatgcatctgtggacgttgtaaaaaatggtgatttagttggcgaacgttatattcttggtcaggataaataccaagtcgagttattaactaatttagatcaattaccaactcgtggcgccatcatttacgctatcagccctaaaccaaaagatgcacctgggttccctgttagagcatttgcaattaaaccatcaaatgactaa

SEQ ID NO: 415 - DNA, 1077 bp, Staphylococcus aureus
atgaatcagtcagtcaaattacttaaacatttaacagatgtaaacggcattgctggttatgaaatgcaagttaaagaagcaatgcgtaactatatagagcctgtcagtgatcaaattattgaagataayttgggtggcatttttggaaagaaaaatgctgagaatggtcaatactcaattatgatttctggycatatggatgaagttggttttatggtaacaaagattgataaacatggttttatttcatttacgccagttggtggatggtggaatcaagtcatgytatctcaaaaagtaacgattacaacagattcrggcaaagaaattagaggtatcatcggttctaaaccgccrcatgtcttaacgcctgaagaacgtaaaaagccaatggaaatcaaaaatatgtttatagatattggtgttagtagcaaggaagaagctgaagaagctggcgttgaagtaggcaatatggtwacgccatatagtgaatttgaagtgcttrcaaatgataaatatttaactgcgaaagcatttgataatcgctatggctgtgcattagctrttgaggtattaaaacgtttaaaagatgaaaatattggmattaacttatacagtggtgccacagtgcaagaagaagttggkttrcgtggtgcgaaagtggcagcgaatacrattaaaccagayttggcgatagcygtcgatgtrggtattgcttatgatacmccaggtatgtcaggtcaaacgagygatagtaaactaggcggtggtccagttgtyattatgatggatgctacaagtattgckcaccaaggtttgcgwaagcatattaaagatgtagctaagraacataacatcgaagtacaatgggatacgacaccaggtggaggtacagatgcgggaagtattcatgtcgcaaatgaaggtattccmacgatgacaatmggtgtyacgytrcgatacatgcaytctaatgtwtcrgtrctcaatgtagatgattatgaaaattctrtccgtcttgttactgaaattgtccgttcattraatgatgaaasttataaaaatatcatgtggtar

SEQ ID NO: 416 - DNA, 267 bp, Staphylococcus aureus
atgagcaattacacggttaagattaaaaattcagcgaaatcagatttaargaaaataaaacattcttatttaaagaagtcatttttagaaattgttgagactttaaaaaatgatccgtataaaataacacaatcttttgaaaaattagagcctaaatatttagagcgatattcaagaagaattaaccatcagcacagggtcgtctataccgtagatgatcgaaataaagaagtattaatactatcggcatggtcacattatgattaa

SEQ ID NO: 417 - DNA, 1194 bp, Staphylococcus aureus
atggttaaagacccaataaaaaaagcaaagaatggaacctattattttcgtgcaaatctaggttatgattctaaagggaaaaaaattcaaaaatatcgtagtggattcactactaaaaaagaagcaagagaagaatattcgaaactgctattgatgaaaccagaagaattaagtgagaataaggataaaatgacgtttaaacattatatctttgaaattttccttccatggtataagacacaggtaaagctcagaacatatgaaaatcgcttaccaactattaagaagcatttctcttattttgataaaatggctgtttccgatattgagcctattgatgtgcaaaattggcaactaaaattatcaaagaagtgtaagtcttcttatgtaagagctgttcaaggactattttcagttgctatggatcgagcaattgtccttgggataaccaccacaaatccatctaagattattggcaatgtgaaaaagcaaaagtctaaaattgaattttggacaaaagaagaatttgaaaaagtaatctctctaatttacaaagaagattactatcaacactttttatttatctctctgtggtttttatttatgactggaatgcgaattggtgaagctactgccattcaatgggaagatattgattttgactcaggagtactaaccatcaacaaaacactctattacaagaatcaatcgaattatagatttgttgaaccaaaaacaaaggcgagcgttcgtcatattgtattagataaatgcacattaacttatttatccgaatggaaggaagtacaacaaaatctaattcagacagactttgtaatgagctataacggtattcctacccaaaaacatacactatcatatgctattgaacgctatgctaagctggctggtatccatcgaatcagaatccatgggttacggcattctcatgcttccttgttaatcagtatgggagaaaatccacttatcattaaagatcgtctaggacacgaagatattgagacgactttaggaacgtatggacatctttatcctaacagtaatttcgaggtagctaacaaattaaatggagccatttcctttaaagaagcaaaacaaaattatgatacttcaccaaagaatcaatttactgtagactacttgcgaaacaaagaaatgaaaaaagtgcaataa

SEQ ID NO: 418 - DNA, 201 bp, Staphylococcus aureus
atgataacggtcacaaaaaaggatttagttgagctaggatatggaacttctttttcagcagacatcataaaaaaagcaaaagaattgatgattacaaaagggcatatctactatcaatctcgaaagctagatagagtccctcgtgaagctgttgaagaaattctaggaattcggttttcaaatgaaaacaggtctgagtag

SEQ ID NO: 419 - DNA, 963 bp, Staphylococcus aureus
gtgttattcataactaagaaaggaatgaatcaaatgattataaaaatcgagcgaaaagaaaagaaggagaaaccaaagaaatctaaaaaaccgagcaagcaaagaaaagttccgatgattaaagttggcacgcataagaaattaacctttgttttatgggttttattgattggtagtgtcggatttggaatctataaaaattttactgccattgacactcatactgtccgtgaaacagaaatcattaaacagcagattgtcgataccaaccaagtagaaagttttgtgaaatcctttgcgaaagactacttttcgtggcaacaatcccaagaagccattgataaacgaaatgaaaaattgacccattatttgacggaagaattgcaggtattaaatgaagaaatgattcgtaaggatattcctactagttctagtgtgaacgatatacaggtgtggcaggtttctcaagtgaatgagaacacctttgaggtactgttttctgttgaacaagttattaccgaagacaaagacaaggaaactatatcgtctagctttcatgtggttgtccatatagatgaatcagataatatggttattatcaaaaatccgacaatgagtaagaaacctcaaaaatcggactaccaacccaaacagctagaaagtgaccatacagtagatacagaaacgatggacgaaatcactagctttttagaaacgttcttccagctctatcctaccgccacagaaaaagaattgacttactatgtaagtaatcatgtgttacctatgattaacaaggaatatgttttcgaggaattggtgaatcctatctttaccagaaaagataaccaagtaatcgtgaatgtcgctgtgaaatatttagatcaagaaacaaaggcaacccaaatctcgcaatttgagttgatattagaaaaacaagataattggaagattgtaaaataa

SEQ ID NO: 420 - DNA, 1023 bp, Staphylococcus aureus
atgaagctaaaaataacagtgatttgtagtgtggtcttctctctcttcttttttctcttattattcctagtcattttctttgcagatgatacggacagtggcgaaaacaacaaggattcttctattccacaaggcggtgtgaccgtttcaccagaagtgttggcacaccgtccgttgattgaaaaatatggtaaggaatatgggattgaagactatgtttcttatatcttagccattatgcaagtggaatcgggcggtacagcagaagatgttatgcaaagttccgaatctttgggtttaccgcccaacagtttgagtaccgaagagtccatcaaacaaggggttaaatatttcagtgaattattaaccagtgcagaacaacaaggagtggatatagattctgttatccaatcttataattatggcggtggctttttaaattatgtgaggagtcatgggaaaaaatatacctatgaattagccgaacagttttctaaagagaagtcgggtggtcaaaaagcagactatcccaatcctatagccatacctgtgaatggtggttggcgatataactatggaaatcagttttatgttcagttggtttcacaatacctaaccgacacttccccaacagaatttgatgatgaaaccgtgcaagtcattatggacgaagccttgaaatacgaagggtttccctatgtctttggaggggcgtcgcctaccacctcttttgattgtagtggcttaatacaatgggtgtatgacaaagctggcatttctctccctcgtgtcgcccaagatcagtatgacgctacgcaagaaatctctatggaagaagcccaagcaggcgaccttatcttctttcattcaacctataatgcaggcacatatgtgactcatgtggcgatatatttagagggaaatcgcttttatcatgcaggcgacccaatcggttatggcgacttaagcagtcgttattggcaagaccatctgattggggctagacgtgttattcataactaa

SEQ ID NO: 421 - DNA, 2028 bp, Staphylococcus aureus
atgacacaaaaacaaaagaaatttcttcactatagttggataacgctcctttgtgtgggcgttattttacttttattaggcacgctgggcaatgcagtacaagcgacaggcttagttgatgaaaccattgatacaagcaatgaatactccaagtatggtttgaatcaatatcagcttgattattatgtggacaatagctggggctggcttccatggaattggagtgatggcataggacaatcggtgatgtatggattgtatgccattactaattttatttggacaatttctctttatctatcgaacgccacaggttatttggtgaaagaagcctatgccttagatttcattagtcaaacatcccaagcaattggcgaaaacatgcagacgattgcaggcattacaccgaatggcttttccagttcagggttttatgtcggtttcctccttctttttattctcattgttggaatctatgttgcctatacaggattggttaagcgagaaacgacgaaagtgatacgagctgttttaaactttgtcgtggtgtttattctatcggcttcctttattgcgtatgcacccgattatattgcgaaaatcaatgatttttccaaagatgtcagtaccgccagtctgaatattgggacaaaaattgttcttcctaacacggatagtcaagggaaagacagtgtggacatgatacgtgacagcttattctctgttcaagtaaagcaaccatggctattgcttcaatatggctccactgatgtagaagcgttaggggaagaacgtgtggaaagtttattgtctaccagtccagatacaaacaatggtgaagatagagaaaatgtagtgattgaagaaattgaagatcatgacaatacctatttaaccctaccgaagacgatttccagattaggaacagtcttctttttgtttgtattcaatattggtatctcgatttttgttttccttctaacaggaatcatgattttttcgcaagtgctatttattattttcgctatgtttttgccaatcagtttcctattaagtatgttgccgagttttgatggcatgggcaggcatgccattaccaagttatttaatgtgattatgacaagggctggtattaccttgattattaccgttgcctttagtatttccactatgctttattcgctgtcagcaagttctccctttttcatgattatgtttttacaaattgtgacctttgcagggatttattttaaactgggcgatttaatgagcctattcactttacaaagcaacgactctcaaaacatgggcagacaagtgtttcgcagacctcgtcaaatgatgaatcgacaaaccagaagatttcaacgcagtatgagtaagatttttcgtggaaaagcagggtcaacgaagcaaaagacaatgacaacaaagcagaatcaaaccaataaagctaaccatactcgtcaaaatgaacggactacaccaaagaaagaaacagcactttccaatgtgaaaaagcaacaaggcggtatcgggcaacgattaggtgaaaagacagcccatgtattggacacgaaaaatcgtctagtcaataaaagaaagcaggcaaaacaacagatacaggcgacaccaacccatgtcaaatatgcccttcatcaaggaaaagagaatgtcactcataatgtaacagactttaaacaatctatggcagataccaaagctcaacgcaaacaacagcgtatgaaccagcaggagcaaaaacgaaagaacattgctcaaaagcgtttggagctggataaagcaaaagaaaaaagacgaaaagaaaacccatcatctcctgttcagaataaccagcagcatgttcgcaagcgtcagcaaaccgtcacgcctgttttgtcacaaaacactaaacgtgaaaatcatcagcgaccattgaaaaaagagcaaaaacaaaagacaccaccgaagcaattcaatcagaggaagctaaataaaagaacggataagcgaggacaacaaacatga

SEQ ID NO: 422 - DNA, 2454 bp, Staphylococcus aureus
atggcatatccgattaaatatatggaagataatctcgtatttaatcatgatggcgaagtattcgcttattatgaattaattccctataattacagttttttaagttccgatgaaaaaattcaagttcatgataatttctgtcaattgattgcccaaaatcgtgatggcaagattcatgctctgcaactagcaaccgaatcaagtattcgagccacacaggaacaatcgaaaaaagaaatcactggacgattaaaagagatagcttacgaaaaaatagatgaacagaccgaagcgttaatttctatgattggtgacaatcaagtagactatcgcttttttattggttttaaactctacctcaatgaacaggaagtatccgtaaaaaatgttgggaaagaaattcaaaaagcatttgcggaattctttcatggtgtgaatcacaaattaatgggcgattttgtttctatgcctatggcggaaatcgaacgcttttctaagatggaacagttgttagaaagtaaattatccagacgctttcagattcgtaaattggagaaagatgattttggttatattattgaacatctttacgggcaaacaggtgtcccttttgatgactacgactaccatttaccgaaacgatacgaagataaaaaagtgttggtaaagaaatacgatattctcaaacccactcgctgtttaatcgaagaaaatcaacgctatttacggattgaacaggaagataccactacttatgtggcgtattttacaattaatagtattgttggtgaattggatttccctaatagtgaaattttttattaccagcaacagcagtttactttccccgttgataccagtatgaatgttgaaattgtcgccaataaaaaagccttatctaccgttcgcaataaaaagaaagaactgaaagatttagatagccacgcatgggaaagcgacaacgaaaccagtactaatgtggtggacgctttagaatctgtcgatgaattagaaagtaatttagaccaaaccaaagaatctatgtacaaactaagctatgtggtacgggtatcagcaaagaatttggacgagctgaaacaacgttgtgatgaagtaaaagatttttatgatgatctgtctatcaaattagtacgaccttttggcgatatgctaggcttgcataatgaatttattccctcaagcaagcgatatatcaatgactatattcaatatgtcacgtcggattttttggctggtcttggtttcggtgctacacaaatgattggtgaaaattctggtatttacgtcggttacaatctcgatacaggcagaaatatttatctccaacctagccttgcaagtcaaggaattaaaggctctgtaacaaatgcattagcgtccgcttttattggttcattaggtggcggaaaatcattctctaacaatatgctggtctattattcagtactctttggcggacaggcaaccattgttgacccaaaagctgaacgtggtgaatggaaagaaaccttacctgatattgcccatgaaatcaatattgttaatctcacgagtgagaacgacaataaagggttacttgacccttatgtgattttaaaactcccgaaagattcagaaagccttgccattgatattctcacgttcttaacaggtatttccagccgagatagcgagaagtttcctgtcctgcgtaaagctattcggagtgtaactcaaagcaaacaacgagggttgttattggtgattgatgaattgcgaaaagaagatacgcccatcagcaatagtattgctgaccatatcgaaagctttgtcgattatgattttgcccatctgttattcagtgatggcagtgtcacccaatccattagcttggaaaaacaactcaatattattcaagtggcagatttggtcttacccgattccaatagctcttttgaagaatacactaccatggaattattaagtgtggcaatgctgattgtcattagtacctttgctttagactttatccactctgaccgttccatttttaaaattgttgaccttgatgaggcttggagttttttacaagtggcacaaggaaaagctctatctatgcgattggttcgagcaggacgtgccatgaatgcaggggtctatttcgttactcaaaacgcggacgatttactagatgaaaagatgaagaataatattggcttgaaatttgcctttcgttccactgacctagtggaaatcaaaaagaccttagaattttttggtgtggacaaggaagatgaaaacaatcagaaacgcttacgtgaattagaaaatggacaatgtttagtttcagacatctatggtcgtgtaggggttatgcagtttcacccgatttttgaagagttgcttcatgcctttgataccagaccgcctgtgcgaaatgaggtggaagaatga

SEQ ID NO: 423 - DNA, 639 bp, Staphylococcus aureus
atggtaaatgtatttgaaaatcttaaactattaaaactagacatgaaagataaaggctgggtgatagattccttttactttcgttacaaacagcaaaattatattgtacttgttaagctatttgaaaaagaggaaaaagttccagaatatgctctgttaaaactagaatttttaaaggaaaacgatttttcagatatgctagctgtctatgctaattcggtaaaattatatacagacacgaaaacaataagagaatattttggtatcgaatacagtagtaacttgggagatgttttatttcaatttagccaaactcttgctcgatttattccgacagaagttagtgagaagaaaaatgaagaccaaaaagaagccatgtgtttctcattaagtcaaagtgattcagaagatcccagaaaaaaatattgtttttcagttagaagaaatcctttaaagggaaatggtgagctgggaaaacgaagtccttttaatgacaataaaacgagattgtatagacccagcttatatgaacgattagggtcagataccaatttaagtttcagatattcaatgaatccagatgatgaagaaactgatgaaggtattattgcaaaatggacaaaaaataaaattgaatag

SEQ ID NO: 424 - DNA, 1290 bp, Staphylococcus aureus
atgaattttagtgaaagtgaacgtttacaacaactttcaaacgaatatattctaggcggtgtcaattccccttctcgttcttataaagctgtaggaggcggtgcacctgttgttatgaaagaaggacacggtgcatatttatatgatgtcgatggcaataaatttattgattaycttcaagcatacggtccaattattrcggggcatgcacatcctcatattactaaagcaattcaagaacaagcwgcyaaaggtgttttatttggtacaccgactgaaytagaaattgaattcagcaaaaaattacgtgatgcaattccatctcttgagaaaattcgctttgtaaattctggaacagaagcagtcatgacaacaattcgtgttgcacgtgcatatactaaaagaaataaaattataaaatttgctggatcttatcatggccattctgatttagtattggttgcagcaggtagyggcccatctcarctcggttctccagaytcagctggtgttccagaaagcgtmgcacgtgaagtcattactgtwcctttcaatgatattaacgcmtataaagaagcaattgaattttggggtgatgaaattgccgcagtattagtagaaccaattgttggtaactttggaatggtaatgcctcaacctggatttttagaagaggttaatgaaatttcrcatarcaaygggacmctagtgatttatgatgaagtaattactgcattccgtttccattacggtgccgctcaagatttattaggtgttatccctgatttaactgcatttggtaaaattgttggcggtggtttaccaattggaggctatggtggacgtcaagatattatggaacaagtagcacctctaggacctgcatatcaagctggtacaatggctggtaayccgttatctatgaaagcaggtattgcattactcgaagtactagaacaagacggtgtttatgaaaaattagacagcttaggccaacaactagaagaaggtttacttaaattaatcgaaaaacataatatcacagctacaattaatcgtatttayggatctttaacattgtactttacagatgaaaaagtcacacattatgatcaagttgaacattctgacggcgaagcgttcggtaaatttttcaaattratgttaaatcaaggtatcaatttagcaccttctaagtttgaagcttggttcttaacaactgaacatacagaagaagatattmaacaaactttaaaagctgcagactatgcttttagtcaaatgaaataa

SEQ ID NO: 425 - DNA, 258 bp, Staphylococcus aureus
atgattatcactagycctacagaagcgagaaaagatttttatcaattactaaaaaatgttaataataatcacgaaccaatttatattagtggcaataatgccgaaaataatgctgtgattataggtttagaagattggaaaagtatacaagagacaatatatcttgaatctactggtacaatggacaaagtaagagaaagagaaaaagataatagtggtacaacaaatatagatgatattgattgggataatctttaa

SEQ ID NO: 426 - DNA, 501 bp, Staphylococcus aureus
ttggaaatgaaagtctatgtggcaaatttaggacggtataatgaaggtgaattagtcggagcatggtttactccaccaattgatgaggaagaaatggcagaaagaatcggtttaaatgaggactacgaagaatatgcaatacatgattttgagcttccttttgatgtggacgaatacacgccgattagtgaaatcaaccgtctatgtgaagccattcaagaaatcgaaggtacacctatttataatgaactcaaagaaattcaaggcatgtggtttagtagcttggaagaattactggaaaacaaagaggatattcattgttatagtgattgtgattcgatggaagatgtcgcccgttattacgtggaagaaacaggacagcttggtgaagtcccttccaatttacaaaattatattgactaccaatctttgggacgtgatatggaaatagagggtaattacctagttacctctcatggggtatttgaatattgtcagtaa

SEQ ID NO: 427 - DNA, 780 bp, Staphylococcus aureus
atgaaaggatttatgaatatgtttacaaatgatcaatttaaatctcttttaattaaaacattagaaagaaagagctcttcaaattattatgaaggaggtaacgagattgtttctaaaatgaaaatatcagaggtaactttagatgagactgacgattttacttattataaaggatataaaaagggctggaatacgctttgcacatatcttaaaataagagttccttttgatgatttagacttttttgaaagtcataaagatttgattacccagacagcaagctccatatatgataaacaaggtgataatgtattagtggatactattttagtaccacttccagagaattacgaagtaattaactttagtcagttgaaaattagtgatgtggtttcacaagctattgaagacgctgagtcttttatgagtaatggtgaatatcaacgtgcctttgacagagttcacactgcttttcatggatatttaattgaaatactaaaaaaatatgaaattacagttcctagagacgaaaatctatctaaattatatagtaggatacaacaattaattgaaaaagaaattcaacctactgaacttgctgatatagtgaagacaacgataaggtcatcaaatggaatgattagctctcttaatgaagcaagaaataggcattcacttgcacaccctaatacaaatattattggaaagagagaagcaaaactaataataggtatttcaagtacagttacagattatattagcggataccttgataagtag

SEQ ID NO: 428 - DNA, 1185 bp, Staphylococcus aureus
atggaaaacgaaaaaatttggattaaggaattgaaagaaaagcgactggcttatggcgtttctcaaaataaactggcggttgcttctcatattaccagaccttacctatcggatattgaaacaggcaaggcagtccctactcaacaggtgaaagaagatttactgaacgctttggaacgcttcaatcccgataacccattggagatgttattcgactatgtacggattcgattccctaccaatgatgtggctcaaattatcggtgaggttttacgtttgaatatggattatatgctacacgaagactttggctattattcttatcccgaacactatcgtttcggtgatattgttgtcctagtctctcatgatgtaagtaaaggtgttttattagaactgaaaggaaaaggctgtcggcaatttgaaaactttctattggctcaacatcggagctggtatgatttctttcaagattgcatggaacataaaggtattttcaaacgcttggatttagctatcaacgataaaacagggattttgaatattccagatttggcaaagaaatgtaaacaggaagaatgcatttccgtctttcgaagctttaaaaattatcgcagtggtgaattggttcaccgtgatgaaaaaccatacatgggaaacacactttatattggctcattaaaaagtgaagtctatttctgtatatatgagaaagattatgagcaatacgtgaaaaatgatgttcccttagaagacgcagaagtaaagaatcggtttgaaattcggttaaaaaatgaccgagccacccaagccatgaaagatttattggcacatcaacaggcggaaaaaacagcctttgaaattatcaatcgctatatccgctttgcagataaagacgacactaaacgtcggagtgattggaaaactaatgaacgttgggaatggtttatcggtaaaaatcgtggagcattacgcctaaccacacagccagagccttattcttttgaacgaacattgaactggttacatcatcaagtcgcccctacattaaaaatcgcaagcattttagatgttctcaacggtacaaccattatctccaccatgattcaggaagccaaactgacagaaaaacatgagaaattaattgaacaacaacatctagccatggaggatttgattacatga

SEQ ID NO: 429 - DNA, 1404 bp, Staphylococcus aureus
atgccattgcttcatgacagaggagagcgaatcaaagccaacgataagcacttggtctatcattttgtactaatttcattgctggtagtttttctagtcgtcctactcccttttcattggagagcgttacaatcggtgaactggcaagcagttcagttagatacatttttctatcaacttcatacgccatacttttggagcagtattctcactgctctttttgtatgcggacttatcagctggctttattatcactatcgtatagattctataaaacagttagagcaccgtcaaaagttagctcgtatgattttagaaaatcattggtatgaagccgaagaaactcaatcagagggattctttaaagatttacccagcaagaaaaccaaacaacgaatccgccattttcctaaaatatattatcgaatgaaagatggactaatccatattcatgtagaaatcaccttagggaaatatcaagatcagcttttgcacctagaaaacaaactagaaacaggattgtattgtgaattagtggaaaaaacgttgaaagattcttatgtagagtatgtcctactttatgatactattggcaatcgaattggcattgaagacgtggtagctcaagatggacgtgtcaaattgatggaatcggtctattgggagttcgattctctccctcacatgttaattgctgggggcactggtagtggaaaatcctattttattctcacattgattgaatctctcctgcatacaaatgcaaagctttatattcttgaccctaaaaatgctgatttggcagacttaggggcggtcatgaataatgtctattaccgtaaagaagatatgttggcatgtatcaatcaattttacgaagatatgattgatcgcagtgaaaccatgaaacaacaccctaactataaaacaggagaaaattatgcttatcttggtttgtctgccaattttcttatttttgatgaatatgtggcaatgatggatatgctaggtcgtgaaagtaccaccgttattcataaactcaaacaaattgtaatgttaggacgacaagcaggcttctttttaattcttgcctgtcaacgtccagacgcaaaatattttagtgatgggattcgggacaactttaacttccgtgtggctttgggtcgtatgtctgaaatgggctttggtatgatgttcggaagcgatacacaaaaacaatttttcttaaaacccatcaagggaagaggttacgtggatacaggaaaaagtgtgattagtgagttttatacaccccttgtaccaaaaaggtacgatttcttaggagaaataggaaaagtcattcaaaaaaagcaatctgagcctgtaccgcacgaagtgaaaggtacaggttcagacttgctttga

SEQ ID NO: 430 - DNA, 378 bp, Staphylococcus aureus
atgagattagcagaaggtattgtgattgaaaaagaccagacatttggcacattgaaattttccgccttgcgtcgtgaggttcgtatccagaatgaagatggtacggtttccgaagaaattaaagaacgtacctatgacttaaaatcaaaaggacaaggacgcatgatacaagtcagtatccccgcttctgttcctttgaaagaatttgactacaacgcagaagtggaattaatcaatcctgtggcagataccgtagcgacggctacttttcgaggggcagacgttgattggtacgtgaaagcagacgatcttgtattaaaaggacagacaaaacctcatcagaaatataaaaaagaagcgtccgaaagtgaaaaatag

SEQ ID NO: 431 - DNA, 315 bp, Staphylococcus aureus
atggaacttaaatatgtcattcccaatatggaaaaaacatttggacaattagaatatgctggtgaagggaacattgaacaacgtcgaataaatggcagaccaaccattctctctcgtagttacaatttatactcaacgattcaacgagcagatgatattgttgtcattcttccctccgaagctggcgagaaacattttgaatccgacgaaaaagtcaaactcatcaacccacatattaccgcagaaggttataaaattggcaatcgaggatttaccaattacattatgcacgcagacgatatggtgaaagcataa

SEQ ID NO: 432 - DNA, 1794 bp, Staphylococcus aureus
atgacaaatatcttcgaaaaaatcgtaaatgatttaaatttagaacaaaaagatgttgtggaaagtgaagataacctttatgtaaatgcatgtcctgggagtgggaaaacaagggtacttacaaggaaaattgcttaccaagcaattaaacacgatggatcactaaaaagaataattgctatcacatacactaatagagctgctgaagaaattaaggaacgcctaagtttacttagtatagatgatgatattaatatttgggtggggacaatacatcagttttgtcttgaatttattatttatccttttaaaatgaatctctcaagagtatcaaaaggatttacaattattgatgattatactcaaagagcttacgtcagccaaattaataatatgctgaatttaaatctcaaaacgtatgaactgaacaaaattgatttgtcactttctcatgattttaaaattaatgaagttcagtatactcaagtttctgaaatgtatcacactatgttggaaaaaaataaagaaattgattttgatatgattttactagtagcgtataaaattttaactgtaaacagtaacgttgcacgtaatattgctagtaatataagggcgatttatgtggatgaatttcaagatactagagaattacaatacaatgtaatagctaaattacttcaaaacaaccctcaaattcagtcaatgtttgttggagatattgaccaagcaatttatggatcattagatggtatagctaaatcagttgaagaactagaaatgctaactagtcacacttttcaatcaaagacgctacatggctgttacaggtctaatcagagattagtagacttctactctaattttcagagttgtccttacgagattgaaagcagagggaataataaaaacgaccgtggttttataagttatgattgcaaagttactaaggaggatttacccaacataataaaaaatataataaaggaaaagattgaaagcggcattcatgaaaaagatatttgtgtacttgctcctcaacactatcctctgttttcactgggtgagtatttaaagaaagaattaccgtattgcaattttgatgctataaatatatcaccaattaaggtaaataatcatagtttatttttcaagttagcaattttgtactttactgaatcaggtgaaaaggttcgaagaagaaagctaattgcaaacgatattttaattatattaaaaaatgaatttggaatagaagttaaagattattttattgacttagatttattacagctaataaacagtgtgaaaagaatgtatagtggagacgacaacggtgttgatttatacaaatttgttaccaaacatatatttgttaatcttaatattgacgagaaaaattacccgtctatttttaagcactatctattttttattaacgaagtagaagatcggataaaaaataattcattatctagtagtgtatctagttttaagaagatgtttaaatctcgagatggtatcacacttactacagcacataaagttaaaggaaatgagtatgatactgttatcgctattaatcttctaaacgggaaaattcctcattggaatgaaatttttaatgtttctgataaaggaattagttcagcgagaaaactactatacgtaatttgttcaagagcaaaaaataatttatttcttttctcagaggtgggttattttacgagtaaaggagacttgctttatcccactcaattattagataaaatagaatttgattataatatttaa

SEQ ID NO: 433 - DNA, 2190 bp, Staphylococcus aureus
atgtttatatctactcttcaaattcgaaattttagaaattatgaatccgaaatctttcgattcgataatgagacaaatactattataggtgagaatgattcagggaaaaccaatgctcttactgcattgagaatcttattagatgatagttattactatagtagtaaaacactaaaagaatcagatttttttcatggaattcaaaatgggtggcaagggcattggattattatctctgcgacatttgaaggaatcagcgaagaagaatttgacaatgagatttgtgcttccatttctttaaattctgaaagtcaaacaatcttagaagaattgatttcaaatgcagataaaggtgtaggtagtatttctctatttattagacctaacaaagctattagaaagcaattatttgatatttccactgaattagactctcatcaatttaacgaatttagaaattctattcgtctatccgactatgaattttactacacatctaaatcaaatctaaatttctgtatcaatgaaaattatgataaattggtaggaagactcaatgacaatatagctagtaatcctgaagaagacgatgaagctctgttgggctcaagaattgacatgtcagatattttcaagcatatttcggttgtttatgttgacgctcttcgagatgttcttagagaaatgaaaaacaatcgaaacccagtcaaaagaatcatggaaacaattgaatcaaaaatatcatcagataatgttgagtcattaaaaacaattatacagcaattaaatgagactattaccagtgttcctgaaattaggaaaattggcgaaaatattaatcggcaactaaatagcataattggttcagtgtattctcctaatcttcttctttcctcaactatgtcagatgatatgggttctttagcaaaatttctttcaatgaagccagaacaaaatatcgacttagacttactagggttaggacatctaaatatgatttatttagctttgaaaatagtcgaatttgaagcgtgtcgttcaagagaactacttaatattatgttgattgaagaaccagaagctcatattcatcatcatattcaaaaaactctgttcgaaggattaaatcttcaaaaaaactatactcagattctcatgaccacacattctgtacatttagctgaagtgtctgaaatatctcggatgaatgtattaaaatcgtttaatggcaaatctatcgttatgaatccagcaaataatctgaactcatttgctaaagaaaagttaaaaaagaacaatctaaatctaataaacgcagtagagagatatttagatgttaaaagaaatggattgcttttttctaaaggtgttatcttagttgaaggagatgctgaagaaatacttattcctcaaatagtaaaaaaattatttggtataaacttagacgaacttggaataggtttgattaatgttggtagtacttcgtttgaatatatcgctagcttgtttgacgatgatagaatacagagaaagtgtgctattgtaactgatttagatgaacaggcaatcccatcagaacatcgattgtataaaagcactgcacaagagaaaggtcaagcaagaaaagaaaaattatcctccctttttaatgaaaacaattgggttaattgtttttatgctaatacaacatttgaaattgagtttttagatgtgaataaagaaaatattctaacttatgtcagtccaattatagatgacgcattcaaagataaaaaaacaataactgcttataaagaagaaatacaaagtgaacaatatttagaaagaaatttagcgatgttaaaactagccaatcatgttggtaaggggtggtttgcaattgagttaggtgaaaaaattgactttttaatcaaaattcctaagtatattcttaatgctattgcttttgcatgtcaggaaatagtagatctctcaatttataaaaaaattctactccatacaatcgacttgtacgaggaaactacagaattgtcagctttatcagctagtttaaaaacaagtgatacagctgatttgaatatagcaataatttctttattagagtactttggtaaagatgaggatgttgtgtatctaatcaatcagatagaaaattacacaaaaatactttatgctgaggtttcaaaatga

SEQ ID NO: 434 - DNA, 192 bp, Staphylococcus aureus
atgatgttattcaaaaatttaaattttgtcattttttttgaagatatgagtttttttaagcggattcctcacaaaattttaaaaatatttaagcctgaaaatgataaagcggtagggaacgtagtgtgttccactgctgatttctttttgagcattataggcggtatgttggaagaaaagaacaaaagtttg

SEQ ID NO: 435 - DNA, 978 bp, Staphylococcus aureus
atggacactgcaacacatatcgcaattggggtgggccttacagcacttgcaactcaagatccagcaatggcttctacgtttggtgcaacagctacaacccttatcgttggttcattaattcctgatggggatactgttcttaaattaaaggacaatgcaacatatatttcgcatcatagaggtatcacgcattccatccctttcacaatactatggccaattttaattacatttttaatattcacgttctttagtggaaccmacccatttcatgtatggatgtgggctcagctcgcagtatttttacatgtctttgtagatatattcaattcttatggtacacaagckcttagacctatcacaaacaaatggattcaattaagtgtgattaacacatttgaccctattattttcacagttctttgtattggtattgtattatgggttrtaggcttgcatccayttgcagtcttctttcctataatcgctttactaatcatttattacatgattcgttttaaaatgagagccgtaattaagcaacaagctttaaaagcaattcaacaagagcatcaccctgttaaagtatttgttgcgccaacaataaaatttatggaatggcgtgtcgcgatacaaactgatgcacatgactatgttggaaaagcatatggtagraatgtggtgtttagtgataaagtkgaacgtcaaamattatcaacagactccattttatggaaagtcaaaggtaataaagatatacgtacttttttaaacttttcatcaatctatcgttggcaaacaacaacgttagcagatggttctactgaaattcgtttgattgatttgcgttatttaaaaaatgatcattattcatttgtggcaattgcacaygtaacaaamgataatgtcatagaccactcttatattggctgggtatttacagaagataagttacaacgtaaactgtatgctaaataa

SEQ ID NO: 436 - DNA, 1152 bp, Staphylococcus aureus
atgaatagcgtcaaattgaagcaacctgttagcattyacaatgatccatgggaakcatataacgatgttaaagaacatggccaattaactttaagtaacatcgaatttacaactacaaatctttgtaatatgcgttgtagccactgtgcagttggttatactttacaaactgtcgaccccgagcctttagatatggacttaatttatcgtagacttgatgaaattccaaatctgcgaacgatgtcwattacaggtggcgaaccaatgttttctaaaaagtctattagaaatgttgttaaacctctattaaagtatgcacatmatcgaggtatatatacacaaatgaattcaaacctaacattgcctcaagatcgttatttagatattgctgaatatatcgatgttatgcatatctcacayaactggggaacaactgatgaattcgcaaatgttggctttggcgcaatgaagaagcaaccaccgttaaaagctaagttaaaattatatgaacaaatgatttcgaatgcaygtacattatcagaacaaggaatgtttgtatctgcggaaacaatgctcaatcaaagtacgctaccacatttacgaaaaatacatcaagaagtcgttcatgatatgaaatgtagcagacacgagattcaccctatgtatccagctgactttgcaagtcaattaaatgtgttaactctagcggaaatgaaaaagacaattcatgatatattggatttcagagatgaagatatttggatgttatttggtactttgcctgtgtttccatgcttaaargatgatgaagatcaaaagttactatcacgtttaagaamtgctaamaatgtaacgactagaaatgacccggatggccgtagtcgtttaaatgtcaatgtatttacaggtaatgtaatcgtaactgatttcggagatgaaacaggtacaatttcgaatatacaaaaagataaattaacagatgtatttgataaatggttatcctctgatcttgctaaatcattaaattgtcattgttccgagtttagttgtttaggaccaaatgttcttgttaaaaatatgtactatccgaatatggattttaaagataatgagcgtcatatgcacaaacaaccacaaattatacaattttaa

SEQ ID NO: 437 - DNA, 1578 bp, Staphylococcus aureus
atgacgtttcttacagtcatgcaatttatagttaayattatcrttrtaggmttcmtgcttacggtyatkgttatcgggcttatttggttaattaaagataaaagacaatcacaacatagtgtattaaggaattatcctttactagcacgtattagatatatttcagaaaaaatgggaccggaattacgtcagtatttattttctggggataatgaagggaaacctttttcacgtaatgaytataaaaatatcgttttggctggaaaatataactctcgtatgaccagcttcggtactactaaagattatcaagacggcttttacatacagaacacaatgtttccgatgcaacgtaatgagatttcagtagataatacaacattgttatcaacattcatttataaaatcgcgaatgagcgtttatttagtcgtgaagaatatcgtgtrccgacaaagattgatccgtattacttaagtgatgaycatgcaataaaattaggtgaacrtttaaaacatccrtttattttaaaacgtatcgtaggacaatckggtatgagttatggmgcyttaggaaaaaatgcyattacagctttatctaaaggtctagctaaagcgggcacttggatgaatacaggtgaaggtggcttatcagaatatcatttaaaaggtaatggggatatmattttccaaattggtcccggtttatttggtgttcgtgataargaaggtaattttagtgaaggtttatttaaagaggtygcacagttawctaacgtwcgcgcatttgagctgaagttggcacaaggtgctaagactcgtggtggtcatatggaagctgaaaaggtaaacgaagaaattgctaaaatccgaaatgttgaaccttataaaacaatcaattcacctaaccgttacgaatttattcataatgctgaagatttgattcgtttcgtcgatcagttgcagcaattaggtcaaaaaccagtaggattcaaaattgtagtaagcaaagtttcagaaattgaaacacttgtacgtacgatggtggaaytagataagtatccaagctttattacgattgayggtggtgaaggtggtactggtgcaacattccaagaattacaagatggtgttggcttaccgctatttacagctctacctattgtgtctggcatgttagaaaaatatggtattcgagataaagtgaaattrgcggcatctggtaagttagtgacaccagataaaattgcgattgcactaggtttaggtgcagattttgtwaatatygcacgtggsatgatgattagtgtcggttgtatwatgagtcaacaatgycayatgaatacrtgtccwgtwggtgttgcaacracagatgckaaraaagaaaaagcattgattgttggagaaaagcaatatcgtgtcacaaactatgtaacaagtttgcatgaaggcttattcaatattgcagcagctgttggcgtatcmagycctacagaaattactgctgatcatattgtatatcgaaaagtcgatggtgarttrcaaacgatacatgattataaattraaaytsattagttra

SEQ ID NO: 438 - DNA, 1146 bp, Staphylococcus aureus
atgcgtaataacaagcctaaaataagtattcaaaacgacccatgggaagcatataacgatgttaaagaacatggccaattaactttaagtaacatcgaatttacaactacaaatctttgtaatatgcgttgtagccactgtgcagttggttatactttacaaactgtcgaccccgagcctttagatatggacttaatttatcgtagacttgatgaaattccaaatctgcgaacgatgtctattacaggtggcgaaccaatgttttctaaaaagtctattagaaatgttgttaaacctctattaaagtatgcacatcatcgaggtatatatacacaaatgaattcaaacctaacattgcctcaagatcgttatttagatattgctgaatatatcgatgttatgcatatctcacacaactggggaacaactgatgaattcgcaaatgttggctttggcgcaatgaagaagcaaccaccgttaaaagctaagttaaaattatatgaacaaatgatttcgaatgcacgtacattatcagaacaaggaatgtttgtatctgcggaaacaatgctcaatcaaagtacgctaccacatttacgaaaaatacatcaagaagtcgttcatgatatgaaatgtagcagacacgagattcaccctatgtatccagctgactttgcaagtcaattaaatgtgttaactctagcggaaatgaaaaagacaattcatgatatattggatttcagagatgaagatatttggatgttatttggtactttgcctgtgtttccatgcttaaaggatgatgaagatcaaaagttactatcacgtttaagaaatgctaaaaatgtaacgactagaaatgacccggatggccgtagtcgtttaaatgtcaatgtatttacaggtaatgtaatcgtaactgatttcggagatgaaacaggtacaatttcgaatatacaaaaagataaattaacagatgtatttgataaatggttatcctctgatcttgctaaatcattaaattgtcattgttccgagtttagttgtttagggccaaatgttcttgttaaaaatatgtactatccgaatatggattttaaagataatgagcgtcatatgcacaaacaaccacaaattatacaattttaa

SEQ ID NO: 439 - DNA, 465 bp, Staphylococcus aureus
atggtagatgtagcatttgtctgtcttggcaatatatgtcgttctccaatggcagaagcaatcatgcgacaaagacttaaagacagaaatattcawgatatwaaagtacattcaagaggtactggtagctggaatttaggagagccrcctcatgaaggtacacaaaaaattctyaacaaacacaatattccatttgatggcatgattagtgaattattcgaagcgacagatgattttgattacattgtggctatggatcaaagtaacgttgataatattaaatctatcaatcctaatcttaagggacaattgttcaaactgttagaatttagtaatatggaagagagtgatgtaccagatccatactacacgaataattttgaaggtgtatacgacatggtattatcatcttgtgataatttaatagactacatcgtaaaagatgcaaatttgaaagaggggtag

SEQ ID NO: 440 - DNA, 1194 bp, Staphylococcus aureus
atgaaaggtgcaatggcttggccctttttgagattatatatattaacattgatgttctttagtgccaatgcaatcttaaacgtrtttatacckttacgagggcatgatttaggcgcaacgaatacggttatcggtatcgttatgggggcatacatgttaacagcaatggtrtttcgaccatgggcaggacaaattattgctcgtgtcggtcccattaaagtwttaagawttattttgatyatcaatgccatagctttaattatttatggttttactggmttagaaggttatttcgtagcacgtgttatgcaaggtgtgtgtacggcattcttttctatgtctttacagytaggtattattgatgcattaccrgaggaacatcgttctgaaggtgtatcattgtactcgctattttcaacgattccaaacttaatyggaccattagttgccgtaggtatttggaatgcaaataatatttcactatttgcaattgtcattatctttatcgcattaacaacaacattctttggctatcgcgtgacctttgctgaacaggaacccgatacgtcagataagattgaaaaaatgccgtttaacgctgtaactgtttttgcgcaatttttcaaaaataaagagttgttgaacagtggtattatcatgattgttgcatcgattgtatttggtgcagttagtacatttgtaccgttatacacagtgagtttaggattcgcgaatgcgggaatctttttgacaatacaggccatcgcagttgttgyggcaagattttacttaaggaaatacattccgtcagatggtatgtggcatcctaaatatatggtatctgtactatcattattagtratcgcgtcatttgtagtrgcatttggtccgcaagtaggtgcaattattttctatggyagtgcratattaataggaatgacrcaagcaatggtgtacccaacattaacatcatacttaagyttcgtcttaccaaaagtaggtcgtaatatgttgttaggtttatttattgcctgtgcagacttaggtatatcgttaggtggcgcattgatgggacctatttccgatttagtaggatttaaatggatgtatctaatttgtggtatgttagtcattgtaataatgattatgagtttmttgaaaaarccaacaccacgyccagcrartagtctttaa

SEQ ID NO: 441 - DNA, 276 bp, Staphylococcus aureus
atggaaaataaatttgttcctggtattttaattggtgccgtaattggtggtgcaattagtttagctgataaatctacacgtcaagctttagttcaatcagttaaagatgcaaaaaatggtaaccgcactcgtaagccttctaaagtcagcaagattaaagacgaagttttataytggaaagatgttgttgaagaaattcgtcgtaataatcctgaattagaacgttcattaaargatgcgaaagaaacatttgttaatagaaaaaatcaacgctaa

SEQ ID NO: 442 - DNA, 750 bp, Staphylococcus aureus
atgattaaarttamagatgttgaaaartcatatcaaagcgcacatgtttttaagcgtcgtcgaacacctatcgtgaaaggtgtgtcatttgagtgtccaatcggtgcgacgattgcgattatcggagaaagtggtagcggtaaatcgacrttgagtcgtatgatattaggtattgagaaaccrgataaaggytgtgtaaccttaaatgatcwaccgatgcataagaagaaagtsagacgtcatcaaattggtgctgtatttcaagattatacgtcatcattacayccatttcagactgttagagaaatcttatttgaagtgatgtgtcaatgtgatggacaacctaaagawgttatggaagtycaagcaattacattgttggaagaagtyggtctatctaaggcatacatggataaatatcctaatatgttatcaggtggagargcrcarcgtgttgcgattgcgcgygcaatatgtattaaccctaaatatattttgtttgatgaagccattagttcactcgacatgtcaattcaaacacaaatattagatttattgattcatttacgtgaaacgcgtcagttgagttatatttttatcacacatgatattcaagctgccacgtatttatgtgatcaattaattatttttaaaaacggaaaaatagaagaacaaattccgacaagcgcattgcataaaagtgacaatgcttatacaagagaattaatagaaaaacaactatcattctaa

SEQ ID NO: 443 - DNA, 1218 bp, Staphylococcus aureus
atgtcgaaaaaggaycactcttcttcaaaataycttaattctgttaaggaagcrcaagaggagtcaaaaaagaaaaataaaagtaatcccaaaattgatgttgatcgtacatatattgaacctcaacaattccaatctaagaaacctaaaaaagatgatcaggttttcttcttatcaagattaaataaacctgcaaaatataagaaagactctaatttcttatcatatctcatctatcgcataggaaaagatgatgcctcaggactagcagcrcaaatgacttaccatttcgtacttgctatgttccctatgttgcttttcctattaacattattaccatttttcaatattaagcagagtcaaattactaatatgttaagyaatgcacccgctgaaacatctactctaattaagagtgtaattkgtgatataactcaaaactccagtggtggcttattatctatcggtttgattttagcaatttggtcagcttcaaatggaatgactgcaattatgaattctttcaatgttgcttackatgtagaagatagccgtaatggaatcgtwttaaaactactaagtgttgtcttcactgtagttatgggcgttgtgtttgtagttgctctagcattaccaacgcttggttctgtaattagtcatttcctattcggtccacttggatttgacgaacaagtgaaatggatttttaaycttattagaattgtgttaccaatcattattatatttatcrtatttatcgtgttatattcggttgcacctaacgttaaaacgaarcttaagtcagtattaccaggtgcagtatttacttcaattatttggttrgctggktcatttggttttggttggtatatttcaaattttggtaactattctaaaacatatggcagtatcgcrggtatcatcattttrttactatggttatatatcacaagttttattataattgtcggtgctgaaatcaatgcaatcattcatcagcgtagtgtaattaaaggtaaaacacctgaagaagcagcattagaacatgatgacaataataaaaatcattataatgagaacactagrtacgaatatgatgamgatastaatgcaacacatcaacgwacgtaycatgttgaygaacatcctagtgatacctatccagaagatgataaaaatataaaagacaaaatcgttgataagcttaaaaaagactaa

SEQ ID NO: 444 - DNA, 816 bp, Staphylococcus aureus
atgacattgttaacagttaarcatttgacgattacagatacctggacagatcaaccactcgtgagtgatgtgaattttacattaactaagggtgaaactttaggcgttattggagaaagtggtagyggtaaatcaatyacwtgyaaatcgattrtwggtttraatcymgaacgaytmsgsgtracaggtgawatwayctttgatggtamrtcaatgttgtcrttatckgaawcrcaaykgaaaaartaccgtggtaaagayattgcgatggtcatgcaacaaggtagtcgtgcctttgayccatcaactactgtcggtaaacaaatgtttgagactatgaaagtacatacgtcaatgtctacacaagaaattgaaaagacattgattgaatatatggattatttaagtttgaaagatyctaaacgtatattaaaatcatacccttacatgttatcaggaggaatgttacagcgattgatgattgctttagcgttagctttgaaaccaaagttaatcattgctgatgagccgacaacggctttagatacaattacacaatatgatgtactggaagcatttatagatatwaaaaaacactttgactgtgcgatgattttcatttcacatgatttaacggttattaayaagattgcagaccgtgttgttgtgatgaaaaatggtcarctkatwgarcawggkacrcgtgaatcagtcttgcatcatccagaacatgtttatacgaagtatttattatcmackaagaaraagattaatgatcattttaaacatgtgatgaggggtgatgtacatgattaa

SEQ ID NO: 445 - DNA, 1107 bp, Staphylococcus aureus
atgtcatataacttaaacttatcccacaacatatataaagacgctaaacttggcacttactatttccgtatcacttactatgacaaaagcaatactcgtaagtacataacacgtaaggggtttaaacaacgtaaagatgcagtaaagaaatgtaacgaaatgatggacgaattagagggagtcggacaccttaatagattaccttttgacaagctcgttgaagaatatatagactggtattcagcacgtcgaaagacatcaagtgtaaaagcattaaagacacataccaataaccatttgctaccttattttaaatctatggatgtatttaaaatgactacacaagatgtgatgaagtttcagaataagaaattaaaagagggacattctggagactacttaaagaagatgcatgtatatttagtatcattactgaatcatgcaatgaagtttcatgagttaaaacaaaatgttgcatctcttgtagggaattttgaaatagaatcacagaaacgattgaattattggacgttagaacaattcaatcaattctatgaggcgcttgctacacaacaacaaaaattatttttcaaactattgttctactctggagcaagaaagggcgaaattagagctctcacatggcgcgatattaactttgatgatgactttatccatataaacaaaacagactatcacggtgaagtgacagcccctaaaacgaaatcagccatacgtgatatatatttacctactcacatgatgtatgacatcaaagattatttaatttggtataaagagaataacatatacaaggacgactatgtattgtttggcacattctataaagcttacagcgagtctactattgatcgttggtttactaacgcattaaaagtgttggatgagcaattaccaaacggacaaaatttccctagaatcgttatacacgagttaagacatagccatgcatctatgctagttaatctaggggctagtgtaatgattatagctcagcgtttaggtcacagcgatacgactgaagtatataaccgatatggtcatttatatcctagtacacagaaagaaatagttaaatacttataa

SEQ ID NO: 446 - DNA, 585 bp, Staphylococcus aureus
atggaagagtttggtgaaaaattcacacataaagctcataaatctattgtttcaaaatgggaaaaagggctaacaaaaccaagtaatgaaagattaaaagagattgctaagttagggaatataagtgtacatcaattaatatacggtgattttctagggttgttagaaagtattgcaaacgaggaaataaagtttattttagacacaaatatgtgtgctaacaatagttttctagctaatgaattatcatcttcagtttctcgttttatattttcctattatgaaagaggtaaagaaaattttaacgaaaatttatttagaaaattgttacaacattatttacaattagaattagatttaggaaatagagatcttgaatctttaacatatttcgcttatcaaagaacaataaatgcgcaagaattagtagttgactattatgaagattcaaaagcaaaagaatttttaaaagatgagagcatcgatgaattccttacgacaatatctaacaaatactttgatctattagaatacattgatgactatagagttaaacatgatctagagaaaattagtgaagagtga

SEQ ID NO: 447 - DNA, 987 bp, Staphylococcus aureus
atgaacgrtcaatggtataaacatttaattggtgccagaacaattaaaactggtattgccatttttttaacrgctgtcttttgtatggcactagatttaacacccatctatgccattttaacagctgtagtcacaattgaaccaactgccaaggcatcacttatwaaaggttatcgtagattacctgctacggtaattggtgcaggctttgcagtattatttacatatttattcggcgatcaatcaccttttacatatgcattgagtgcracgttcacgattttattctgtacaaaactcaaattgcaagttggtacgaatgtygctgtactaacatcattagctatgattccaggtattcatgatgcctacatattcaactttttgtctcgaacattgacagcrattattggactcgtgacatcaggtttaattaacttcatggtgtttccacctaagtattatggtcaggtcgaagaaaaattaagtaagacagatgccttgatgtataaattattttacaatcgctgccaagaamttatcttatcaagactgcaatctgataaaagcgaaaaagcatataaaaatattttcaatttaaayaatcaagttgaaacgttaataagttatcaacgtgatgaattaagctatcataagaaaaaagaatgtgattggaaattrctcaatcaattaactaaacgtgcatatacgaatcgtttgtttatcactcatttatcaaatatcatttacttrcctaaaaatactcgtgttaacttttcaggtgacgaaaaaatggcattgctaaaaattagtagtagcatcaaagatatwttttatgatggtwcwtttaagagagaagatgattctgtagaaactttacgttcgacwataaaagcacttgaaattagtggtgaaaatcaaattaaaagtcatatactrtaygaagttytaatgatttatcgactgctagacagcagatatgcwtaa

SEQ ID NO: 448 - DNA, 870 bp, Staphylococcus aureus
atgataattttaaaacgattattacaagataaaggtgcagtrattgctttaggcattattgtattatatgtctttttaggattagcagcaccacttgtgacattttatgatcctaaccatatcgatacagcaaacaaatttgctggcatsagttttcaacatctactaggtactgaccatttaggtagagatattttaactaggttaatttatgcgattagaccaagtttgttatatgtctttgttgcrctatttgtttctgtacttattggatctattttaggattcttatcaggatatttccaagggtttgttgacgccttaatcatgcgtgcgtgtgatgttatgttggcattcccaagttatgttgtaacgttagcattaattgcattgtttggwatgggtgccgaaaatattatcatggcatttattttgacgcgttgggcatggttctgtcgygttatacgtacaagtgttatgcagtacactgcttctgaccatgtmagatttgctaaaacaatcggtatgaatgatatgaaaattattcacaaacatattatgccrttaacattagcagatattgctatcatctctagtagytcgatgtgttcaatgatcttgcaaatatctggcttttcatttttaggattaggtgtcaaagcgcctactgcagagtggggcatgatgcttaacgaagctagaaaagtgatgtttacacatcctgaaatgatgtttgcgccaggtattgccatagtgattatagtsatggcatttaacttcttatccgatgctttacaaattgcyattgatccccgcatctcttctaaagataaacttcgttctgtgaaaaaaggagtggtgcaatcatga

SEQ ID NO: 449 - DNA, 2229 bp, Staphylococcus aureus
atgacaacaattaaaacatcaaacttaggattcccaagattaggtagaaaaagagaatggaaaaaagccatcgaaagttattgggcaaaraagatttctaaagaagaattagatcaaacattaactgatctacataaagaaaatttattattacaaaagtactatcacttagatagcatcccagttggtgatttctctttatatgaccayatwttagatacgtcattattattcaacatcatcccwgaacgtttccaaggwagaactatygatgatgayttattatttgatatwgctcgcggtaataaagaccatgttgcaagtgcacttataaaatggtttaacactaactatcattacatcgtacctgaatgggacaatgttgagcctaaagtgagtcgcaatgtattattagatcgctttaaataygcscaatctttaaaygttaaygctcaccctgtyattgttggtccgattacttttgttaaattatcaaaaggcggtcaccaaacttttgaagaaaaagttaaaacgttattaccactttataaagaagtgtttgaatcattaattgatgcaggtgctgagtacattcaagttgatgagccaatcttagttacagacgacagygaaagctatgaaaatattacacgtgaagcttatgactatttcgaaaaagctggtgttgctaaaaaattagtcattcaaacatacttygaacgtgcacatcttaaattcttaagttctttacctgttggtggtwtaggwttagactttgtccatgataatggctataaccttaaacaaattgaagcwggagattttgataaatcaaaaacattataygctggaattattgatggtcgtaatgtrtgggcaagtgayattgaagctaaaaaagtcttaatcgayaaattgttagcacacactaatgarcttgtcattcaaccatcatcttcattattacatgttccagtatctttagatgatgaaacattagatacaagtgttggmgaaggcttaagctttgcaactgaaaaattagacgaattagatgcattgcgtcgcctattkaatcaaaacgatagtgttaaatatgataaattaaaagcacgttatgagcgtttccaaaatcaatcattcaaaaacttagattatgatttcgaaagcgtgcgtacttcaagacaatcaccattcgcgcaacgtattgaacaacaacaaaaacgtttgaacttaccggatttaccaacaacaactattggatcattcccacaaagccgagaagttcgaaaataccgtgcagattggaaraacaaacgcattacagacgaagcatatgaaacattcttaaaaaatgaaattgctcgatggattaaaattcaagaagacatyggcttagatgtattagttcacggtgaatttgaacgtaatgacatggttgaattcttcggagaaaaattacaaggtttcytagtaactaaattcggttgggtgcaatcatatggttcacgygccgtaaaaccaccaatcatttatggtgatgtaaaatggacagcgcctttaactgttgatgaaacagtttatgcacaaagcttaacagataaaccagttaaaggtatgttaactggacctgtaacaattctaaactggtcatttgaacgtgttgatttaccacgtaaagtygttcaagatcaaattgctttagcaatcaacgaagaagtattagcacttgaagctgcaggaatcaaagttatccaagttgacgaacctgcattacgtgaaggcttaccattacgctctgaatatcacgaacaatatcttaaagatgctgttttatcatttaaacttgcaacgtcttcagttcgtgatgaaactcaaatccatacacatatgtgttattctcaattcggtcaaatcattcatgctattcatgacttagatgctgatgttatttcaattgaaacatctcgtagccatggtgatttaattaaagactttgaagatattaattatgatttaggtatyggtctaggtgtrtatgatattcatagtccacgtattccaacaaaagaagaaattactacagcaatcaatcgttcactacaacaaatcgaccgctcattattctgggtaaaccctgactgtggtttraaaacgcgaaaagaagaagaagttaaagatgcattgactgtrcttgtgaatgctgttaaagctaaacgccaagaataa

SEQ ID NO: 450 - DNA, 1026 bp, Staphylococcus aureus
atgaaaatcgtagcrttatttccagaagcagtagaaggtcaagamaatcaattacttaatactaaaaaagcawtaggattaaaaacatttttagaggaaagaggacawgagttcattatattagcagataatggtgaagacttagataaacatttaccagatatggatgtgattattagtgcgccattttatcctgcatatatgactcgtgaacgtattgaaaaagcaccgaacttgaaattagcaattacagcaggtgtaggatctgaccatgtagatttagcggcagcaagtgaacayaayattggtgtcgttgaagttacaggaagtaatacagttagtgtggcagaacatgcrgttatggatttattaatacttcttagaaactatgaagaaggtcatcgtcaatcagtagaaggtgaatggaacttgtctcaagtaggtaatcatgcgcatgaattacaacacaaaacaattggtatttttggatttggwcgaattggacaacttgttgctgaaagattagcgccatttaatgtaacattacaacactatgatccaatcaatcaacaagaccataaattgtctaaatttgtaagctttgatgaacttgtttcawcaagtgatgcgattacaattcatgcaccattaacaccagaaactgataacttatttgataaagatgttttaagtcgtatgaaaaaacacagttatttagtgaatactgcacgtggtaaaattgtaaatcgcgatgcgttagttgaagcgttagcatcygagcatttacaaggatatgctggtgatgtttggtatccacaacctgcacctgctgatcatccatggagaacaatgcctagaaatgctatgacrgttcactattcaggtatgactttagaagcacaaaaacgyattgaagatggagttaaagatattttagagcgtttcttcaatcatgaacctttccaagataaagatattattgttgcaagtggtcgtattgctagtaaaagttatacagctaaatag

SEQ ID NO: 451 - DNA, 501 bp, Staphylococcus aureus
atgttaagtaaaaatttattagaagcattaaatgatcaaatgaaccatgagtactttgcagcrcacgcatatatggcaatggcagcatactgtgataaagaatcgtaygaaggatttgcaaacttcttcattcaacaagctaaagaagaacgtttccatggacaaaagatttataactatattaacgacagaggtgcacatgcagaattcagagcagtttcagcaccaaaaattgacttttcaagcatactagaaactttcaaagacagcttatctcaagaacaagaagtaacaagacgtttctataacttatctgaaatcgctcgtcaagataaagattatgcaactatctcattcttaaactggttcttagatgaacaagtcgaagaagaakcaatgtttgaaactcacatcaattatttaactcgtatcggcgatgacagcaatgcattatatctttacgaaaaagaacttggcrctcgtacattcgacgaagaataa

SEQ ID NO: 452 - DNA, 945 bp, Staphylococcus aureus
  misc_feature (2)..(2): n is a, c, g, or t
  misc_feature (4)..(5): n is a, c, g, or t
  misc_feature (8)..(9): n is a, c, g, or t
anrnnscnnatgttcaaatttatcttaaaacgtattgcgctcatgtttccattrrtgattgtagtaagttttatgacatttctattgacgtatattacaaatgaaaatccagctgtgacaattttacatgcacaargracgccaaatgtaacaccagagttgattgcagaaacgaatgaraagtacggtttcaatgatccattattaattcaatataaaaaytggttacttgaagcgatgcaatttaattttggtacaagytacattacaggkgayccwgttgctgaacgyattggyccagcatttatgaayacattgaaattaacaatratttcaagtgttatggtgatgattacatcaattattttaggtgtagttagtgcattaaaaagaggaaagttcactgatcgtgcgatacgttcagtggctttckttctaactgcattaccatcatattggatagcttcaatacttattatttacgtttcagtgaagttaaacatattgccgacttctggattaacaggyccagaaagttacatattgccagtgatcgttattacgattgcctatgctgstatttactttagaaatgttagacgctcgatggtggaacaattaaatgaagattatgtactttatttaagagcaagcggtgtgaaatctatcacattaatgttgcatgtgttgcgtaatgctwtacaagttgcggtatcaatcttttgtatgtctataccaatgataatgggtggactagttgttatcgagtatatctttgcatggcctggaytaggtcaattaagtttaaaagcaatacttgaacaygattttccagtyattcaagcatatgtattaattgtagcggtattatttattgtatttaatacattagcagatatcattaatgcgctattaaatccaagattaagggagggcgcacgatga

SEQ ID NO: 453 - DNA, 555 bp, Staphylococcus aureus
atgatacaagatgcgtttgttgcacttgattttgaaacagcaaatggtaaacgtacaagtatttgttctgtcggaatggttaaagtcattgatagtcaaataacagaaacatttcatactcttgtgaatccgcaagactatttttcacaacaaaatattaaarttcatggcatacaaccagaagatgttgaaaatgcacctacgtttgactacgtatttccatatatgatgcaatttattgcagatttacctgttgtcgcacataacgcggcatttgatatgaacgtcttacatcaaagcattcaaaatattggtttaccaacwccaaatttaacttacttttgtagttatcaacttgctaaaagaaccgttgattcgtatcgatacggtttaaaacatatgatggagttttatcaattagattttcatggtcatcatgatgcattgaatgatgccaaagcatgcgcaatgattacttttaggctactgaaaaattatgaaaayttaacatatgtaactaatatttatggtaaaaatctaaaagataaaggctag

SEQ ID NO: 454 - DNA, 1599 bp, Staphylococcus aureus
atgagaaaactaactaaaatgagtgcaatgttacttrcatcagggctaattttaactggttgtggcggtaataaaggtttagaggagaaaaaagaaaacaagcaattaacgtatacgacggttaaagatatcggkgatatgaatccgcatgtttacggtggatcratgtctgctgaaagtatgatatacgagccgcttgtacgtaacacgaaagatggdattaagcctttactagctaaaaartgggatgtgtcwgaagatgggaagacwtayacrttccatttragagatgaygtkaaattccatgatggwacrmcatttgatgctgacgcagttaagaaaaatattgaygcrgttcaasaaaayaaaaaattgcattcttggttaaagatttcracattaattgacaatgttaaagttaaagataagtacacggttgaattraatttgaaagaagcatatcaacctgcattggctgaattagcgatgcctcgtccatatgtatttgtrtctccaaaagactttaaaaacggyacaacaaaagatggcgttaaaaagttcgatggtactggtccatttaaattaggtgaacayaaaaaagatgagtctgcagactttaayaaaaatgatcaatactggggcgaaaagtctaaacttaacaaagtacaagcaaaagtaatgcctgctggtgaaacagcattcctatcaatgaaaaaaggtgaaacraactttgccttcacagaygatagaggtacrgatagcttagacaaagactctttaaaacaattgaaagatacaggtgactatcaagttaagcgtagtcaacctatgaatacgaaaatgttagtkgtcaattctggtaaaaaagataacgctgtsagtgacaaaacagtcagacaagcgattggtcatatggtaaacagagataaaattgccaaagaaattttagatggtcaagaaaaaccagcaactcaattatttgcgaaaaatgtaacagayattaatttcgatatgccaacacgtaagtatgaccttaaaaaagcagaatcattattagatgaagctggttggaagaaaggtaaagacagygatgttcgtcaaaaagatggtaaaaaccttgaaatggcaatgtactatgacaaaggttcttcaagtcaaaaagaacaagcagaatacttacaagcagaatttaagaaaatgggtattaagttaaacatcaatggcgaaacatcagataaaattgctgaacgtcgtacttctggtgattatgacttaatgttcaaccaaacttggggattattgtacgatccacaaagtactattgcagcatttaaagmgaaaaatggttatgaaagtgcaacatcaggcattgagaacaaagataaaatatacaacagcattgatgacgcatttaaaatccaaaacggtaaagagcgttcagrcgcttataaaaacattttgaaacaaattgatgatgaaggtatytttatccctatttcacacggtagtatgacagttgttgcrccraaagatttagaaaaagtakcattcacacaatcacagtatgaattaccattcaatgaaatgcagtataaataa

SEQ ID NO: 455 - DNA, 354 bp, Staphylococcus aureus
atgcgtaaaaaagaagataaatacgattttagagccgttggtttagcgattaaagaggctcgaatgaaacggggtctcactcgtgaacaagtgggaacaatgattgaaattgacccacgttatttaacaaatatagaaaacaaaggacaacacccaagtacacaagtgctgtatgatcttgtatcattactccatgtatctattgatgaatttttcttacctacagataatttgattaaaagcactcgaaggttacaggtagaaaaatacatggatagctttacagacaaagaactatccttaatggaagcactagcaaaaggtatcaatgaagcaagaaatattgaaggctag

SEQ ID NO: 456 - DNA, 681 bp, Staphylococcus aureus
atgaaatttaaagcgatagcaaaagcaagtttagcattgggaatgttagcaacaggtgtaattacatcgaatgtacaatcagtacaagcgaaaacagaagttaaacaacaaagtgaatcagagttgaaacactattataataaaccggttttagagcgtaaaaatgttactggatataaatatactgaaaaaggtaaagattatatagatgttatagtagacaatcaatattctcaaatttctttagttggatctgataaagacaaatttaaagatggagacaactcgaatatagatgtgtttatccttagagaaggtgacagtagacaagcaacaaattactcaattggtggcgtaacaaaaacaaacagtcaaccttttattgactatatacacacaccaatccttgaaatcaagaaaggtaaagaagaaccacaaagtagtttataccaaatttataaagaagacatctcattgaaagaacttgattatagattaagagaacgtgcaatcaaacaacacggcttgtattcaaatggtcttaaacaaggtcaaattacaattacaatgaaagatggcaaatcacatactatcgatttaagtcaaaaacttgaaaaagaacgtatgggtgattctatcgacggcagacaaatacaaaaaattctagtagaaatgaaataa

SEQ ID NO: 457 - DNA, 1539 bp, Staphylococcus aureus
atgcttacaatggggacagcattaagtcaacaagtagatgccaattggcaaacttatattatgattgccgtctacttcttgatactaatcgttattggcttttacggttacaagcaagcaactggtaacctaagcgagtacatgttaggyggacgtagtattggaccgtatattactgcattatcagctggagcttcagatatgagtggatggatgattatgggkctacctggttctgtctatagyactggtctwtcrgcwatgtggattacaatcggyttaacattaggtgcttatataaattactttgttgttgctcctagacttcgygtttataccgaattagctggagatgcaattacattaccagatttctttaaaaatcgtttaaacgataaaaataatgtgttaaagattatttctggattgattatcrtagtattctttacattatatacacattctggtttcgtatctggtggtaaaytatttgaaagtgcttttggattagattatcatttcggtttaatattagttgctttcattgtcattttctatactttctttggtggatatttagctgtatcaattacagatttcttccaaggtgtcattatgttaattgcgatggttatggtccctattgttgctatgatgaatttaaacggctggggaacgtttcatgatgtagcagctatgaaacctacaaatttaaatttatttaaagggttatcatttataggaattatctctctattttcatggggattaggttatttcggtcaacctcatatcattgtaaggtttatgtctattaaatcacacaagatgctacctaaagctagacgtttaggtattagctggatggctgttggtttattaggcgctgtggctgttggtttaacaggtattgcattcgtacctgcttatcatattaaaytagaagatcctgagacattattcatcgtgatgagtcaagtactcttccatcctcttgtaggtggtttcttacttgctgcgattctagcwgcaattatgagcacsatttcttcacaattacttgtaacrtctagttcwytaackgaagacttttataaattarttcgtggtgaagaaaaagctaaaacvsaycaaaaagaattygttatgrttggamgwttatctgtattagywgtagcaattgttgccatcgcgattgcatggaatccaaacgacacaattctaaacttagtaggtaaygcttgggccggatttggtgcatcgttcagtccacttgtgctatttgcactttactggaaaggtttgacacgtgccggtgctgtaagtggaatggtttcaggtgccttagtcgttatcgtttggattgcrtggattaaaccattggcacatatcaacgaaatattcggcttatatgaaattattcctggatttattgtaagtgtaatcgttacatatgttgtaagtaaacttactaaaaaacctggtgcatttgttgaaactgacttaaacaaagtycgygacatcgttagagaaaaataa

SEQ ID NO: 458 - DNA, 1218 bp, Staphylococcus aureus
atggttggacgtgcctcaacatcagaaaaatcaaaacgcttatatcaagcgtataaaaaagagaaacaatttgaagtcaaaatacaaaacgaggcgcatcaacatctggaaggtaagtttgaaattaatcgtttgtataaagaygttaaaaacgttaakggtgaatacgaaacggttgtcatggcatgcacagcagatgcttattatgacacactacagcaattgtcgttagaaactttgcaaagtgtcaaacatgtcattttaatwtcaccgacatttggwtcgcaaatgattgtsgaacaatttatgtctaarttyartmargatatcgaagtgatttcattytcaacttatcttggcgatacacgtattgttgataaagaagcrcctaatcatgtgttgacaacaggtgtaaaaaagaaattgtacatgggatcgacacattcaaactcaacaatgtgtcaacgaatctctgctttagctgagcarttgaarattcaattagaagtcgttgaatcgccactgcaygctgaaacrcgwaacagytcgctttatgtgcacccrccactatttatgaatgacttttcattgaaagccattttcgaaggracrgatgtaccggtttatgtgtataagttatttcctgaaggaccgataacgatgacaytaatccgtgaaatgcgtttaatgtggaaggaaatgatggytattttacaagcatttagagtrccgtcagtcaacctgcttcaatttatggtgaaggaaaattatccagtacgtcctgaaactttggatgaaggtgatattgagcatttcgaaatcttgccagatatcttacaagaatatctgctttatgtaagatayaccgcaatcctyattgatccattttcacagccagacgaaaacggacattactttgatttttcagctgtaccatttaagcaagtctataaaaatgaacaggatgttgttcaaattccaagaatgccaagtgargattattacagaacrgcgatgattcagcatattgggraaatgytaggtatcaaaacgccaatgattratcagttcctaactcgctatgaagcaagttgymagrcgtacaaggatatgcaycaagatcaacamytatcttctcaatttaatacaaatctatttgaaggagataargcactcgtcacaaaatttttggaaatcaatagaacgctttcayaataa

SEQ ID NO: 459 - DNA, 684 bp, Staphylococcus aureus
atgaaattaaaaaatattgctaaagcaagtttagcactagggattttaacaacaggtatgattacaactactgctcagccagtaaaagcaagtacattagaggttagatcacaagctactcaagacttgagtgaatattataaagggagaggatttgaattaacaaatgtaacaggatataaatacggaaataaagttacatttatagataattctcaacaaattgatgttacattgacaggaaatgaaaaattaactgttaaagatgatgacgaagtttctaatgttgacgtgtttgtagtaagagaaggtagtgacaaatcagctatcacaacatcgattggtggaattacaaagacaaatgggactcaacataaagatactgttcaaaacgttaatttgtcagtttctaagagtacaggtcaacacactacttctgtgacttcagaatactatagcatctataaagaagaaatctcattaaaagaacttgattttaaattaagaaagcatttaattgataaacatgatctttataagacagaacctaaagacagtaaaattagaattactatgaaaaacggtggctattatacatttgaattaaataaaaaattacagcctcatcgcatgggtgatacgattgatagtagaaatatagagaaaattgaagtgaatttataa

SEQ ID NO: 460 - DNA, 1167 bp, Staphylococcus aureus
atgaaaagaaactttccaaaattaatagctttaagtttaataytttctttaagtrttacccctattgcaaacgctgagagcaattcaaatatcaaagcaaaagataagargcatgtgcaagttaatgtcgaggacaagagtrttccwactgamgtacgtaatttagcgcaaaaagactatctttcttatgttacttcacttgataaaatctataataaagagaaagcctcgtatacacttggtgaaccttttaaaatttataaattcaacaaaaagagtgatggtaattattattttccwgttttgaacactgaaggtaatatcgattatatagttacaatttcaccaaaartcactaagkattctagttcatcttctaaatacacaatcaatgtttctycatttttatctaaagycttaaatsaatataaagatcaacaaattactattttgacaaactcaaaaggttactatgtggttactcaaaatcataaagctaaactagtactaaaaacaccacgtctagaagataaaaagkyaaaaaagacygagagtatacctactggcaataatgtaacgcaactaaagcaaaaagcttctgtcactatgccaactagtcaatttaaaagtaataattatacttacaacgagcaatatrtaaataaacttgagaatttcaagataagagaaactcaaggtaacaatggttggtgtgcaggctatacgatgtctgmattactaaatgcgacttataatactaacaaatatcatgcagaagctgtgatgagatttttacacccaaacttacaaggacaacrattccaatttactggtttaacgccaagagagatgatttattttggacaaactcagggaagaagtccacaacttcttaatagaatgactacatataatgaagttgacaatcttactaaaaataataaaggaattgctrttttaggtagtagagtagaatcaagaaatggtatgcacgcagggcatgcyatggcagttgttgggaacgctaaattarayaatggacaagaggttataattatatggaatycatgggataatggttttatgactcaagatgctaaaaacaatgttattccagtatccaatggcgaccattatcratggtattcatctatttatggttattaa

SEQ ID NO: 461 - DNA, 819 bp, Staphylococcus aureus
atgaataactttaataatgaaatcaaattgatattacaacaatatttrgaaaagtttgaagcgcattacgagcgtgtattacaagacgatcaatatatcgaagyattagaaacattgatggatgactatagtgaatttattttaaatcctatttatgaacaacaatttaatgcttggcgtgacgttgaagaaaaagcacaattaataaaatcactgcaatatattacagcgcagtgtgttaaacaagtggaagtcattagagckagacgtctattagacggacaggcgtctaccacaggttactttgacaatatagaacattgtattgatgaagagtttggacaatgtagtatmrctagcaatgacaaattattgttagttggttcaggtgcatatccaatgacgttaattcaagtagcaaaagaaacaggtgcttcagttatcggtattgatattgatccacaagccgttgacctaggrcgcagaatcgttaacgtcttagcaccaaatgaagatataacaattacggatcaaaaggtatctgaacttaaagatatcaaagatgtgacgcatatcatattcagctcgacaattcctttaaagtacagcattttagaagaattatatgatttaacaaatgaaaatgtcgtagttgcaatgcgctttggtgatggcatcaaagcaatatttaattatccgtcacaagaaacagcggaagataagtggcaatgtgtgaataaacatatgagaccacagcaaatttttgatatagcactttataaaaaagcagctataaaggtaggtattacggatgtctaa

SEQ ID NO: 462 - DNA, 483 bp, Staphylococcus aureus
atgaatagaaatactaggaccacaaccggttatttttcaatagaagaaatagattcaagaaaaagccttgatgaaagagaaacagaaaaaaagtatcctgtgaaaatgataaacaataaaattattccaactgaggagataaaagatgaaaagttgaaaaaggaaattgaaaactttaagttttttgtgcaatatggcagttttaaaggaatagagaattatgaaaatggtgacatttcctataattctgaagctcctatttattcagcgaaatataaactgaaaaatgatgattataatgttaaagaattacgaaaaagatataatattccaacagaaaaggcgcctaaattgttgttgaaaggttcgggggatttgaaagggtcttcagttggatataaggaaattgaatttatatttatagaaaataaaaaagaaaatatatatttttcagatggattaaacttaattccaagtgactaa

SEQ ID NO: 463 - DNA, 327 bp, Staphylococcus aureus
atggaacaawttgaattatttagtattgataaattcaaatgtaattcagaggctaagtattatcttaatattattgagggagaatggcatcctcaagatttaaatgatagycctttaaaatttattctcagtacctcagacgattctgattacatttgcaaatatataaatacagaacacaaacaactcacattatataataaaaataatagctcaattgttattgaaatatttataccaaatgataataaaatactactaacaattatgaacacagaagctttrggaacttctcctagaatgactttcattaagcawaartcataa

SEQ ID NO: 464 - DNA, 822 bp, Staphylococcus aureus
atgaatcggcaggttatagaattttctaagtataatccttcggggaatatgacgatacttgttcattcaaaacatgatgctagtgaatatgcatctatcgccaatcagttgatggccgcaacacatgtatgytgtgaacaggtaggctttatagaatcaacacaaaatgatgatggyaatgattttcacttagttatgagcggtaatgaattttgcggtaatgcgacgatgtcatatatacatcatttgcargaaagtcatttgcttaaagaccaacagtttaaggtgaaggtrtctggctgttcggatttagtgcaatgcgcaattcatgaytgccaatactatgaagttcaaatgccacaagcccatcgtgttgtgccaacaacaattaatatgggtaatcattcatggaaagcawtagaaattatttatgaaacatatgtacattatgtgattccagttarwcaagtaacaacwgaaattcaacatttggttgaarcrtwtgtgcgtgagcaacaatggartcacaaatataaaacagtaggtatgatgctttttgatgaacaacgtcaatttttacagccattaatctatataccagaaatycaaagtttaatttgggaaaatagctgtggttctggtacagcatcaattggggtttttaataattatcaacgtaatgacgcatgcaaagattttacagtacatcagccagggggcagtattttagtgacatcaaagcgatgtcatcaattgggatatcaaacttcaattaaaggacaggttacaactgtagctacaggaaaagcatatatagaataa

SEQ ID NO: 465 - DNA, 1077 bp, Staphylococcus aureus
atgttatttaaagaggctcaagctttcatagaaaacatgtataaagagtgtcattatgaaacgcaaattatcaataaacgtttacatgacattgaactagaaataaaagaaactgggacatatacacatacagaagaagaacttatttatggtgctaaaatggcttggcgtaattcaaatcgttgcattggtcgtttattttgggattcgttaaatgtcattgatgcaagagatgttactgacgaagcatcgttcttatcatcaattamttatcatattrcacaggctacwaatgaaggtaaattaaagccgtatattactatatatgctccaaaggatggacctaaaattttcaacaatcaattaattcgctatgctggctatgacaattgtggtgatcctgctgaaaaagaagttacacgcttagcaaatcacttaggttggaaaggaaaaggtactaattttgacgtgttaccactgatttaccaattacctaatgagtcagttaaatwttacgaatatcctacktcattaattaaagaagtacctattgaacatratcattatccaaaattaagaaaattgaacttaaaatggtatgcagtccctatcatttccaatatggacttaaaaatcggtggcattgtrtatccaactgcmccctttaacggttggtatatggtaactgaaattggcgtacgtaactttattgatgattaccgttacaatttactagaaaaagttgcagatgcgtttgaatttgatacacttaaaaataattcatttaataaagatcgagcacttgttgaattgaactatgctgtgtatcattcctttaaaaaagaaggcgtatcaattgtcgatcatttgaccgctgcaaagcaattcgaactattcgaacgtaaygaagcacaacaaggtcgtcaagttaccggaaaatggtcttggctagcrccgccattatctccaacattgacgtcaaattatcatcayggatatgacaatacagtaaaagatccaaactttttctataaaaagaaaraatcaaatgctaaccagtgccctttccatcattaa

SEQ ID NO: 466 - DNA, 795 bp, Staphylococcus aureus
atgcaattatattatttaggccctaaaggtacattttcatatttggcttgtcgtcagtatttttctgaaaakgaarcaacttttcaaccaaagtcaaatttwtttgaagtcatcaagkcagttgcagatgatgacacatcgattggtgttgtccctattgaaaattctatagaaggaacaatcaacattgtggcagatgcacttgcacagcaagatgtctttgcacacggtgaaatacgtttagatattaactttgcattatatggtaatggwwcrraywccatttctgatattaaaaaagtgtattctattgcaccagcaatcagtcaaacaacaaattacatacatcaacatcaatttgactatgattatgtcgacagtacaattcaaagtttgactaaaattgaaaatggcgttgcagcaattgcacctttaggtagtggygaagcttatggttttacacctattgatacacatattgaagactatccacataacgtgacacgttttttagttataaaaaatcagcagcaatttgatcaaaatgcgacatcattgatgtttttaattacaccaatgcatgataaacctgggytgttagcaagtgtgcttaatacatttgctttgtttaatattaatttatcctggattgagtctcgtcctttaaaaacacaattaggtatgtatcgatttttcgttcaggctgattctgcaattacaaccgatataaagaaagtcattgctattttagaaaccttagatttcaaagtagaaatgattggtgcttttaattaa

SEQ ID NO: 467 - DNA, 366 bp, Staphylococcus aureus
atgttaaaagaaaaagaaagttttagattgctatatcaagctataagagagattgcagataaaattggagataatcagttagaaactaattccgttagtttattattattggactttgattttgaacatgaagtatttgatgaattgtatcttgygattttaaaatatttaaatacagtaagtatagagaacataagtcatagtgagcttttgaatttaatagaaaatacgattccagaagatcgagakattaacacgtttgtaaaaaataaaataataattggctttgctaataattayttccctgaattacaagtattagcaaacgaaataaaatctgatatggctagttcattaaaayaatga

SEQ ID NO: 468 - DNA, 561 bp, Staphylococcus aureus
atgacacatcgcgcactattagttgttgactattcatatgactttatcgcagaygacggcttactaacatgcggtaaacctggacaaaatattgaagattttattgtttctcgtatcaatgactttaattattatcaagaccatatattctttttaatggatttacattatttacatgacattcatcatcctgaaagtaaattattcccaccacacaatatcgtagatacaagtggtagagaattatacggtaaagtaggtaaattatacgaaacaattaaagcgcaacctaatgtacatttcattgataaaacgcgctatgattcgttctttggtaccccgcttgatagtttattgagagaaagaagtattaatcaagtcgaaatcgttggtgtatgtaccgayatttgcgtgttacatacagcaatttctgcatacaacttaggytataaaatttcagtacctgctgagggagtggcttcatttaatcaaaaagggcatgaatgggcacttgcacatttcaaaaactcattaggtgcagaggtagaacaacacgtttaa

SEQ ID NO: 469 - DNA, 720 bp, Staphylococcus aureus
ttggcggtagacatagctgaagcggtatcggagactgtcgataaaattaaaagtaayggtgacaatgcgaaggcgtataatgtggatawtkcarrygaacaacaagtggtagactttgtgtctgacataaaggaacagtttggaagaatcgatgtgttgtttaataatgccggtgtggataatgcggctgrtagaattcatgagtatccaatagatgtgtatgacaagattatgaatgtagatatgcgtgggacawttttaatgacgaaaatgatgttacctttaatgatgaatcaaggtggctctattgttaatacgtcttcattttcmggacargcagmagayttgtatcgctcwggatataatgctgcgaaaggygcagtgattaattttacaaaatcaatcgcaattgagtatggycgtgatrgcattcgakccaatgcrattgcaccaggtacaattgaaaccccgttagtagataaactgacaggtacgagtgaggatgatgcaggtaaaacatttagagaaaatcaaaaatggatgactccgctgggacgtttaggtaaaccagaagaagttgctaaattagtagtcttcttagcatctgacgacagttcattcataactggagagacgattcgaattgatggtggtgtgatggcttacacatggcctggcgagatgttaagtgatgattcgtggaagcggacattggaataa

SEQ ID NO: 470 - DNA, 819 bp, Staphylococcus aureus
atgaaacgtttggaaaataaagttgcagtcgtaacaggagcaagtacaggtatcggacaagcttctgcaatcgctttagctcaagaaggtgcgtatgtattggcggtagacatagctgaagcggtatcggagactgtcgataaaattaaaagtaatggtgacaaagcaaaggcttatattgtggatatwgcaagcgaacaacaaattgacaattttgcatcagaaattagagaacagattgggcatgttgatgtgttatttaataatgccggtgtggataatgcggctggtagaattcatgagtatccaacagatgtatatgacaagattatgaatgtagatatgcgtggaacatttttgatgacgaaaatgatgttacctttaatgatgactaaaggtggctctattgttaacacatcttcattttcaggacaggcagcagatttgtatcgctcaggatataatgctgcgaaaggggcagtgattaattttackaaatccattgcaatcgaatatggtagagatggcattcgagctaatgcrattgcaccaggtacrattgaaaccccgttagtagataaactgacaggtackagygaagataaggaaggcaaagcrttyagagaaaatcagaaatggatgacaccgctgggacgtttaggyaaaccagaagaagtaggcaagctcgttgtctttttagcatctgatgagagttcatttattacwggtgaaacaattcgyattgacggtggtgttatggcttacacatggcctggygagatgttgagtgatgattcgtggaagcggacattggaataa

SEQ ID NO: 471 - DNA, 930 bp, Staphylococcus aureus
atggctaaaacatatattttcggacataagaatccagacactgatgcaatttcatctgcgattattatggcagaatttgaacaacttmgaggtaattcaggagccaaagcataccgtttaggtgatgtgagtgcagaaactcaattcgcgttagatacatttaatgtacctgctccggaattattaacrgatgatttagatggycaagatgttatcttagttgatcataacgaattccaacaaagttcwgatacgattgcctctgctacaattaagcatgtaattgatcatcacagaattgcaaatttcgaaactgctggycctttatgttatcgtgctgaaccagttggttgtacagctacaattttatacaaaatgtttagagaacgtggctttgaaattaaacctgaaattgcyggtttaatgttatcagcaattatytcagatagcttacttttcaaatcaccaacatgtacacaacaagaygttaaagcagctgaagaattaaaagatattgctaaagttgatattcaaaagtacggcttagatatgttaaaagcaggtgcttcaacaactgataaatcagttgaattcttattaaacatggatgctaaatcatttactatgggtgactatgtgactcgtattgcacaagttaatgctgttgaccttgacgaagtgttaaatcgtaaagaagatttagaaaaagaaatgttagctgtaagtgcacaagaaaaatatgacttatttgtacttgttgttactgacatcattaatagtgattctaaaattttagttgtaggtgctgaaaaagataaagtyggcgaagcattcaatgttcaattagaagatgacatggccttcttatctggtgtygtttctcgaaaaaaacaaatcgtacctcaaatcactgaagcattaacaaaataa

SEQ ID NO: 472 - DNA, 423 bp, Staphylococcus aureus
atgccgtataattacaagaaacaaaatggagagttaatgtctgtaatgagccaaggtgaaaagtttattcatcaatcaccsgttaatgatgaacttagtgcattgattaagttattaatttcwaaaattaacggttgtcattattgtgttgatatccataaaaaagaattaaaggaattgggygtaacacaaatgaaaattgatgaagtcttgagttttagacatttagatttatttactgatcaagaaaaagtgacgcttgaatttgcagaaatgttaaattcaatcaaagactttaagaagtttgaaattattgaccggctaaaatcattttatgatgaagaacaaattattgatcttgtctttgttgtaaaccaaattaacggttggaacagrytaaatattattagtgataractataa

SEQ ID NO: 473 - DNA, 1380 bp, Staphylococcus aureus
atgaatatcattgagcaaaaattttatgacagtaaagcttttttcaatacacaacaaactaaagatattagttttagaaaagakcaattaaagaagttaagcaaagctattaaatcatacgagagcgatattttagaagcactatatacagatttaggaaaaaataaagtcgaagcttaygctactgaaattggcataactttgaaaagtatcaaaawtgcccgtaaggaacttaaaaactggactaaaacmaaaaatgtagacacacctttatatttatttccaacaaaaagctatwtcaaaaaagaaccttatggaacagttttgrtcattgcaccatttaactatccttttcaactagtrttcgaacctttaatcggtgctattgcagcaggtaatacrgcaattattaaaccatctgagttgacrccwaatgttgcacgagtgattaaacgrttaatcaatgaaacatttgatgcaaattacattgaagttattgarggaggaattgaagaaacgcaaacgttaattcacttaccttttgactatgtcttctttacaggaagtgaaaatgtaggcaaaatcgtttatcaagctgccagcgaaaatttagttcctgtgacattagaaatgggyggtaaatctccagtcatcgttgatgaaacagcgaatattaaagttgcyagtgagcgcatttgttttgggaaattcacyaatgccggccaaacatgtgttgcaccagattacattttagtacacgaatctgtaaaagatgatttaatcacagccctatcaaaaacgttgcgtgaattttatggtcaaaatatacaacaaagtccagattatggccgcattgtaaaccttaaacattatcatcgtctgacktcattacttaacagtgcacaaatgaatattgtatttggtggtcatagtgatgaggatgaacgttatatagaaccaacattgttagatcacgttacaartgattcagcaattatgcaagaagaaatttttggtcctatcttaccgattttaacgtatcagtcattggatgaagcaatagcctttattcaccaaagaccaaaacctttgagtttatatttatttagcgaagatgaaaatgctacrcarcgtgtaataaacgagytatcatttggcggcggcgctattaatgatacattgatgcacctagcgaatcctaaattaccatttggtggtgttggygcctcaggtatgggacgctatcatggtaaatattcattygacacttttacacatgaaaaaagctacatttkcaaatctacacgattagaatcaggtgtccatttaccaccatataaaggtaaatttaaatacatcaaagctttctttaaaaattaa

SEQ ID NO: 474 - DNA, 1251 bp, Staphylococcus aureus
atgaaacgyttaagtacgactttgaaagtacgattgattagcaattttttacagctaattattacgacagcatttataccgtttatagcactatatttaacagatatgttaagtcaatcaattgtcggtatataycttgttggtttagtggttctaaaatttccattgtcyattatatctggttaccttattgagatwtttccgaaaaagttgctagtacttatttatcaagcgacgatggtgataatgcttgtgttcatgggcrtatttgggtcacatcaattgtggcaaattattggtttttgtgttgcataygccatatttacaatygtttggggattrcaatttccagttatggacacrttaattatggatgcaattaccgaagaygtggaacattatatttacaagattagctattggatgacraacttatcggtagctattggrgcattgttaggtggcttgatgtatggctacagtatgttactrcttttcttaatagcagcttgtatatttttaattgtactstttattttatatatttggttacctcaagaccgaaatcaagtaaagcaaagtgatgacaagarrcatgcaagtcgttatcaaaaattacaaataatgaatatatttcgcagttataaattagttttgaaagaccgtaattatatgttattgatttcggggttcagtatcatcatgatgggtgaattttcaatctcctcatatattgctattagactaaaggatcagtttgaaacaataagtataggttcatatgatattacaggtgctaagatgttagcaatcttgctaatgattaatacggtcgtcgtcattttactcacgtattcaatctcgaaarttgtattgaaaatagattttaaaaaagctttaatcactggtttgctgatttatattgttggctatagtggtctaacctatcttaatcagtttggcttattagttgtttttatgataattgcgactgtaggtgarattatttattcgcctatagtttcagaacaacgctttaaaattattcctaaagctaaaagaggaacatatagtgcagttaatgcattaggyattcatttttcagaaacactagctaggttagggattgtgttgggtgytttcttaacgwcattacaaatgggactgtatatgtttatmgttttaacaattggtgctagcatgcttgttgctggtgtattygggggacaaaaacaagtgaatacaaattga

SEQ ID NO: 475 - DNA, 1842 bp, Staphylococcus aureus
atgagtcaattcctcacacamttgaaagataatgttttagtagctgatggcgctatwggaacyattttatactctgaaggwttagacacctgyccagaagcatataaycttagccatccagataaagttgaacgyatccatcgttcatatatygaagcyggtgctgatgtcattcaaaccaatacttatggtgcaaattttgaaaagttaaaacgattcggtcttgaagataaagttaargcwatacatcaagcmgccgtwcgcatcgcaaaaaaagcagcaaataaagatacgtatatattaggcacagttggtgggtttagaggtatcaaacaagaggatatcagcttacaaactattctttatcatactgaaattcaaatagacaccttrattgaagaaggygttgacgcgctacttttcgaaacgtattacgacctagaagagytaacaaatgtcatttcacgaacgagaaagaaatacgacattccaatcattgctcaattaaccgcttcaaacacaaattacttagttaatggtcaggcaatcaatgaaggattaaaacaactcgttcaatgtggtgcmaacatcgtgggactcaattgtcatcatggyccrcaccatatgcaagagtctttcacacatattgaattaccagagcacgcatwcttatcttgytatccaaatgccagcttattagatattgaaaatagtgaatttaagtatagtgacaatgcacaatatttcggycaagttgctcaaaatytaattcrcgaaggtgttcgtttaattggtggttgctgtggtacaacgccwgagcacatcaaatttattaaagaatctattcagacacttaaacctgttaatgacaaaaaagtgattccgataccaacgaaagcacttttcaatccatctcaaaataaagttagacaatcattaacatctaaggttcaagaacgtccaaccgttattatcgaattggatacaccgaaacatttagacacggatagattttttgaaaatatcgctaaacttgahaaagctaatgtagatgcggtaacactcgcagataattcattggcaactgtcagaattagcaayattgctgctgcwagcttaattaarcaatattacaatattgaaccactcgtacatattacatgtcgagaccgaaacttaatcggcttgcagtcycatttacttggattatcrctcattggcgttaacgaaatattagccataactggtgatccttcaaaagttggtcacytaccwggtgcaaccaatgtctatgatgttaattctaaaggattaactgaactcgctctaagatttaatcaaggtattaacactgacggtgatgcgctgaagaaacrtacacacttcaacatcgctggcgcctttaaycctaatgttcgwaaattakatggtgccgtmaaamgaytagagaaaaagatagaaagcggaatgtcttattttataacacaacccgtgtacagcaaagagaaaatcattgaaatttaccatgccactaagcacttgaacaaaccatttttcataggcattatgcctatcgcaagttacaaaaacgcactctttttgcataatgaagtgccaggaatcaagatgtcagatgaaattttacaacaatttgaagcagttaaagatgataamgccaaaacwcgwgarctaagycttaagctttcaaaggatttaatcgatactgttcatgaatattttaatggtttatacattatcacaccgtttcaaaatgtcgaagattcattagaacttgcagcatactcaaaatctattactgctcacaaggaggcaatattatga

SEQ ID NO: 476 - DNA, 402 bp, Staphylococcus aureus
atgacaagttatgaagaagaaactgattatcgtaacgttccaagagaattactagataacaatatacctatgggaagaggcatgattaaatgggctccttttgcaacattacccgaacaattcgaaacgattcaacaatacattatcgaccaaaacaaaattacacgtcctgtattatcagatgatcaattggctgagctaaacattcggctacacgaggcgctacaatatgcccaacctgtagaagttaaattttataataatggctttgtagattcagtacgcttaaccatttatcgtattgatgctattaattatgaaattgatggttatgtttacaatcagcaacaacgtcaaaaaatttctatctttgatatcttagatattgtcttgttaccttaa

SEQ ID NO: 477 - DNA, 1041 bp, Staphylococcus aureus
atgcaacaagtgayatcagatatyatgacttttagaggttcacatttcgagttaggtgttaaaactggtaaatggcttcaacaaacacctcttctaaaaaatmgagaaaaagaatggaaaaaacgtgtcccacgtttcgatatagatgtaaatgaaacttatcaaatattccaaacwtacgcacctcaaatatgggaagaattaatgggactacaaagtatactcaaaatgccaacacgycaaattattttaaactttggacattatcgttttaccgatttaaaagaaagtggttgcackgtctttcaaggcaaagacttcatggttagaaattaygattaccaccctgcaacttatgatggwcgctacttactwtatcaacctacagatagcggtttagctcaaattggtcctgtatcaagggtaactggaagaatggatggtatgaatgagtcaggattaactatgggctataactttatgcaccggaaraaaccagcaaatggttttgtatgttatatgattggtcgtctaattcttgaaaattgccgaaatgtaacagaagcaatmcaattattgaaagaaataccacacagaagctcatttagctacatactgatggacaaatcattgaaccatgcaattgttgaagtgacrccgagatcaatagatgttcgttatgataatatatgtacaaatcattttgaaatattaacacatgaaaatcgyaattatacaaaagaatctaaagaaagactrgcgcgtaccatttcacaaactaatgataatttagatatgactacagcatttaagttattcaayaatcctcagtatgaaatttacagtaaactattcaaaagctggtctggcaccatccatacatcaatgtatcamcctgaaacattaactgcatattttacattgggagaaaatgcgccaccagaaataatagatttcaaatcatggttagatggtcaagaccttaatatcactcactttactggcaatatagataccgacttaacttttgccaacaaataa

SEQ ID NO: 478 - DNA, 564 bp, Staphylococcus aureus
atgacaaatttagaaacttatttcaaaaatagccaacccttaaatgaatacattgatggaatgaagacaaatcaagataccgttctcagtatctatcaatcatttgagttaccagaagatgattcacgcatcaaaaaaataaaagagatgaattattctaaagtattagtaattactgaagactggtgtggagatgcaatgatgaatctcccaattctaaaacacatcagtgaagcattaaatttagaagtrcgcgtgttccatagagatgatgatacaaaactgatcgatcaatatttaacaaatggtaaatcacgtgcaattcctatcttcgtattcttgaatgatcaattcgaacaagaaacagtttggggaccaagagcaaatgaagtccaaaaatttgtaactgatgttcgtgcygataaattaccgagcaaagatcatccagactatgcagatttagaaaaagaaacacacttagttatatcaaaycgctataaaactgacgcttcattttggaaagcagtttataattccatcctaaayaaattagaaaataaataa

SEQ ID NO: 479 - DNA, 696 bp, Staphylococcus aureus
atgacagtattaacagataaartagcagtagttacaggtgcaggtagtggtattggagaagcaattgcaacattactacatgaagaaggggcraaagttgtcttagcmggtagaaataaagawaaaytacaaaaygtrgcgaatcaattrkcwcaagatagtgtgaaggtagtgccaacwgatgtaacgaawaaagaagaagtcgatgaattgatraaaatkgcacaacaaacattcggtggtttggatattgtyatcaatagtgcgggrcaaatgttrtcgtctaagattactgattatcaagtagatgartgggatagtatgattgatgtkaatatcaaaggcactttatayacggyamaggctgcattaccaactatgttagaacaatcaagtggmcatcttattaacattgcatctatttctggctttgaagtaacgaaaagyagtacgatttatagtgcgacgaaagcrgcagttcacactattactcaaggattagaaaaagagttggcaaagacaggygttaaagtaacaagcatttcwccaggaatggtwgatacagcmataacwgccrcatayaatccaaswgatcgtaaaaarcttgadccacaagatattgcagaagcrgtattrtatgcattaacacaaccrarkcaygttaacgtgaatgaaattacagtgcgtcctgtataa

SEQ ID NO: 480 - DNA, 1287 bp, Staphylococcus aureus
atgaatcctttagcccaaagcttaaatgaacaacttcaacagtcaaatgcaactgcctttrcaatgttatctgacttaggtcaaaatatgttttatccaaarggcattttatctcaatctgctgaagcaaagagtacaacatataatgcaactataggtatggcgacaaayaaagacggaaaaatgtttgcatcatctttagatgcaatgtttaatgatttaactccagatgaaatattcccttatgygccaccacaaggcatcgaagaattacgtgatttatggcaacaaaaaatgttgcgtgacaatccagagctatcaatcgacaacatgtcackaccaattgttacgaatgcattaacacatggtttatctytagttggcgatttatttgtaaatcaagrtgacactatcttgttaccagakcataattggggtaattacaaacttgttttcaatacragaaatggtgcaaaccttcaaacatatcctatctttgataaagacgggcattatactactgattcactwgtagaagctttacaatcatacaataaagataaagtcattatgattttaaattatcctaataatccgacaggttacacacctacgcataaagaagtgactacsatcgtcgawgcaattaaagcattagctrataaaggtacaaaagttatagctgttgtggatgaygcatactatggtttattctatgaagatgtgtatactcaatcattatttactgcattawctaatttamattcaaatgcaatattacctrttcgtttagatggkgcaacaaaagaatttttcgcatggggattccgtgttggrtttatgacatttggaacgtctgatcaaacaactaaagaagtwttagaagccaaagtaaaaggtcttatacgaagyaacatttctagtggacckcttccaacacaaagcgctgttaagcatgtattaaaaaataataaacaattcgataaagaaatcgaacaaaatattcaaacattaaaagaacgctatgaagtcactaaggaagttgtctatgctgatcaatatcattcacattggcaagcmtatgactttaactctggatactttatggcaataaaagttcatgatgttgaccctgaagmaytkcgyaarcatttaattgamaartattcwattggtgtyattgcacttaatgcwacagatattcgtattgcgtttagytgtgtagaaaaagamgatatcccacatgtatttgattcaattgctaaagcrattgatgacttaagataa

SEQ ID NO: 481 - DNA, 192 bp, Staphylococcus aureus
atgagaaaagagattgaagcgcttattttctcagacgtaagtagctatgatatttacgtgaacactggtgtaaatcaaggattaattggtgacatcaaagatggttacctaactattgattctatgccttacattgatgctgagcgtttgtatcactttgctatggaacgtaaatcgttagtcactaactag

SEQ ID NO: 482 - DNA, 993 bp, Staphylococcus aureus
atggtraaaaaaacaaaatccaaywcactaaaaaaagwtgcaacacttgcattagcaaatttattattarttggkgcactkacwgacaatagtgccaaagccgaatctaagaaagatgatactgatttgaagttagttagtcataaygtttatatgttatcgaccgttwtgtatccaaaytggrgrcaayataaacgcgctgatttaatcggacaatcttcttatattaaaaataatgatgtcgtaatattcaatgaagcatttgataatggtgcwtcagacaaattattaagtaatgtgaaaaaagaatatccttaycaaacacctgtactcggycgttctcaatcaggktgggacaaaactgaaggtagctactcatcaactgttgcwgaagatggtggcgtagcgattgtaagtaaatatcctattaaagaraaaatccagcatgttttcaaaagcggttgtggattcgataatgatagcaacaaaggctttgtttatacaaaaatagagaaaaatggtaagaacgttcacgttatcggtacacatacacaatctgaagattcacgttgtggtgctggamatgatcgaaaaattagagctgaacaaatgaaagaaatcagtgaytttgttaaaaagaaaaatatcccyaaagatgaaacggtatatataggtggygaccttaatgtyaataaaggcactccagagttcaaagatatgcttaaaaacttgaatgtaaatgatgttctatatgcaggtcataatagcacatgggaccctcaatcaaattcwattgckaaatataattaccctaatggyaaaccagaacatttagactatatatttacagataaagatcataaacaaccaaaacawttagtmaatgaagttgtgactgaaaaacctaagccatgggatgtatatgcgttcccatattactacgtttacaatgatttttcagatcattayccaatcaaagcctatagtaaatag

SEQ ID NO: 483 - DNA, 870 bp, Staphylococcus aureus
attagggactccaaacccaataaatactgttgttacaaggtttctatgtatccaaactggggacaatataaacgcgctgatttaatcggacaatcttcttatattaaaaataatgatgtcgtaatattcaatgaagcatttgataatggtgcatcagacaaattattaagtaatgtgaaaaaagaatatccttaccaaacacctgtactcggtcgttctcaatcaggttgggacaaaactgaaggtagctactcatcaactgttgctgaagatggyggcgtagcgattgtaagtaaatatcctattaaagaaaaaatccarcatgtwttcaaaagcggttgtggattcgayaatgayagyaayaaaggctttgtttatacaaaratagagaaaaatggtaagaacgttcacgttatcggtacacatacacaatctgaagattcacgttgtggtgctggamatgatcgaaaaattagagctgaacaaatgaaagaaatcagtgactttgttaaaaagaaaaatatccctaaagatgaaacggtatatataggtggcgaccttaatgttaataaaggmactsmagagttcaaagatatgcttaaaaacttgaatgtaaatgatgttytatatgcaggtcataatagcacatgggaccctcaatcaaattcaattgcgaaatataattaycctaatggtaaaccagaacatttagactatatatttacagataaagatcataaacaaccaaaacaattagtcaatgaagttgtkactgaraaacckaarccatgggatgtatatgcsttcccwtaytactaygtwtacaatgatttytcagatcattayccaatcaaagcctatagtaaatag

SEQ ID NO: 484 - DNA, 141 bp, Staphylococcus aureus
ttgatttcagaattaatctttgcaaatgaagtagctggtaatacagtgaaagtagtcgatagtgctaacgtacaaattgtgatatttttacatagttgtttaatcattagtaatccgccctttcaatattatccttcttta

SEQ ID NO: 485 - DNA, 288 bp, Staphylococcus aureus
gtgggacttgattttagtggtttaccagatttagcagtattggaacaaatgaaggaaaaagaacagattagtgaggttattgcgcctgaacatgttcgtatgcatcatgatcatcaaaataagctgaaaagtgatgagaaaatattacttgaccaaatggtaagtcatttcaaaaamtttgaagatgattttaaaaatgcggcacaaggggcttgggtgaaaaatgccacagacgaattaaaagatattagtaatgatttagaaaaaattcaagatattaaagtataa

SEQ ID NO: 486 - DNA, 1224 bp, Staphylococcus aureus
atgacaacttttagtgaaaaagaaaaaattcaattactagcagatattgttgaactacaaactgaaaataataatgaaatagacgtttgtaattatttaamagatttattcgacaagtacgatattaaatctgaaattttgaaagttaatgaacaccgcgccaatwtcgttgcagaaatcggtaryggctcwccyatactygcattgagyggtcatatggatgttgttgatgcaggaaatcaagataattggwcwtatcccccttttcaactsacagaaaaagmtgrcaaattatayggycgaggcacwacrgatatgaaaggcggtytratggctttggtcrtmdcwctmatygaattaaaagaacaaaaysaattrcctcawggaacsatwagattactvgctactgctggygaagagaaagaacaagaaggygccaaattattrgcwgataaaggctatttagaygatgthgatggyytaatkattgctgaaccaactggatctggaatttattatgcacataargggtctatgtcatgtaaagtaactgcaactggyaaagctgtccatagctcagttccatttattggtgacaatgcaattgatacactgcttgaattttataatcwatttaaagaaaaatatkcagagcttaaamaamawgatactaaacatgarttagatgttgcdccyatgttcaaatcattgatwggaaaagawatttctgaagaggatgcaaattatgcatctggtcttacagctgtatgttcgattataaatggcggyaaacaatttaactctgtaccagatgaagcttcacttgaatttaacgtaagaccagttcctgagtatgataacgactttatagaatcgtttttccaaaatatcattaatratgtggatagcaataagctttcactcgatattccaagcaaycaycgacctgtaacaagcgataaaaatagcaaattaattactacgattaaagatgtagcttctagttatgtagammaagacgawatatttgtttcrgcgcttgtaggygcaacrgatgcytcyagyttcttaggagataataaggacaatgttgatttagccatttttggaccaggtaatccattaatggcacatcaaatcgatgaatatattgaaaaagatatgtayctgaaatatattgatattttyaaagaggcttccattmaatatttaaargaraaataa

SEQ ID NO: 487 - DNA, 327 bp, Staphylococcus aureus
atgtttactacgtataaaaatattaatgaacttgaaaatgcctatgatgaagaaagaaaacaattgaatgatgcattcaatcaaattgatgaattaagacatcaaacacgcaagaaatgtgaacaaatgtatgatcatttcttatatctcaaacataaaatgaattatagtgaagacgctatgatcaggatgacacgtattatagaatctttcgatagagaaacgaatcaacgtatccgacatcacgaaatgaaattagaagattataaagatgagttaagaagagaatatctaaaacaatctgacagaattgaaggagatgaataa

SEQ ID NO: 488 - DNA, 1203 bp, Staphylococcus aureus
atgacaacttttagtgaaaaagaaaaaattcaattactagcagatattgttgaactacaaactgaaaataataatgaaatagacgtttgtaattatttaaaagatttattcgacaagtacgatattaaatctgaaattttgaaagttaatgaacaccgcgccaatatcgttgcagaaatcggtaacggctcacctatactcgcattgagtggtcatatggatgttgttgatgcaggaaatcaagataattggacttatcccccttttcaactcacagaaaaagctggcaaattatacggtcgaggcacaacggatatgaaaggcggtctgatggctttggtcatcacactcattgaattaaaagaacaaaatcaattgcctcaaggaacgataagattactagctactgctggcgaagagaaagaacaagaaggtgccaaattattggctgataaaggctatttagacgatgtagatggcttaattattgctgaaccaactggatctggaatttattatgcacataaagggtctatgtcatgtaaagtaactgcaactggcaaagctgtccatagctcagttccatttattggtgacaatgcaattgatacactgcttgaattttataatcaatttaaagaaaaatattcagagcttaaaaaacatgatactaaacatgaattagatgttgcacccatgttcaaatcattgataggaaaagaaatttctgaagaggatgcaaattatgcatctggtcttacagctgtatgttcgattataaatggcggcaaacaatttaactctgtaccagatgaagcttcacttgaatttaacgtaagaccagttcctgagtatgataacgactttatagaatcgtttttccaaaatatcattaatgatgtggatagcaataagctttcactcgatattccaagcaatcaccgacctgtaacaagcgataaaaatagcaaattaattactacgattaaagatgtagcttctagttatgtagaacaagacgaaatatttgtttcagcgcttgtaggtgcaacagatgcctctagtttcttaggagataataaggacaatgttgatttagccatttttggaccaggtaatccattaatggcacatcaaatcgatgaatattgtttgactgtaaatattcaaatatcaacaagcacattttcattgattaagtga

SEQ ID NO: 489 - DNA, 1308 bp, Staphylococcus aureus
atgaacaaagtccacaaacctttatatttttatttaatgctwttcttctctacaactatcataggtgcwcttttattrtatttacctttyactggtaaaaagccaatatcttttttagatgccctatttatagcttcaagtgcatttacagttactggcytrtcyccagttgatataggrtcacagtttaatatacttggtgaratagtaatactattattaatwcaaataggtggtctrggtatcgtraccgtaaccctattgacactagtatttttaaatagaaagatatcaatgaaaaatagattyttgattatggttacatggaatattgacgaacctggtggtgttattaagctaattaaacacttggctatttatagtttagtcactgaattaattggtatgatttgtttgtgtttatcttttataccaaaatttggtataggcaaaggwttatttttaagyttattcacatcagtatcagcttttaataatgcyggatttgccctttttaagaataacttaatagattattctartgatccaattgtcattatyacaatctcaatactcataatatttggaggtattggacattttgtcgtratagactttattaattgtaaaaaawtgagtaaattatctttacattctaaattagtcttaactacaactagtatcctaataattataggagctattacattctttttattagaacagtttaatactatgcaamatatgggactagttgaaaaaatcggaaattcttttttccaatcartaacaacacgaacagcgggytttaacagtatwgatatagcaagcattaacaaatctacygchttaatgttaatgytacttatgtttattggtggtgcccctctcagtgcagctggaggaattaaaataactacttttgcagtdgcgtttatwtttgtwytaaattatatacgtaaagaaaataatgtttcagtattcaataaagaaatatctgacaaayatataaaactatctattgttaccattaatatctcatttctatttatcagyatcattacttttatattatcgataattaatccgaacatatcattaatcaagttattattcgaagtggtttctgcattyggaacagtmgggttaagtatgaaccttaccacagaatatcatggtattactaaaataattattatattcgttatgctttgcggtaaagtaggactattaactttattaagaacatttataccaccaaaaagtccwaaaaattaccgctacactaaaggacaaatttatctataa

SEQ ID NO: 490 - DNA, 255 bp, Staphylococcus aureus
atgaaaaaagattttaaagtaaatggaaaacggttcaaacaaatagattattttaatgataaaaataacgataatatgaaagatgcagttgatataaaaacctacgagctacttaatgatcagggagatccaactggtcaaaagacaataatatatcaaggaacatctaaagaggcaattaatccaaataatccattaaaatcatcgggttttggagatgattggcttcaaaatgctaaattaatgaataattaa

SEQ ID NO: 491 - DNA, 744 bp, Staphylococcus aureus
atgacaagaytatgggcatcattgctaactgttattatttatatattgtctcaatttttaccgcttctcattgtaaaaaaattaccatttgtacaatatagtggcatagaactgactaaagcagtcatttacatacaacttgttctatttttaatcgccgccacgacgattattttaattaatttaaaaattaaaaatccaacaaaattagaattagaagttaaagaacctaaaaaatatatcattccatgggcattgcttggatttgcaytggtaatgatttatcaaatggtagtkagyattgtatwwackcaaatttwtggyrsacaacaaryaagtccwaatacwgarmrkytaatyrttattgcwcgwaaratwccwwtrtttatcttyttygtatcwatyrtyggtcctytattagaagaataygtattyagaaaagtaatctttggmgaattatttaatgcrattaaaggtaatcgtatcgtvgcatttrytattgcwacracwgtaagytcattaatmtttgcattagcrcataatgaytwyaaatttattccwrtwtaytttggyatgggygtcattttttcattagcatatgtwtggacraaacgrcttgctgttccaattattatycatatgttacaaaayggatttgtcgttatattccaattacttaatcctgargctttgaaaaaagccacggaacaagcgaattttatatatcacatttttattccataa

SEQ ID NO: 492 - DNA, 1161 bp, Staphylococcus aureus
atgacactttcaaaagagacagaagtgatattcgattggcgtagaggtgtggaatatcattcagctaacccaccactctatgattcttcaacattccatcaaacaagtcttggtggcgatgttaaatatgattatgcacgaagtggcaaccctaaccgtgaacttttagaagagaagttagcacgattagaacagggraaattcgcttttgcttttgcatcaggtattgctgctatttcagcagtacttttgactttcaaatctggtgatcatgtcatcttacccgatgatgtatatggcggtacttttcgcctcactgagcaaattttgaatcgatttaatattgaatttacaaccgtagatactacmaagctcgaacaaatcgagggtgccattcaatcaaacacaaaattaatttatatcgaaacaccatcgaatccctgttttaaaattactgatatcaaagctgtttctaaaatagccgaaaagcatgaactactggtagctgtggacaatacatttatgacaccgttaggycaatcacctttattacttggcgctgatatygtcattcatagtgctacaaaatttttaagtggacatagcgatttaattgctggtgctgtcatwactaataatgargcaatkagtgamgcwctttatttaatacaaaatggtacrggcaatatgttatctgctcargatagctggacrcttgctaaacatttraaaacwtttccaatcagatttaaacaatctgtcgaaaacgckcaaaaaatcgtgtcatttttaataaagcaagatgaaatttcagaagtttattatccgggactyactrctrctcatttagaacaagctaaaaatggcggtgccgttattggctttcgtttagctgatgagtctaaagcacaacaatttgtcgatgcactgacattaccactcgtttcagtgagtctgggyggtgttgaaacgatmctttcacatccagcaacaatgtctcacgctgcactacctgaagaagtgagacaagaacgtggtatcactttcggtctrttccgattaagtgttggtctcgaagatcctgatgaactcattgcagacatcaaatacgcattaaaggaggcattcaatgagtcaattcctcacacamttgaaagataa

SEQ ID NO: 493 - DNA, 627 bp, Staphylococcus aureus
atgggyttatttaaaaaagataaaaaagcaatgacttttgacaaygcaatggaagaaagacgttcaatatataatttgaaagattcratatcaattagcgatgacgaattagaatcaatgattgcacatgcagttaaacatgttccttcatcatttaattctcaatcaactagaattgttctcttrttaaatgacaacaataataaattttgggataacacaaaagcaattttaaaagaagtcatgggagagaatcgtgatttcgagccaactgaacaaaaaattgataacttcaaacattcatacggtacaattttgttttatgaaratcaagatgttgtaagtggtttacaagaacaaatgccaaactactatgataattttgcaatatggtcaactcaaacaaatgccatgcatcaatttgcaatttggactgcattagctactaaaggcataggtgcttcattacaacactataatccacttgtygatgagatgacttcaaawgaatttaatattcctaaaagttggaaacttattgctcaaatgccatttggtgatattcgtgaagctgctggcgaaaaaacatttaatccagtggaagatcgtttcgtaataaaaaaataa

SEQ ID NO: 494 - DNA, 2862 bp, Staphylococcus aureus
atgagtagattactaaatgatttcaatcaatctttamawaaaggktttatagacaaasatatttctcataaagggaattatacaccgaagcttttagtaaataataaaaatgaaaaagtyctttcaacaattatagatgaacttcaaaaatgtgaaacgttytatttttctgtrgcttttataacagaaagcggwttagccagcttaaaggctcaactattagatttaagcaataagggtgttaaagggaaaatattaacatctaattacttaggrtttaatagtcctaaaatgtatggagaattacttaaattaaaaaatgtagaggtaagattaacygatattgctggattccatgccaaaggatatatttttgarcataaggattatagttctatggtaataggaagctctaatttaacatckaatgcgttaaaggttaattatgagcataatgttttactgtctactatgaaaaatggbgatttrgttgatagtgtaaaaartgaatttgamttgttatggcaaaasagtacccmactgactsagcaatggattaawtcatataaagaatcatttgagtaccgytccttagaaaaattrgcggaggttgaacaaactcaaatgctgctagctgataaggtgaaaaaatcagtggaaattgtaccsaatttaatgcaagcagaagcattaaggtcattaaaagctattagggataaarccaaagataaggcgttaataatatctgcaactggtacaggtaaaacgattttatgtgcattagatgttagagaagtaaaccctaataaatttttatttattgttcataatgagggrattttaaatagagctaaggaagaatttaaaaaagtattacctayaaaaaatgatagtgattttggattgttgacaggmaaacatagagatgtcgatgccaaatatttatttgcaacmattcaaacattatctagagatgataattttaagcartttgatgaaaawgaatttgattatattgtttttgatgaagcacatcgttctgctgcatctacttatcaacgagtatttaaytacttcaaacctaagttyatgctrggwatgactgcwacaccagaaagatcagatgaattaagtatatttgaamtgtttgattataatattgcdtatgaaataaggttacaagcagcrttagaaagtgatattttatgtccatttcattattttggtgtgactgattatgtacatcaaggtattaaagaagatgatgtaactaaactgagatatttaacttctgatgaaagagttaattatattattcaaaagacagattamtatggatattcaggtgaaattttacaaggattratttttgtragtagcaaaaaagaagcttatgatttagcggataaactaagttcaaaagggattaaaagtgttgctttaacaggagaygatagtgttaattatcgccaaattgtaatagaaaaattaaragaaggtaagattaactatattataactgtagatctwtttaacgaaggtattgatattccagaagtcaatcaagttgtaatgytgagaccaacwgagtctagtattatattcattcagcaacttggtagaggrttaagaaaaagtkcaaataaagagtatgttacwgtaattgattttattggtaattataagacmaattatttaattccgattgcgctttctggggatcaatcgcaaaataaagataattataagaagtttttaacgaataacgattcgattaatggagtatctacaattaattttgaagaagttgctaaaaaacagatttacaattcattggatgcagtatcattraatcaaaataaattaatattaaaagcttatgaagaagttgaaaatagattgggacacatgccgttactaatggatttyatacaacaacattcwatagatccaagcgttatattttctaaatttagtaattattacgarttyttaktragrtataamaaaatagatrcwttattgacggaaaatgaatctaaaaatctggttttcttttcaagrcaaatagcacctggattgaaaagaatcgatagtwtagttttagaagaacttttaaaaaatgaattaacatatgatgaattaaaaaataaaatgttgaacgaagttaaggatataacagaagatgatatagatacttcattaagaattttagatttttcattttacaacgcaggaattgaaaaaatctatggaagtcccattatagaaygtaatgaaagaatgataagactaagcgatgcatttactaatgctctaagtaatcaaacatttaawatrtttttagaagatcttattgaattatcaaagtataacaatgaaaaataccaaaaaggtaaaaatggactgattttatataataaatattcaagagaagattttagyaaaatatttaattggartaaaaatggttcgtctgtaatcatgggatacatgataaraagccaagaaatgccaatatttatcacttatgataagcatgaggatataagtgatagyacaaaatatgaagatgaatttttaagtcaagatgaattaaaatggtttactaaatctaatagaacgctaraatcaaaagaagttcagaaaattttgtcccatagagcaaaaggaattaaaatgtatatttttgtacagaaaaaagatgatgatggtatatatttttattatttaggaactgctggatatatagaaggttcagaraagcaagataaaatgccgaatggttcaaacgtagtaackatggatttagcactsgataaagctgtmagagatgatatatatcgytatmtaacaaattaa

SEQ ID NO: 495 - DNA, 786 bp, Staphylococcus aureus
atgaaagtccaaatttatcaattaccgattrtttttggagatagttctaaaaatgaarctcaaataacgcaatggttcgaaaaaaatatgaatgctgaagtagatgtagtcgttttacctgaaatgtggaataatggctatgatttagagcatttaaatgaaaaagcagataataatctaggacaaagtttttcatttattaaacatttagctgaaaaatataaagtcgatatcgtagctgggtcwgtttctaacattagaaacwatcaaatatttaatacagcttttagtgtgaataaaagtggcmarctrattaatgaatacgacaaagttcatttagttcctatgttaagagagcatgaatttttaacygctggcgaawacgtagctgaaccctttcaattgtctgacggtacttatgtgacccaacttatctgttatgatttacgttttccmgaattattaagatatcctgctcgyagtggtgctaaaattgcattttatgtggcrcaatggcctatgtcacgtcttcaacattggcattcwttactaaaggcacgtgcaattgaaaataatatgtttgtcattggaactaatagcactggattcgatggtaacacagaatatgctggtcattcgatagttataaayccaaayggagatttagttggagaattaaatgaatccgcagatattttgactgtagatttaaacttaaatgaagtagaacagcaacgcgaaaatatacctrtatttaaaagtattaaattagatttgtataaataa

SEQ ID NO: 496 - DNA, 393 bp, Staphylococcus aureus
atgaaaaaagtaatcaatgtagtaggagctattattttttctgataacaaaattctttgtgcacagagaagtgaaraaatgagtctrcctttaatgtgggaatttcctggcggtaagrttgaaaagaatgaaactgaaaaagamgctttgatyagagaaattagagaagaaatgaaatgtgatytaattgttggagacaaagtyataactacagaacatgaatatgattttggmattgttargttaacaacatacaaatgtactttaaacaaagagttaccaactytaactgaacataagagtattgaatggttgtcaataaacgaacttgataaattaaattgggccccagcggatataccagccgttaataaaattatgactgagggataa

SEQ ID NO: 497 - DNA, 1194 bp, Staphylococcus aureus
atgttgtayttagaagttttgaaaaatagaaactttacatatttattgattggtaatttcttacgtcggagttgytttgtgctgttttcgttacaaataatttggtttactgttgaattgacaaaccaatcatctttaaaattatcaatgatggttatgagtcaaacactwccatttattatatttggtattttcggtggcgcatattctgataaacataataaaaagaaaatactttatctatctgatcttatactaagtttgattataataattattcctttacttgcaataacatcaaatttaaattatctgacgcttctaaccatatctacagctatcaccattattaactgctatacggatcctgcgtttagggcaattcttcctgaaattattgatgaggagcatttagcaacaagtaatgcgttaatcgatagtttgcaaagaggctcaaatattattttacctgctttaattggtgtcattgtaatactagttggtaatgttggcgtcttttttatttgyagtatattgctatttttaggatttatttttaatgcacttttaaaatatacaaatawcarcatgattgatagacactcaaaagaagatttttctgaaacttgggaattcttgaaamaatctaaagaaattccatttatyatmatcatccaatttgcytgcatattgattaatactggyctttggcgtgttgyattaccattgtttatttccaatatattaaaagagggcgttggtgtatatggactagctacatcatgtttaggtatagcrtctttattaatgtcattgattatgggtttrctrtcagaaaarcgattaatctttaaatttagtattggtgttttagtttggggrattggcttatcgatwattaatgtgtttccaagtgtggcgataytatatataggtgcaacwttaktgggacttggrcaatctatagagggactaacaagatcagttgccattcaaataaaracgccaaatcatttgatggggaaagtatttagtatctcatctacatcgaattaygcagcggatacattrtctttaggactkataagtwtaattatacctttactaagcttaagtaatatatttatatyaggaggtgyaattatttcaatrcttagcttagctgggttaargtttgttaagaagtctatgtaa

SEQ ID NO: 498 - DNA, 1578 bp, Staphylococcus aureus
ataacracrccaacactaaaaaatccattaactggagaaattattagtaaaggtgaatcgaaagaagaratcacaaaagatccgattaatgaattaacagaatacggaccwgaaacratarcrccaggtcatcgagacgaatttgatccgaagttaccaacaggagagaaagargaagttccaggtaaaccaggaattaagaatccagaaacaggagaygtagttagaccrccggtcgatagygtaacaaaatatggacctgtaaaaggagactcgattgtagaaaaagaagaaattccattcragaaagaacgtaaatttaatcctgatttagcaccaggracagaaaaagtaacaagagaaggacaaaaaggtgagaagacaataacgacrccaacactaaaaaatccattaactggagaaattattagtaaaggtgaatcgaaagaagaratcacaaaagatccgattaatgaattaacagaatacggaccwgaaacratarcrccaggtcatcgagacgaatttgatccgaagttaccaacaggagagaaagargaagttccaggtaaaccaggaattaagaatccagaaacaggagaygtagttagaccaccggtcgatagcgtaacaaaatatggacctgtaaaaggagactcgattgtagaaaaagaagaaattccattcgagaaagaacgtaaatttaatcctgatttagcaccagggacagaaaaagtaacaagagaaggacaaaaaggtgagaagacaataacgacgccaacactaaaaaatccattaactggagaaattattagtaaaggtgaatcgaaagaagaaatcacaaaagatccagttaatgaattaacagaattcggtggcgagaaaataccgcaaggtcataaagatatctttgatccaaacttaccaacagatcaaacggaaaaagtaccaggtaaaccaggaatcaagaatccagacacaggaaaagtgatcgaagagccagtggatgatgtgattaaacacggaccaaaaacgggtacaccagaaacaaaaacagtagagataccgtttgaaacaaaacgtgagtttaatccaaaattacaacctggtgaagagcgagtgaaacaagaaggacaaccaggaagtaagacaatcacaacaccaatcacagtgaacccattaacaggtgaaaaagttggcgagggtcaaccaacagaagagatcacaaaacaaccagtagataagattgtagagttcggtggagagaaaccaaaagatccaaaaggacctgaaaacccagagaagccgagcagaccaactcatccaagtggcccagtaaatcctaacaatccaggattatcgaaagacagagcaaaaccaaatggcccagttcattcaatggataaaaatgataaagttaaaaaatctaaaattgctaaagaatcagtagctaatcaagagaaaaaacgagcagaattaccaaaaacaggtttagaaagcacgcaaaaaggtttgatctttagtagtataattggaattgctggattaatgttattggctcgtagaagaaagaattaa

SEQ ID NO: 499 - DNA, 3729 bp, Staphylococcus aureus
atgagagataagaaaggaccggtaaataaaagagtagattttctatcaaataaattgaataaatattcaataagaaaatttacagttggaacagcatctattttaattggctcactaatgtatttgggaactcaacaagargcagaagcagctgaaaacaatattgagaatccaactacattaaaagataatgtccaatcaaaagaagtgaagattgaagaagtaacaaacaaagacactgcaccacarggtgtagaagctaaatctgaagtaacttcaaacaaagacacaatcgaacatgaascatcagtaaaagctgaagatatatcaaaaaaggaggatacaccaaaagaagtagctratgttgctgaagttcagccgaaatcgtcagtcactcataacgcagagrcacctaaggttagaaaagctcgttctgttgatgaaggctcttttgatattacaagagattctaaaaatgtagttgaatctaccccaattacaattcaaggtaaagaacattttgaaggttacggaagtgttgatatacaaaaaaamccaacagatttaggggtatcagaggtaaccaggtttaatgttggtaatgaaagtaatggtttgataggagctttacaattaaaaaataaaatagattttagtaaggatttcaattttaaagttagagtggcaaataaccatcaatcaaataccacaggtgctgatggttgggggttcttatttagtaaaggaaatgcagaagaatatttaactaatggtggaatccttggggataaaggtctggtaaattcaggcggatttaaaattgatactggatacatttatacaagttccatggacaaaactgaaaagcaagctggacaaggttatagaggatacggagcttttgtgaaaaatgacagttctggtaattcacaaatggttggagaaaatattgataaatcaaaaactaattttttaaactatgcggacaattcaactaatacatcagatggaaagtttcatgggcaacgtttaaatgatgtcatcttaacttatgttgcttcaactggtaaaatgagagcagaatatgctggtaaaacttgggagacttcaataacagatttaggtttatctaaaaatcaggcatataatttcttaattacatctagtcaaagatggggccttaatcaagggataaatgcaaatggctggatgagaactgacttgaaaggttcagagtttacttttacaccagaagcgccaaaaacaataacagaattagaaaaaaaagttgaagagattccattcaagaaagaacgtaaatttaatccggatttagcaccagggacagaaaaagtaacaagagaaggacaaaaaggtgagaagacaataacgacaccaacactaaaaaatccattaactggagtaattattagtaaaggtgaaccaaaagaagagattacaaaagatccgattaatgaattaacagaatacggacctgaaacaatagcgccaggtcatcgagacgaatttgatccgaagttaccaacaggagagaaagaggaagttccaggtaaaccaggaattaagaatccagaaacaggagacgtagttagaccaccggtcgatagcgtaacaaaatatggacctgtaaaaggagactcgattgtagaaaaagaagagattccattcgagaaagaacgtaaatttaatccggatttagcaccagggacagaaaaagtaacaagagaaggacaaaaaggtgagaagacaataacgacaccaacactaaaaaatccattaactggagtaattattagtaaaggtgaaccaaaagaagaaatcacaaaagatccgattaatgaattaacagaatacggaccagaaacgataacaccaggtcatcgagacgaatttgatccgaagttaccaacaggagagaaagaggaagttccaggtaaaccaggaattaagaatccagaaacaggagacgtagttagaccaccggtcgatagcgtaacaaaatatggacctgtaaaaggagactcgattgtagaaaaagaagaaattccattcaagaaagaacgtaaatttaatccggatttagcaccagggacagaaaaagtaacaagagaaggacaaaaaggtgagaagacaataacgacgccaacactaaaaaatccattaactggagaaattattagtaaaggtgaatcgaaagaagaaatcacaaaagatccgattaatgaattaacagaatacggaccagaaacgataacaccaggtcatcgagacgaatttgatccgaagttaccaacaggagagaaagaggaagttccaggtaaaccaggaattaagaatccagaaacaggagacgtagttagaccaccggtcgatagcgtaacaaaatatggacctgtaaaaggagactcgattgtagaaaaagaagaaattccattcaagaaagaacgtaaatttaatcctgatttagcaccagggacagaaaaagtaacaagagaaggacaaaaaggtgagaagacaataacgacgccaacactaaaaaatccattaactggagaaattattagtaaaggtgaatcgaaagaagaaatcacaaaagatccgattaatgaattaacagaatacggaccagaaacgataacaccaggtcatcgagacgaatttgatccgaagttaccaacaggagagaaagaggaagttccaggtaaaccaggaattaagaatccagaaacaggagatgtagttagaccaccggtcgatagcgtaacaaaatatggacctgtaaaaggagactcgattgtagaaaaagaagaaattccattcgagaaagaacgtaaatttaatcctgatttagcaccagggacagaaaaagtaacaagagaaggacaaaaaggtgagaagacaataacgacgccaacactaaaaaatccattaactggagaaattattagtaaaggtgaatcgaaagaagaaatcacaaaagatccagttaatgaattaacagaattcggtggcgagaaaataccgcaaggtcataaagatatctttgatccaaacttaccaacagatcaaacggaaaaagtaccaggtaaaccaggaatcaagaatccagacacaggaaaagtgatcgaagagccagtggatgatgtgattaaacacggaccaaaaacgggtacaccagaaacaaaaacagtagagataccgtttgaaacaaaacgtgagtttaatccaaaattacaacctggtgaagagcgagtgaaacaagaaggacaaccaggaagtaagacaatcacaacaccaatcacagtgaacccattaacaggtgaaaaagttggcgagggtcaaccaacagaagagatcacaaaacaaccagtagataagattgtagagttcggtggagagaaaccaaaagatccaaaaggacctgaaaacccagagaagccgagcagaccaactcatccaagtggcccagtaaatcctaacaatccaggattatcgaaagacagagcaaaaccaaatggcccagttcattcaatggataaaaatgataaagttaaaaaatctaaaattgctaaagaatcagtagctaatcaagagaaaaaacgagcagaattaccaaaaacaggtttagaaagcacgcaaaaaggtttgatctttagtagtataattggaattgctggattaatgttattggctcgtagaagaaagaat

SEQ ID NO: 500 - DNA, 4122 bp, Staphylococcus aureus
atgcaaatgagagataagaaaggaccggtaaataaaagagtagattttctatcaaataaattgaataaatattcaataagaaaatttacagttggaacagcatctattttaattggctcactaatgtatttgggaactcaacaagaggcagaagcagctgaaaacaatattgagaatccaactacattaaaagataatgtccaatcaaaagaagtgaagattgaagaagtaacaaacaaagacactgcaccacagggtgtagaagctaaatctgaagtaacttcaaacaaagacacaatcgaacatgaaccatcagtaaaagctgaagatatatcaaaaaaggaggatacaccaaaagaagtagctgatgttgctgaagttcagccgaaatcgtcagtcactcataacgcagagacacctaaggttagaaaagctcgttctgttgatgaaggctcttttgatattacaagagattctaaaaatgtagttgaatctaccccaattacaattcaaggtaaagaacattttgaaggttacggaagtgttgatatacaaagcaatccagaggatctaaaggtatctgaagtcactcgtttcaataataaaagtattggaaaaaacgaattgacaggagcattacaattaaagaataaagtttcttttaaaaatgactttgagtttaacattagagtagctaataatcatcaatcggtaacaactggcgctgatggatgggggttcttatttagtaaaggtgacggtaacgaatatttacaaaagggaggtatattaggtcccaaaggaatggaaaattcagcaggatttaaaattgatacagggtataattttaaagatcccatggataaagaagagaaacaggcaggacaaggatttaaagggtatggtacgtttgtaaaaacaggtgctgatggaactacagcaaaggttggaacaaacataccaacaagaggtaaagcggataattcattccaatatgcagataattctattgatacaacagatggaaaattccatggtcaattacttaataatttaaaattagcgtacaatgaaaaatcggggataatgagagccgaatatgctggtaaaatttgggaagctaatatatcagatttgggattggataaatctgaagcatataactttttaattacttctagtcaaagacagggaacatctcaaggtgtatatgcaaatggttggatgagaacagatttaaataactcaacatttaaactaacgcctaatctagttaataaaacagaaacaaaaacagtagagataccgttcgagacaaaacgtgaatttaatccgaagttacaacctggtgaagagcgagtgaaacaagaaggacaaccaggaagtaagacaatcacaacaccaatcacagtgaacccattaacgggtgaaaaagttggcgaaggtcaaccaacagaagagatcacaaaacaaccagtagataagattgtagaattcggtggcgagaaaataccgcaaggtcataaagatatctttgatccaaacttaccaacagatcaaacggaaaaagtaccaggtaaaccaggaatcaagaatccagacacaggaaaagtgatcgaagagccagtggatgatgtgattaaacacggaccaaaaacgggtacaccagaaacaaaaacagtagagataccgtttgaaacaaaacgtgaatttaatccgaagttacaacctggtgaagagcgagtgaaacaagaaggacaaccaggaagtaagacaatcacaacaccaatcacagtgaacccattaacgggtgaaaaagttggcgagggtcaaccaacagaagagatcacaaaacaaccagtagataagattgtagagttcggtggcgagaaaataccgcaaggtcataaagatatctttgatccaaacttaccaacagatcaaacggaaaaagtaccaggtaaaccaggaatcaagaatccagacacaggaaaagtgatcgaagagccagtggatgatgtgattaaacacggaccaaaaacaggcacaccagaaacaaaaacagtagagataccgtttgaaacaaaacgtgaatttaatccgaagttacaacctggtgaagagcgagtgaaacaagagggacaaccaggaagtaagacaatcacaacaccaatcacagtgaacccattaacaggtgaaaaagttggtgagggtcaaccaacagaagagatcacaaaacaaccaatagataagattgtagagtttggtggcgagaaaataccgcaaggtcataaagatatctttgatccaaacttaccaacagatcaaacggaaaaagtaccaggtaaaccaggaatcaagaatccagacacaggaaaagtgatcgaagagccagtggatgatgtgattaaacacggaccaaaaacgggtacaccagaaacaaaaacagtagagataccgtttgaaacaaaacgtgaatttaatccgaagttacaacctggtgaagagcgagtgaaacaagaaggacaaccaggaagtaagacaatcacaacaccaatcacagtgaacccattaacgggtgaaaaagttggcgagggtcaaccaacagaagagatcacaaaacaaccagtagataagattgtagagttcggtggcgagaaaataccgcaaggtcataaagatatctttgatccaaacttaccaacagatcaaacggaaaaagtaccaggtaaaccaggaatcaagaatccagacacaggaaaagtgatcgaagagccagtggatgatgtgattaaacacggaccaaaaacaggcacaccagaaacaaaaacagtagagataccgtttgaaacaaaacgtgaatttaatccgaagttacaacctggtgaagagcgagtgaaacaagagggacaaccaggaagtaagacaatcacaacaccaatcacagtgaacccattaacaggtgaaaaagttggtgagggtcaaccaacagaagagatcacaaaacaaccaatagataagattgtagagtttggtggcgagaaaataccgcaaggtcataaagatatctttgatccaaacttaccaacagatcaaacggaaaaagtaccaggtaaaccaggaatcaagaatccagacacaggaaaagtgatcgaagagccagtggatgatgtgattaaacacggaccaaaaacgggtacaccagaaacaaaaacagtagagataccgtttgaaacaaaacgtgaatttaatccgaagttacaacctggtgaagagcgagtgaaacaagaaggacaaccgggaagtaagacaatcacaacaccaatcacagtgaacccattaacaggtgaaaaagttggcgagggtcaaccaacagaagagattacaaaacaaccagtagataagattgtagagttcggtggcgagaaaataacgcaaggtcataaagatatcttcgatccaaacttaccaacagatcaaacggaaaaagtaccaggtaaaccaggaattaagaatccagacacaggaaaagtgatcgaagagccagtggatgatgtgattaaacacggaccaaaaacgggtacaccagaaacaaaaacagtagagataccgtttgaaacaaaacgtgaatttaatccgaagttacaacctggtgaagagcgagtgaaacaagaaggacaaccaggaagtaagacaatcacaacaccaatcacagtgaacccattaacgggtgaaaaagttggcgagggtcaaccaacagaagagattacaaaacaaccagtagataagattgtagagtttggtggcgagaaaccaaaagatccaaaaggacctgaaaacccagagaagccgagcagaccaactcatccaagtggcccagtaaatcctgacaatccaggattatcgaaagacagagcaaaaccaaatgaaccagttcattcaatggataaaaatgataaagttaaaaaatctaaaattgctaaaaaatcagtagctaatcaagagaaaaaacgagcagaattaccaaaaacaggtgcagaaagcacacaaaaaggattgatctttagtagtataattggaattgctggattaatgttattggcacgtagaagaaaaaattaa

SEQ ID NO: 501 - DNA, 360 bp, Staphylococcus aureus
ttgatgaatgatttgaaaagcaagagcaatattaaattaatgaaaagagtattaactacatatgagctgcgtaaatatttaaaaaaatatttttgtcttacattagataattatttagtattagcatatttagatgtatttaaaaatgatgaaggtaaatattttatgagagacattataagttatatcggtatagaccaatctagaattgttaaaagcgtaaaagawttatcaaaaaagggttacttgaataaatgtagagacccacatgatagtagaaatgtaatcattgttgtttctgtaaaacaacacaattatattaaaaatcttttgagtgaaataaatattaatgaaacataa

SEQ ID NO: 502 - DNA, 627 bp, Staphylococcus aureus
atggaaattgccctcgcaactgayaatccttatgaggtgcttgagcaagctaaaaatatgaatgacataggctgttactttttagatattcaactttcaactgatattaatggtatcaaattaggcagtgaaattcgtaagcatgayccagttggtaacattatwttygttacragtcacagtgaacttacstatttaacatttgtctacaaagttgcagcgatggattttatttttaaagatgatccagcwgaattaagaactcgaattatagaytgtttagaaactgcacatacacgcttacaattrttrtcwaaagataatagcgttgaaacgattgarttaaaacgtggcagtaattcagtgtatgttcaatatgatgatattatgttttttgaatcatcaacaaaatctcacagactcattgcccatttagataaccgtcaaattgaattttatggtaatttaaaagaactgagtcaattagatgatcgtttcttyagatgtcataatagctttgtcgtcaatcgycataatatygaatctatwgattcgaaagagcgwattgtytattttaaaaataaagaacactgctatgcatcggtgagaaacgttaaaaaaawataa

SEQ ID NO: 503 - DNA, 867 bp, Staphylococcus aureus
ttgaaaaaaataaaaaaggcaatcattcccgctgctggtttagggactagatttttaccagcaactaaagcgatgccaaaggaaatgcttcctatcttagataaaccsacaatacaatatatcrttgaagaagctgcaagagctggaattgaagatattattatagtgacaggtcgccacaaacgcgcgattgaagatcattttgatagtcaaaaagaattagaaatggtgttaaaagaaaaaggtaaatctgarttactagaraaagttcartaytcracrgaacttgcgaatattttttatgtaagrcagaaagaacaaaaaggtttagggcatgcgattagttctgcgcgtcaatttatcggcaatgaaccatttgcggtattattaggtgacgatattgttgaatctgaagtgccagcagtgaaacagttgattgacgtttatgaagaaacrgggcactcagttataggtgtycaagaagttccggaagcagatactcatcgttatggrattattgayccattaactaaaaayggacgtcagtatgaagtgaaaaagtttgttgaaaagccagcacaaggtacggcaccatcaaacctagctattatgggvcgwtatgtattaacgcctgaaattttcgattatttaaaaacgcaaaaagaaggcgcaggtaacgaaattcagttaacagatgcgattgarcgtatgaayaatgataaycaagtgtatgcatatgacttcgaaggcgaacgttatgacgttggagaaaaattaggmttygtyaaaacwacvatagaatatgcrttgaaagatgacagtatgcgagaagaattaacacgatttattaaagmattaggkttataa

SEQ ID NO: 504 - DNA, 105 bp, Staphylococcus aureus
atgcactgtatagctggctttttaattttattaacaaaattaaatatgacgcgtgaattaaaaaatgatgtaacgtctctttgtatacctattcctattactaca

SEQ ID NO: 505 - DNA, 1929 bp, Staphylococcus aureus
atgatacttttacaactcaatcatatatcaaaatcgttcgatggtgaagatatatttamtgatgttgattttgaagtaaaaactggtgaacgaattggtatcgtaggaagaaatggcgccggtaaatcaacattgatgaaaattatarctggygtagaaaactatgattctggaaatktgtcaaaaattaaaaacttaaaactaggttatttaactcaacaaatgactttaaattctaatgcaacagttttygaagaaatgtcaaaaccatttgaacatattaaacgaatggaaagcttaatcaaagaagaaacagattggttatcaaaacatgcaaatgattacgatagtgatacatataaaacacatatgtcccgttatgaatctttatcgaatcaatttgaacaattagaaggrtatcaatatgaaagtaaaattaaaacagtacttyacgggttraattttagtgaagaagatttcaataaacctatcaatgattttagcggyggccaaaaaacacgtttatctttagctcaaatgctattaaaygaacctgatttattacttttagatgaacctactaaccacttagatttagaaacgacaaagtggcttgaagattatctacgttattttaaaggtgcaatmgtcatcatcagccatgatcgttactttttagataaaatagttactcaaatttatgatgtggctttaggtgatgtcaaacgctatgttggtaattacgaggaatttatacagcaacgrgatttatattatcaaaaacgaatgcaagaatatgaaagtcaacaagcagaaataaaacgattagaaacttttgttgagaaaaatattacccgtgcttcaacaagyggaatggcaaaaagtagacgtaagattttagaaaaaatggaacgcattgataaaccaatgttagatgccaaaagtgcaaatattcaatttggctttgaccggaatacaggtaatgacgtcatgcatgtaaaaaatttagaaatcggttatcaaactgcaattaccaaacctatsagtatagaggtctctaaaggcgatcatatagcaatcattgggccaaatggtattggaaaatcgaccttaattaaaactattgcwaatcaacaaaaagcgcttaatggcgatattactttyggcgcaaatttacaaattggttattatgatcaaaarcaagcagaatttaaatctagtaaaacrattttagattatgtgtgggatcaatatccgttaatgaatgaaaaagatattcgwgcagttcttggwcgtttcttatttgtacaagacgatgttaaaaagataattaatgatttatctggtggtgaaaaagcacgtttacwactagcactacttatgttgcaacgtgacaatgtacttattttagatgaacctaccaaccacctcgatatagattcaaaagaaatgttagagcawgcactccaacattttgaaggaacaatactatttgtttcccatgatcgttactttattaaccaattagcaaacaaggtatttgatttaacaattgatggcggaaagatgtatttaggagattatcaatattacattgaaaaagttgaggaagcsgaagcgttgaaagcgcaccaagaagaacagtcagttaacgtacaagcacatraaaagtcyatggaacaatcgtcgtatcataaccaaaaagaacaaagacgtgaacaacgcaaacttgaacgacaaatatccgagtgtgaaaatgaaatagaaactttagagactactatcttacaaatagacgagcaattaacccaaccagaagtktataacaatccacaaaaagcaaacgaattagctatccaaaaacaagatagcgaacaaaaattagaacacgctatgtctaaatgggaagaattacaacaaaaactataa

SEQ ID NO: 506 - DNA, 1611 bp, Staphylococcus aureus
atgagcacaaatcaaacatttttaatatttgttatagcaattattmtacttacatckgtaataggaattgttggacgatacatgagtcgtcaacgtctattaaaatctatggaaacattayggcaaacgatttctccattagarkcttttatcagaccgaactcacatttcgactatgagtataagctctacaaggawaaatktgaatcacattcwttagttgatgataaaacttggtccgayttaaatatgaatgcaatytttcataagatgaattataatttaacagctattggygaaatgaarctatatgcctgtttacgtggaatgctttcaattacgaacaaatcattacttagtttatttaatgataatgctgaatttagaaaaaacgtaacatatcatttagctttgattggtaaaactgtttatccaacatttccagaccaaatyacacckgtaaaacgtcawaatatattgtttctatgcccgtttttaccagttatctcatttgcagttatatttattaattcacaagttggtattttattatttcttatgagttgcctatttaatatcattttatcwgcaactttaaagcgtacatatgaggatgacttaaartctatmttttatgcatccaatgttttaaaacaaggctatactatctcaaaaattaaacatgctccacaaccygaagtcaattttaagcaatttagaacagcacgtcatttaacgagtgttttagctgaagttaatgatgaagatatcggagctatggtaattaaactagttaaacttattttcatgcttgattatgttttattycattcaattcaaaaaagctatacaacacatatraatgagctwaaaaattgtttcgattacatagctgaattagataatcattatgcattagcaatgtatcgtagaacgctagaatgytatacygaaccacaaattgatgatwcaaatgatggcatagtattctcygagttaacacatccactcatagcagatgcagtagccaatgatttctcactwtcacaaaatatactgttaactggrtctaatgcttcgggtaaatcaacatttatgaaatccatagcaataaacatyattcttgcatcggctatacaaacagttaccgcaagcaaatttgtatatcaacctggaattgtgttcacgtcaatggcaaatgccgatgatgtgttatcaggcgatagttattttatggctgaattaaaatctattaagcgtattgttgaaattccwgataatcaaaaaatatactgctttatmgatgaaatttttaaaggtaccaacacaactgaacgaattgccgcttcagaatcagtactatcatttttacatgaaaaatctaactttagagttattgcagcaacacatgatattgagttrgctgaactcttaaaacaacgttatgaaaattaycatttcaatgaggtaatagaaaataataacatacattttgattacaaaattaagcctggcaaagcaaatacwcgtaatgccatcgaattattaaaaatcacttcatttccagcaaaaatatatgaacgagcaaaagataatgtyycsaawrkttag

SEQ ID NO: 507 - DNA, 1689 bp, Staphylococcus aureus
atgcgaagcgacatgatcaaaaaaggagatcaccaagcaccagcaagaagtcttttacatgccacgggcgcgctwaaaagtccaactgatatgaacaaaccatttgtagctatttgtaactcttatattgatatygttccwggacatgttcayttragagagcttgcagatatagctaaagaagcaattagagaagccggtgccattccatttgaattcaatacaattggtgttgatgatggaatagctatgggacatatcggaatgcgatattctctaccatcacgtgaaattattgcagatgcagctgaaactgtaattaacgctcattggtttgacggcgtattttacattcctaattgtgacaagattacacccggtatgattttagcagccatgaggacaaacgtaccagctatcttttgctctggtggaccaatgaaagctggcttatctgcacatggwaaagcattaacactttcatcaatgtttgaagcagtcggcgcwtttaaagaaggatcgatttctaaagaagaatttttagatatggaacaaaatgcctgccctacttgtggttcatgtgctgggatgtttactgcaaattcaatgaactgtttgatggaagttttaggtctagcattaccatacaacggtactgcacttgcagtcagtgatcagcgacgmgaaatgattcgccaagcagcttttaaattagttgaaaatattaaaaatgatttaaaaccacgtgatatcgttactcgcgaagcaattgatgatgcatttgcacttgatatggctatgggtggttcaacaaacacggtactgcatacgttagccattgccaatgaagctggtattgattatgacttagagcgcattaatgctattgccaaacgcacgccatatttatcaaaaatagcacctagttcatcgtattcaatgcatgatgtgcatgaagctggtggmgtcccagcaattattaatgaattgatgaagaaagatggcacgttacacccagatagaatcacagttactggcaaaacgttacgtgaaaataacgaaggcaaagaaattaagaactttgatgtcattcacyctcttgatgcaccatatgatgcacaaggcggtttatctatcttatttggtaatatcgcccctaaaggcgcagttattaaagttggcggcgttgatccatctatcaaaacatttactrrgaaagcaatttgtttcaattcgcatgatgaagctgttgaagcaatagacaatcgtaccgttcgtgcaggccacgtcgttgtcattagatatgaaggacctaaaggtggaccaggtatgcctgaaatgttagcacctacttcctctattgttggtcgyggcttaggtaaagatgttgcattaattactgatggkcgtttttccggtgccacaagaggtattgcagttggtcatatttcccctgaagctgcatctggtggaccaattgccttaattgaagatggwgatgagattactattgatttaacaaatcgtacattaaasgtaaaccagcctgaagatgttctrgcgcgtcgccgagaatctttaacaccrtttaaagcgaaagtaaaaacaggttatctagctcgttatactgccctagtaactagcgcaaatacaggtggcgtcatgcaagtccctgagaatttaatttaa

SEQ ID NO: 508 - DNA, 210 bp, Staphylococcus aureus
ttgatgaataataaagtaagcaattacagaaggtatattggtttaacacaaaatcaaatggctaataatttaaaaatttcagttactgcttatagaaataaagaaagaggaataacaccatttaaagattcagagaaggtgtttataaaaaataaattaatagaaaatggtatcaaagacattactattgatgatattttttttaattaa

SEQ ID NO: 509 - DNA, 228 bp, Staphylococcus aureus
atgacaaaactaacttatccaatgttatacattactagaaaagaaaaaggtgacacgcaaaagaaagttgctagcaaacttggtattagtccacaacgctaccagttaaaggaaagtggtaaagcaatatttaatttaaatgagtgtcagattctttcagaaatgtatgacatgccaattgatgagttattttcatcaaaaattaaagtagaggggtcaaggcaatga

SEQ ID NO: 510 - DNA, 210 bp, Staphylococcus aureus
atgaataatgaacaaaaagaagtaatagaacacgtggtttatcaacttgagttaagtatcatgaataattttgaaagttatgaacacacggaatatgttgatggtattgaagtggtttcagagatcagtcctgaaaagcacttagaattgataatgaaatggtgcgcacaagaattaaagaataattttcaattagaaaaaggagaataa

SEQ ID NO: 511 - DNA, 645 bp, Staphylococcus aureus
atgamagtatttgtaatgcaattacagagtaacttgaaaagtattgaagaattaatatcacaaagtcgttggtcatataaaaaaccgcgtacagtcaactatagatacaatcaagataaactcatgcacagattgggagatattttagtgcaatatggaattcaacatgacacaggkttattaccacatgaatggcattatcacatttcgccacgaggtaaggcagatatwgttcaacacaatcgtgatggacagcccatctatgtgagcttatcatatagttatccttatatcgtgtgtgttgtcgataaagaaccagttggtatwgatatcgaaaagatatcacaacgtttagactggcgtacrttagtgacgtgtttctctacaaacgaagcacatcaaatatgtagtttaaatgatttttatcaaatatggacacaaaaagaaagttttacaaaattgattggtgaaggtttaatcaaaggattggacatttatgatatgacrcaatcacacttttatcaatcacgtgaagtgaagttcaaacaatttatttttgatcagtttatggtacaggtatgtttcttaggasaggcaccctggggktataaaaaagtgtctgtatttcagttattgagtagttaa

SEQ ID NO: 512 - DNA, 1104 bp, Staphylococcus aureus
atgaaggatacacagttagcccaaatcacattaacygatgattcaaccggtgctatagcgaatccaatccatttatctactgcctacaarcatccaaaactaggacaatcgacaggwtttgattatacacgtactaaaaatcctacacgctcaacatttgaaacctgttttgccaaactygarcatggtattgcatcattcgctacatcaagtggaatgtcagccattcaattaatatgtaatytatttaaaccwcaygatgaaattttagtttcattcgatttatayggyggcacatttagattatttgaattttaygagcaacaatacratatcaaatttaagtacgttgattttacagattatgaacaagttgaaaaagaaatcactgataaaacagtwgcattattcattgaaccaatatcyaayccacaaatgattgctattgatgtaaagccrtactatcaactttgtaaagctaaaggcttattgtcaattatcgacaatacttttttaacaccttatctttcaacaccaytagcagaaggtgctgatatagtcttacattcagcyacgaaatatattggyggacataacgatgtactagcaggtgtcgtaaccgtcaaagatgaatcactcgcgcaamagttgtttgattttcacaacatgactggcgcaacactwtcaccaatagatagttatttgttgttacgtggacttaaaactttgcatttacgcattgagcgtgcgcaatcaaacgcwagaaaacttgctraaaaatgtcagtcacttcaagcaattgacgaagtactatatagcgggcaaactggcatgcttagtttaagacttaacaaggcctatagcgtcgctaaattattagaaaatttagacatttgyatttttgcagaaagtttaggaggtactgaaacattagtgaccttcccttacacccaaacacatgttgatatgccagatgctgaaaaagataaacgtggcattgatgagtatttaatccgcttatcactaggtgttgaaaattatgaagacatcgaacgcgatatcatccaagcattagataaagctcagattggagagattgtatga

SEQ ID NO: 513 - DNA, 1770 bp, Staphylococcus aureus
atgtctaaaactcaacatgaagtaaaccaaaatattgaccctttaaaaatggctgaatcacttgaacytgaacaactaaatgaaaaaactttaaatgayatgcgttcaggatcagaagtgctagtagaagctctacttaaagaaaatgtggattatttattcggttatcctggtggtgccgtactacctttataygacacrttttatgatggtaaaatcaaacatattttagcaagacacgaacaaggtgctgttcatgctgcagaaggttatgcacgtgtatctggtaaaacwggcgtcgttgtagttacaagcggtccaggtgcaactaatgtaatgacaggtattacggatgcacattgcgactctttaccwctagttgtattcactggacaagttgctacaccaggcattggtaaagatgcattccaagaagcggatattctatctatgacttcaccaattacaaaacaaaattatcaagtgaaacgtgttgaagatatccctaaaatcgtacacgaagctttccatgtagctaattctggacgcaaaggtcctgtagtgattgattttccaaaagatatgggtgttttagctacaaatgtggatttatgcgacgaaatcaatattccaggttatgaagttgttacagaaccagaaaataaagacattgacactttcatctcacttttaaaagaagcgaaaaagcctgtcgtattagccggcgcaggtattaatcaatcaaaatcaaatcaattattaacacagtttgttaataaacatcaaatcccaacagttactactttactaggtctaggtgctgtaccttatgaggatacactatttttaggtatgggaggwatgcatggttcttatgctagtaacatggcattaactgagtgtgatttactcattaatttaggtagccgcttcgatgatagattagcaagcaaacctgatgcctttgcacctaacgccaaaattgtacatgtagatattgatccttcagaaatcaataaagttattcatgtagatttaggtattattgcagactgtaaaagatttttagaatgtttaaatgataaaaatgttragactatagaacacagtgactgggttaaacattgtcaaaataataagcagaaacayccatttaaacttggtgaagaagatcaagtattttgtaagccacaacaaacaatcgaatatatcggcaaaattacaaatggtgaagcaattgttactacagacgtgggacaacatcaaatgtgggcagctcaattttatccatttaaaaatcacggacaatgggttacaagcggtggtttaggaacaatgggattcggtattccttcgtcaattggtgccaaattagctaatcctgataaaacagtcgtatgyttcgtcggtgacggtggtttccaaatgacaaaccaagaaatggcactwttacccgaatatggtttagatgtcaaaatcgtactaatcaataatggaacattaggtatggttaaacaatggcaagataagttctttaatcaacgcttctcacactcagtatttaatggtcaacctgattttatgaaaatggcagaagcatatggcgtcaaaggtttcttaatcgataagccagaacaactggaagaacaattagatrcagcgtttgcttatcaaggrccagytttaattgaggttcgtatttcccctactgaagctgtaamcccaatggttccragtggcaaatcaaatcatgaaatggagggcttataa

SEQ ID NO: 514 - DNA, 255 bp, Staphylococcus aureus
atgacaagaattcttaaattacaagttgcggatcaagtcagcacgctaaatcgaattacaagtgcttttgttcgcctacaatataatatcgatacattacatgttacacaytctgaacaacctgggatttctaacatggaaattcaagtcgatattcaagatgatacatcacttcatatwttaattaaaaaattaaaacaacaaattaatgttttaacggttgaatgctacgaccttgttgataacgaagcttaa

SEQ ID NO: 515 - DNA, 1359 bp, Staphylococcus aureus
atgtttaacgaaatatggccgttaatcagtgttgttttaggtatmrttattttattagtattaatyattgggtttaaattaaatacatttatttcattaattatcacatcgatgattacagcgttaatgctaggtataccattgactaaaattatggagacgattgagaaaggratgggcagtacgctcggccacattgcactratattcggtttaggtgccatacttgggaaattrcttgctgatggtggtggtgcaactcgaatygcagacacgttgattcaaaaatttggtcaaaaacatgtacaatgggcaatgcttgttgcagcatttatcgtcggkattgcattgttctttgaagtaggtttagtcttactgattccattagtatttacagtagcaaaacgcgcaaatgtttcagtgttaaaactaggaytacctatggtaacagctttatcwgtgacacatggctttttaccaccacatccaggaccggtagtcatcgcaaaagaattaaaggcraatgtwggagatgtattactrtayggtatgattattgccattccagttacactcattgcaggrcctatatttaacaaagttgcacaaaaaatgattccgtctgcgtatacacgagaaggcgatatttcagcgttaggtgcacaaaaagaatttacggatcaagagatgccaggatttggtatgagtttattaacwgcaacattaccagtcatattaatgttagtgtctacgataacgcaacttgtaacygggcaygacaaacctacaaatctatttgaatctatcatttatatgatmggaacagcagggacagccatgctaatagcagtattatttgcaatcgttacgatgggattaatgagaaarcgtaagatgaatcatattatggaatcagtgacgaatgcgatttatccaatcggaatgatgttattgattattggcggtggcggtacatttaaacaagtattaattgacggyggtgtcggaaatacaattgctaaaatgtttgaaggtacagagatgtctccrattttactagcwtggattgttgcagctgtgctacgtatcgcattaggttcggctacagtagctgcgatttcaactacaggtattgtcttaccattattacaatcatcagatgtaaatgttgcattagttgtactwgcgatwggtgcaggtagtgtgattttgtctcatgtwaatgacgcaggattytggatgtttaaagaatattttggtttaactgtaaaagaaacattcytaacatggtcattattagaaacgattatttccgtttcaggtatcatcttcattytattcatyagcttatttgtttaa

SEQ ID NO: 516 - DNA, 195 bp, Staphylococcus aureus
gtggctaaaaaagtgaagctaagcaaccaacaagcgcatagatttatgaaagttagtgaagagtacgaaggttcaaatttaacgacgtcgttaaatttagggttaaatgttttgtatcaaatcgcaactcttcctgagccagaacgcagcaaagaacacataacatcaaatggtgaaactaaaattccatactaa

SEQ ID NO: 517 - DNA, 1005 bp, Staphylococcus aureus
atgacaacagtttattatgatcaagaygtaaaaacggacgctttacaaggcaaaaaaattgcagtagtaggttatggatcacaaggycacgcgcatgcacaaaacttaaaagacaatggatatgatgtagtcatcggyattcgcccaggtcgytcttttgacaargctaaagaagatggatttgatgtgttccctgttgcagaagcagttaagcaagctgatgtaattatggtgctattacctgatgaaattcaaggtgatgtatacaaaaacgaaattgaaccaaatttagaaaaacataatgcgcttgcatttgctcatggctttaacattcattttggtgttattcaaccaccagctgatgttgatgtatttttagtagctcctaaaggaccgggtcatttagttagacgtacatttgttgaaggttctgctgtaccatcactatttggtattcaacaagrcgcttcaggtcaagcacgtaatattgctttaagttaygcaaaaggtattggtgcaactcgtgcaggtgttattgaaacaacatttaaagaagaaactgagacagatttatttggtgaacaagcagtactttgcggtggtgtatcgaaattaattcaaagtggctttgaaacattagtagaagcrggttatcaaccagaattagcttattttgaagtattacatgaaatgaaattaatcgttgatttgatgtatgaaggcggtayggaaaatgtacgttactcaatttcaaatactgctgaatttggtgactatgtttcaggaccacgtgttatcacaccagatgttaaagaaaatatgaaagctgtattaactgatatccaaaatggtaacttcagtaatcgctttatcgaagacaataaaaatggattcaaagaattttataaattacgcgaagaacaacatggtcatcaaattgaaaaagttggtcgtgaattacgcgaaatgatgccttttatwaaatctaaaagcattgaaaaataa

SEQ ID NO: 518 - DNA, 1554 bp, Staphylococcus aureus
atgaaatatatgattggtgtcgacattggaacgacgagtaccaagtcagtcttatatgatgaaaatggarcwttyatcatgaaacatcaaatmggctatgatttacacacaccaaacgttgatgtctcagaagaaaacccagatgaattatttgatgcrgtaytaatgacwattaaatayrtwatgagrgaatcsaaagttaatmaagaygayattaartttgtgtcatttagtgcgcaaatgcatagcttgattgcgatggatcagmaacatcaaagattaacaaataatattacttgggcagataaccgcgctgcaaaatatgcaacagtaataaatgaagtgcatgatggcaatgcgatttaycagcgaacaggyacrcckattcatcctatgtcgccwttagygaarattttttggatgaaacatgaatggcaagatgtatttcaacgwactgctaagtttgcagatattaaaacatacattttctatcatttatttgatasatatatcattgattattcaatggcttccgcaacagggatgtttaatttagaaacattagattgggatgttgrggcattagaaytgctkggtatttccraggaaatgttsccggaattagtkccaacaacgtaygtratgaaaggyatgaaagaacgttatgcaacattaatggggcttaatraagatacaccgtttgttattggtgcgagtgatggggtcctttctaatttrggtgtcaatagygttggtaaaggagaagttgctgtcacaatcggtacatctggsgcgattcgtactgtgatagataaaccrcgtactgattacaaaggtagaatattttgttatgtcttaacagaggaccactacgtcatyggaggycctgtaaataatggtggtgtcgtattgagatggttgcgcgaygagttgytagcragygaagtcgaaactgcgaaacgtctcggtgttgatccttatgatgtyttaactcaaattgcaaagcgtgttaaaccaggtgcagatggtttaatattccatccctatttagcwggagaacgtgcrccgctttggaacgcaaatgcaagaggttcattcttcggtttaactttatctcataaaaaagaacatatgattcgcgctgcattagaaggtgttctttacaatttgtataccgtctaycttgcrctyattgaagtaatgaatgaaacrcctaakatgataaaagcaacaggtggttttgcgaaaagtgaagtatggcgtcaaatgatgtcagatatatttgacacagagttagtggttcctgaaagytatgaaagttcatgcttaggtgcctgcgtrctyggrcttaaagctgtaggtgacattgaagatttttcaatcgtttcatcgatggtcggtgcyacaaayaatcataygccgwttgaagaaaatgtcrctgtttaycaagagmtcgtatccatttttatcaatttaagtcgttctttaacagagaattatgaacaaattgcagattttcaacgcmaacatatsgctgaaaataaaacacaataa

SEQ ID NO: 519 - DNA, 1530 bp, Staphylococcus aureus
atgagtagtcatattcaaatttttgatacgacactaagagacggtgaacaaacaccaggagtgaattttacttttgatgaacgcttgcgtattgcattgcaattagaaaaatggggtgtagatgttattgaagctggatttcctgcttcaagtacaggtagctttaaatctgttcaagcaattgcacaaacattaacaacaacggctgtatgtggtttagctagatgtaaaaaatctgacatcgatgctgtatatgaagcaacaaaagatgcagcgaagccggtcgtgcatgtttttatagcaacatcacctattcatcttgaacataaacttaaaatgtctcaagaagacgttttagcatctattaaagaacatgtcacatacgcgaaacaattatttgaygttgttcaattttcacctgaagatgcaacgcgtactgaattaccattcttagtgaaatgtgtacaaactgcmgttgacgctggagctacagttattaatattcctgatacagtcggctacagttaccatgatgaatatgcacatattttcaaaaccttaacagaatctgtaacatcttcaaatgaaattatttatagtgctcattgccatgacgatttaggaatggctgtttcaaatagtttagctgcrattgaaggcggtgcgagacgaattgaaggcactgtaaatggtattggtgaacgagcaggtaatgcagcacttgaagaagtcgcgcttgcactatacrttcgaaatgatcattatggtgctcaaactgcycttaatctcgaagaaactaaaaaaacatcggatttaatttcaagatatgcaggtattcgagtgcctagaaataaagcaattgttggccaaaatgcatttagtcatgaatcaggtattcaccaagatggcgtattaaaacatcgtgaaacatatgaaattatgacacctcaacttgttggtgtaagcacgactgaacttccattaggaaaattatctggtaaacacgccttctcaragaagttaaaagcattaggttatrrcattgataaagaagcgcaaatagatttatttaaacaattcaagrccattgcggacaaaaagaaatctgtttcagatagagatattcatgcgattattcaaggttctgagcatgagcatcaagcactttataaattggaaacactrcaactacaatatgtctctagcggccttcaaagtgctgttgttgttrttaaagataaagagggtcatatttaccaggattcaagtattggtactggytcaatcgtagcaatttacaatgcagttgatcgtattttccaraaagaaacagaattaattgattatcgtattaattctgtcactgaaggtactgatgcccaagcagaagtacatgtaaatttattgattgaaggtaagactgtcaatggctttggtattgatcatgatattttacaagcctcwtgtaargcatacgtagaagcacatgctaaatttgcagctgaaaatgttgaraaggtaggtaattaa

SEQ ID NO: 520 - DNA, 681 bp, Staphylococcus aureus
atgatgtatggatatccagagaaatggttggaaggtatgacaactggagaaggtatcgcrgcagaattacgcttaggyattgtgaatggtcacatagctgaaggtacgttactcactgaaaatcaaatggcaaagcaatttaatgtgagtcgttcgccaattcgagatgcatttaaattattgcaacaaaatcaactcatccaattagaaagaatgggtgcacatgtgttgccgtttggggaacaagaaaagaaagaaatgtaygatttgcgactgatgytagagtcwtttgcattttcaagagttaaaaatcaagagmgactacctatcgtaaaagaaatgaagaaacaacttgaaatgatgaaagtggcagtaaaatttgargatgcagaatcatttacgaagcatgactttgaatttcatgaaacattaatcaaagcatctaaycaycaatatttaaactcattttggagtcatttaaaaccagtaatgatggcrctcgttttaacatccatgcgacaacgtatgcaacaraacccgcaagattttgaacgcatacatcataatcatcaagtgtttattgatgcagtggaacaatacgacagtcaaattttgaargaagcgtttcayttaaatttygacgatgttggtaaagatattgaaggattttggttgaattaa

SEQ ID NO: 521 - DNA, 1047 bp, Staphylococcus aureus
atgacttataacattgttgccctacctggtgatggaatcggtccagaaattttgaacggatctctatcattgcttgaaattataagtaataaatataaytttaattatcaaatagagcaccacgaatttggtggtgcctctattgatacattcggcgarcctttaactgagaaaaccttaaatgcgtgtaaaagagcagatgctattttactgggtgcaatcggtggacctaaatggacagatcctaacaatcgaccagaacaaggattattaaaattrcgtaaatcmttaaatttatttgyaaatatwcgycccactaccgttgtcaaaggcgctagttctttatcacctttaaaggmagaacgcgttgaaggcacagatttagttatagtccgtgaattgacaagtggtatttattttggagaacctagayattttaataatcacgaggccttagattctcttacttatacaagagaagaaatagaacgcattgttcacgtagcatttaaattggccgcttcaagacgaggaaaactaacatcagttgataaagaaaatgtattagcttctagtaaattgtggcgcaaagtcgtaaatgaagtragtcaattatatccagaagtaacagtraatcacttayttgttgatgcttgtagtatgcatttaatcacaaatccaaaacaatttgacgtcatcgtwtrygaaaacttatttggcgatattttaagtgatgaagcttcagtgattcctggttcacttggtttatcaccttctgctagttttagtaacgatggtccaagattgtatgagcctattcatggatcagcaccagatattgcaggtaaaaacgttgccaatccatttggaatgattctatctttagcgatgtgtttacgtgaaagcttaaatcaaccagatgctgcagatgaattagaacaacatatttatarcatgatwgaacatgggcaaacgacagcagatttaggcggcaaaytgaatactactgatattttcgaaattctatctcaaaaattgaatcactaa

SEQ ID NO: 522 - DNA, 765 bp, Staphylococcus aureus
atgtctaactattcgactggagaactcgcraaattatgcaatgtgacaacrcgaacgattcaatattatgatcgcaaaggtattttgaaaccacaaggatttacagaaggaaagcgtcgtgtgtatacagaacaacagcgacaaacattagagttaatcttattrcttaaagatttaggttgtgcgttaagcgatatagatatgttgctaaaaggtgaaggtactttgaagacrctcaatacyttactaacyatgaaacaacaagaaattaaycaacaagtyaaacagcaacaagcggtattaracaaaattaaaaatgttcaatattacgtaaatraagcgtcgacgtctccaatcacacayttaaaagacatagagcatgtcatgagtaaatcagctgaaatgaaaagtattcgtcgtaacatttggattagtgckggtattataggaataattcaatattctagcattwtragtkcaatyttgatgaaaaayaaatggccgttyytaattgckttrccrtttatgawykgwtayggcattggtrttactwtytaytaycaacrmaargttgcctatttatgycctaactgccagcatatattctcaccrtctttrtggsmagttatcaaagcgaaacatacwgckacaacacgtcgattcgaatgtccraactgtcatgaaacgcattattgcattgaagtacctaaarcrcatatgrgtacagaayaattagaaatatcccacatacaacataacaattaa

SEQ ID NO: 523 - DNA, 1371 bp, Staphylococcus aureus
atgggtcaaacattatttgacaaggtgtggaacagacatgtgttatacggraaattrggcgaaccgcaactattatacattgatttacaccttatacatgaagttacttctcctcaagcatttgaaggacttaggcttcaaaacagaaaattaagacgcccagatttaacatttgcaacactcgatcacaatgttcctactattgatatwttcaatattaaagatgaaattgcaaacaaacaaatcacaacattacaaaaaaacgccatagattttggggtgcatatttttgatatgggytctgatgaacaaggtattgttcacatggtrggacctgagacaggacttacacagccyggmaaracaatcgtttgtggtgactctcacacagcaacacatggagcatttggtgctattgcatttggaattggaacaagtgaagttgaacatgttttcgcaactcaaacgctatggcaaacaaaacccaaaaacttaaaaatcgatattaatggyaccttaccaacaggcgtctatgctaaggacattattctgcatttaattaaaacgtatggtgttgaytttggtacaggctatgctttggaatttactggygaaacaattaaaaacctttcaatggayggtcgaatgactatttgtaacatggctatcgaaggtggtgccaaatacggcataatccaacctgatgatataacatttgaatatgttaaaggkmgaccatttgccgataacttcgytaaatcagttgataagtggcgtgagctatattctratgacgacgcgatatttgatcgtgtaattgaacttgatgtttcaacattagaaccacaagtgacatggggaactaatcctgaaatgggtgttaatttcagtgaaccattccctgaaatcartgatatcaacgatcaacgtgcgtatgattatatggggttagarccaggwcaaaaagctgaagayatcgacttagggtatgttttyctcggttcatgtacraatgctagactatcagatttgattgaagctagtcatattgttaaaggaaataaagttcayccaaatattacagctatygtcgtrccaggttctcgtacagtaaaaaaagaagcwgaaaaattaggtctagatactatctttaaaaatgcaggatttgaatggcgtgarccaggatgttcaatgtgtttaggcatgaatcctgaccaagtacctgagggcgtacattgtgcatctacaagtaatcgaaactttgaaggacgacaaggyaaaggtgcaagaacacatttagtatcccctgctatggcagcagcagcagctattcatggtaaatttgtggacgtaagaaaggtggttgtttaa

SEQ ID NO: 524 - DNA, 693 bp, Staphylococcus aureus
atgtatgtagatcgaaaaccatcactatatttagaggatttgcgacatgattttaaaaatagtttaagtaaatttgaaaatggtgatgaagcatttgatacgttattaggtttcgtagagttagatcatatttattcrtcagcactaaaggaaataagcacwaaactgagtattttagaygayaatttcaatcacatttataaacacaaycctatacatcatatggagcgacgtgtgaaagaaatgcgyagtttaatagaaaagcttaatcgtaaaggattacagattagygcagaaactgccaaagaacayatactggatattgcsggaattcgcgtagtatgtaattacttagatgatatttatttgattgaagagatgttgcttaaacaagaagacgtacaattgataaaacgtaaagattatattcagcaccctaaagaaaatggttaccgcagtttacatatcgttgtatcyattccagtctttttagcagaacgcgttgaggtattgcctgttgaaattcaaattagaacrataggtatggatatgtgggcaagtttagaacataaaatacgttataaaaacaakgcagagacggaaaagtatcgagatttaytgaaagaatgtgcgacagagattactgaagttgaarataaattacaacaaattcattctgaaataacagagtag

SEQ ID NO: 525 - DNA, 426 bp, Staphylococcus aureus
atgttaaacagaacagtattagtaggacgattaacaaaagacccagaattaagaagcacgccaaatggtgtaaatgtagggacattcacattagcagtaaacagaacattcacgaatgctcaaggcgagcgtgaagcagattttataaacgtagtagtgttcaaaaaacaagctgaaaacgttaaaaactacctttctaaaggatcgttggcaggtgtagacggacgactacaaacacgtaactatgaaaacaaagacgggcaacgtgtatttgttacagaagtagtagcggacagtgttcaattcttagaaccgaagaataacaaccaacaacaaaacaacaattatcaacaacaaagacaaactcaaactggtaataatccttttgataacaacgcagactctatagaggatcttcctttttag

SEQ ID NO: 526 - DNA, 552 bp, Staphylococcus aureus
atgaacgaattatggaaagatgttgtaggttacgagggcatatacgaagtaagcagtaaaggtagagttagaactcacaaaaataaagttacttggtctaaccgttatcaaaaatggaggcattggaaacagcgttatttaaaagataaaacacctaatggtcgagatgtaagagtaaccctttggaaaaatggtaaacgcaaagattttttagtccacagattagtggcattcgcctttataccaatgatagaaggtaaaatttgtattaaccatattgacgggaaccccaaaaataacaatgtagaaaatcttgaatggtgtaatcacttggaaaataataggcatgcatttgaaacaggattaatgcataccaatatggctgtaaaacttattaatcatttaggtatcgaatatgaatttataagtatgagtagagcaggaaaattcttaggcagaagtcatagttatattagcgacaaaataaaaagtaatcacaaagatgttactgatatacatggtaataaatataaatttgagaagttgatataa

SEQ ID NO: 527 - DNA, 732 bp, Staphylococcus aureus
atgactgatcaaccaagttactattcaataattacggcaaatgtcagatacgataaccgacttactgacagcgaaaagttactttttgcagaaataacgtctttaagtaacaagtacggatactgcacagcaagtaatggttactttgcaactttatacaacgttgttaaagaaactatatctcgtagaatttcaaaccttaccaagtttggttatttaaaaattgaaattatcaaagaaggtaatgaagttaaacaaaggaagatgtaccccttgacgcaatcgtcaatacctattgacgcaaaaatcaatacccctattgataattctgtcaatacccctattgacgcaaatgtcaaagagaataatacaagtattaatattacaagattaaataatacaagtattaataataatagcgcaactgacgttacgcatgagcaatttgaggaatggtggaaactttacaacaagaagaaagataagaagatgtcttttactaaattcaaatcatgcttaaagaaacattcttttgagcaaatcatgcaaggtactcgagagtatttaaaaactattacagacaagcaatatcaaaagcaccctaaaacgtttttaactaacgaaagctatatgaatgattatagcgaagagattaaagcagaagtgaataaccaatatgtcgatgcgttccagcgtgcatcgcaatccagtatagaaaatttaccgttttaa

SEQ ID NO: 528 - DNA, 786 bp, Staphylococcus aureus
gtggagtcattccagaacttagcaaagaaaccaactttaaagaaacaaatcattgaacaagcgtttgatttgaaatgtgagaactgtggacgtaagtacgactattacaaatttgatgacggttcagaattcaaacatggttgtgactgcgaaatgatagagtatgccaaacaatcaactgaaaactatcacaagagaaatagacgaagaaaagcagaacgcatattcaaacaatcgataatgaacgaagatctaacgaaagcaacgtttgataattacaatccgactaatgaacaactagtctatgcgaaaaacttatgcgaacgttacgcaaacaatttcacgttagacaataaacaatcgctactaattcaaggctcatttggtacaggtaaatcacacttatcaatgagtattgttaaatcagttaaagctaaaggctacacagtgctatatatgaatgtacctcaattgatatcaacaattaaaaacacttataacaaccaaactgctatgaccgaacaggaattggctcaaattataagcgatgtcgatttgatggtattcgatgattatggtatcaacatgaacgaattcgctactagtaagatgttcgagcttatcgaaagtagaataggcaaacacaatatctttactactaacttggacgaaaaagaaatgacaaaaaacaaagacttacaacgtatattcagcagaatcatgagtaatacaacactaatcaagatggacggtcaagattacaggactagaggtttaaaactatga

SEQ ID NO: 529 - DNA, 222 bp, Staphylococcus aureus
atgccgaaagaaaaatattacttataccgagaagatggcacagaagatattaaggtcatcaagtataaagagaatgagaatgaagtttattcgctcacaggagcccatttcagcgacgaaaagaaaattatgactgatagtgatctaaaacgatttaaaggcgctcacggacttctatatgagcaagagctaggtttacaagcaacgatatttgatatttag

SEQ ID NO: 530 - DNA, 405 bp, Staphylococcus aureus
atgagtaaatacaacgctaagaaagttgagtacaaaggaattgtatttgatagcaaagtagagtgtgaatattaccaatatttagaaagtaatatgaatggcactaattatgatcatatcgaaatacaaccgaaattcgaattattaccaaaactagataaacaacgaaagattgaatatattgcagacttcgcgttatatctcgatgacaaactgattgaagttatcgacattaaaggtatgccaaccgaagtagcaaaacttaaagctaagattttcagacataaatacagaaacataaaactcaattggatatgtaaagcacctaagtacacaggcaaaacatggattacttacgaggaattaattaaagcaagacgagaacgcaaaagagaaatgaagtga

SEQ ID NO: 531 - DNA, 573 bp, Staphylococcus aureus
atggcagcaatcaaacctattacaacatataaaggtaaaatagtccctctyttcaacgacaatatcgatacagaccaaatcattcctaargtacacttaaagcgtatttcaaaaagtggyttyggtccatttgcttttgatgaatggcggtacttacctgatggttcagataatccwgatttcaatccwaayaarccwcaatataaaggkgcwtcyatwttaattacwggagataattttggatgyggttcaagtcgtgaacatgcwgcttgggcwcttaaggactatggytttcatattatwattgcaggaagtttcagtgacatwttttatatgaattgyacwaaaaatgcratgttrccwatygttttagaaaaaartgchcgtgaacatcttgcwmaatatgwkgaaattgarrtmgatttaccaaatcaaactgtgtcatcaccagacaagmgtttccattttgaaattgatgaaacttggaaraataaacttgtaaatggcttagatgacattgcaatcaccctacaatatgaatcattaatagaaaaatatgaaaaatcactttaa

SEQ ID NO: 532 - DNA, 417 bp, Staphylococcus aureus
atgccctttacaatgaaaggttaccccgaaaaatggaaagawtttgaagtaattaaacggcaaaargcgatagaaattgcgaatgcaatgttaaaagaaggatatcttgaaaaagatgttgttcctattgcggcgaaaaaagcgaaagattggtatcgagcgttatcgaaagaagaaatcaaagcattagaagaagagaacttcgtacaattccatacagcaacaatggaaaaavcagaggtggatagtgaatatgcaacaactgataatgaagaacatattcaagaacaatcaaatcaagataaatcgtactttgatagcgaatcaattggcaaccaaagtggtggcgttcgacaaagagaaccgcttatggatggtscrcatccaaaagttgtggaatcatttaaagacgtataa

SEQ ID NO: 533 - DNA, 237 bp, Staphylococcus aureus
atgattaatattcctaaaatgaaattcccggaaaagtacactgaaataatcaaaaaatataaaaataaaacacctgaagaaaaagctaagattgaagatgatttcattaaagaaattaatgataaagacagtgaattttacagtcctatgatggctaatatgaatgaacatgaattaagggctatgttaagaatgatgcctagtttaattgatactggagatgacaatgatgattaa

SEQ ID NO: 534 - DNA, 420 bp, Staphylococcus aureus
atgagtttgagaaaatcaacgcaaagatatttagaaagtgaattaagcaattacaattacttcgataaagatatagcgcgtgtaagagatgaagttttaaacccgtggagtcaacaagatactaatatcggtggagatagggtgcaaagcaatgtaagtgtaactgaaataaaagctattagagttgttaatgatagaagattatcgcaattggccagaatgaaatcggctatagaggttgtatataatcatagcactacagaaactcaaaaacttatggaactttattattttaaaaagcctagaacattaaatttaactggtgtagctcaagaaataaatgtaagtaaatctaccgcttatgatatgaggaaagatatattagttaggttagctgatgaattaggtataatacattaa

SEQ ID NO: 535 - DNA, 1269 bp, Staphylococcus aureus
atgacagtcaaaacaacagtttctacgaaagatatcgatgargcatttttaagacttaaagatattgtcaaagaaacacctttacaattagaccattacttatctcaaaagtatgattgtaaagtytatttaaaacgagaagatttacaatgggtacgttcttttaaattaagaggtgcttacaaygctatttctgttttrtcagatgaagctaaaagtaaaggtattacatgtgcragtgcaggtaatcatgctcaaggtgttgcctatacagctaaaaaacttaatttaaacgctgttatctttatgccagtcactacacctttacaaaaggtaaatcaagtaaarttctttggaaatagtaacgttgaagttgtactmactggtgatacatttgatcactgtttagctgaagctttaacttatacaagtgaacatcaaatgaactttatagatccattcaataatgttcatacaatttctggacaaggtacgcttgctaaagaaatgctagaacaakcaaagwctgacaatgttaactttgattatytatttgccgcwattggtggtggyggwttaatttcaggtattagtacytaytttaaawcctattcwccyamyacraaaattatmggwgttgaaccttcaggtgcwagtagtatgtaygaatctgttgtsgtaaataatcargtwrtcacattrcctaatatcgataaatttgtsgayggwgcwtctgtagcyagagttggcgatattacwtttgaaattgcmaaaraaaatgtagatraytacgtwcaagtagatgaaggtgcwgtwtgttcwacrattttrgayatgtattcaaaacaagcaatwgtagcagaaccygctggcgcwttaagtgtragtgckcttgaaaactayaaagaycayattawrggtaaaacwgtkgtttgtgtcattagtggtggtaataatgatattaatcgwatgaargaaattgaagaacgttcwttaytataygaagaaatgaarcattaytttatyttaaayttccctcaacgyccwggtgcattragagaatttgtaaatgaygtwttaggmccwcaagacgatattacwaaatttgaatacttraaaaaatcttctcaaaatacaggtactgtcattattggtattcaacttaaagatcatgatgatttaatacaactcaaacaacgtgtaaatcatttcgatccttccaatatttatattaatgaaaataagatgttatattcattgttaatttaa

SEQ ID NO: 536 - DNA, 1893 bp, Staphylococcus aureus
ttgacatcactyataaaaatyaatcgacttaacttagacttttataaaggkrtaagacarggactgttaatgattattccygcaatmatcggttacttatgtggtaatttccaatttggattattagttgcaaccggaacwctagcmcatatytaygtttttaaaggtccgtcgcgatctaagctgcgaactgtaataatttgtaatttagcgtttgcaatatgyatgatrcttggtacgctaacagccamaacgccrctcgtttttggaatgacattattaattgttacggttataccattttatatatttacygccttraaaatwgctggaccgtcatcgacattcttcattgtgacattcagtytacccattaacttacctatagcwccygaagaagcattatatagaggctttgcgattttagtaggyggtrtacttgccactatgatggtrytmatcacratcktattktctaaaaacaaagctgaagaacaagcmattcaaaaygattttaaactcatatctargttrttrcayrcttayaatgataaakctgcwttttyacaagtagcaaaaacagcggtggatarttttaaagcrtckgataaaytaytmatcacttctamttcaagtarygataaattaagyrgacgtttccaaaaattattrttattacacacatcwgcmcaagggatwtattctgaaytrttagagytgaaygctaaacaaatymgaccattgccagatgagttaattgaaatgatggatcatatcattrcacarckagatratmgyrakraaaatgtragatattggcgmaaagaagtracagtaacagaggaatttcaaaayttattcaaccatatmwtgaaaattgaygaaatggtgcatgcaaatgaagcrcgtatygcrtatgaagcwgamatgcgaaaacctttatatagtaarcgyatttatcaaaatttaacattagaytcwatygtktttagaaatacattgagrtatrcagcgattatgatgatagcgatatttatygcgttaatgttygattttgaaaaagcataytggatacckttatcygcacatacartattaytaggaacatcaactatacatgcaatygagagaggtatggcacgwggwttaggyacyattttaggtgtgytagtactttcagtyatattgttgttttcaataccaacacctgttgcagtmattttaatgggcattgcagcattrtttactgaagcrttggtgggagcaaattatrcrattgcagtagtttttattacaatacaagttattttaatgaayggattagcatcacagaayttaacaattaacattgcgtttccaagagttattgacgttgcaatrggtattgtgattgcaatcataggtttatttgtccttggrcaacgtaccgcatccgyattgcttcctwatgtaatggctgaagttgttcgtaaagaagcaacgctcttycattatttrttttctgaaaaycaatataaagatratgtgtatcagaaaaacacggcyatgaacctatctgtgaaattaaataayatgacgcaagtttataatgcagctaatggtgaattatttagtgataaracattgattcaaaattattatcctagcttattcgcattagaagaaattagctttatgttaaatagagccatggctaatgaagatagacttayaataaatgaacaattaatgggcgagtatttagcaayatttgaaaacatcgctaagcatttmgaattaaatacagaattagaaataaagatattaccagatttaccacagtataattatattcaatcagcaatgatgaatattcaacacaatrgttttygtgagagagacaagaacgtttaa

SEQ ID NO: 537 - DNA, 615 bp, Staphylococcus aureus
atggatatccaagagaagttaaaactcaaattacagttttttgctgaagaatcagatggagataatggaaaatcaaaagataacaacgatgatgaaggcaaagacaaacaagacaaaaagactaattcagaagaagaaatcgaaaaaagactacaagaagaatataacaagcgtcttaaagaagaattaagtcgtcgtatgaagcagaaagaaaaagagaaacaagaagctgttgatgaagctaaacgattagcaaaaatgaacaaagatcaaatcgctgaatatgaacgcgaacaaatggaaaaagagctggaacaattacgttcagaaaaacaattaaacgaaatgcgttcagaagcacgaaaaatgttgagtgaagcggaagttgattcatcagatgaggttgtcaatttggttgtaactgacactgctgaacaaaccaaatcgaacgttgaagctttttctaatgcagtaaaaaaagcggttaatgaagcggttaaggttaacgctagacaatcgccattgactggtggagattcatttaatcactcgactaaaaataaaccgcaaaacttagctgaaatagctagacaaaaaagaattattaaaaattaa

SEQ ID NO: 538 - DNA, 534 bp, Staphylococcus aureus
ttgaatcaaggtaacaatccattcggtaaatcaattgcacaatcaattgaaaaaactaataaggttattaaaggtgacttcacacaagataacattattgatttagaggcattacttgaagatgacgaattagaagcaaatgcgtttatctcaaaaacacaaaacagaagcttgttacgtaaaattgtagatcctgaaactaaggaacgtatttatgaccgtaacagtgatacgttagatggtctacctgtggttaaccttaaatcaagcaatttaaaacgcggtgaattaattactggtgactttgataagttgatttacggtatccctcaattaattgaatacaaaatcgatgaaactgcacaattatctacagttaaaaacgaagatggcacacctgtaaacttattcgaacaagacatggtggcattgcgtgcaactatgcatgtagcgttacacatcgctgacgataaagcattcgctaaattagtgcctgctgacaaaaaaacagattcagtaccaggagaagtttaa

SEQ ID NO: 539 - DNA, 2658 bp, Staphylococcus aureus
atgtcaaacactgaatcgctaaacataggaaaaaagcgtggatctttaacaatttacatcggttacagtccaggtgttggtaaaacatttgagatgctttcaaatgccattgaactatttcaaagtaacgttgatattaaamtaggatatattgaaccgcatcarcgtgatgaaacaaatgcattagctgaacaattacctaaaatcrcaaccaattttactaaacatggtagtcatcattttcaatatttagatgtcgaccgcataatcgaagaatcgccgacaatagtacttatcgatgagttagcacatacgaayatttctagagatcgtcatgagaaacgatatatggatattgaagaaattttaaatcatggtatcgatgttcatacyactttgaacattcaacatattgaaagtttaagtagtcaaattgaactgatgaccggtrtacatgttaaagaacgtgtacccgactatttcataatgagcgccgatgtattagaagtcgtagatatctcacctgaacaattaattaaacgcttaaaagctggcaaggtatataaaaaggataggctagatgtagcatttagtaatttctttacgtatgcccacctaagcgaactgcgtacattgacgttaagaacagttgccgacttgatgagtgataaagaaaaagtccgacacaaycataaaacgtcactcaaacctcatattgctgtggcaattagtgggagyatttataatgaagcagtaattaaagaggcattccatattgctcaaaaagaacatgcraarttcactgctatttatatagatgtattcgaaaaaarcaggcaatataaagatagtcaaaagcaagtgcatcaacatctcatgcttgcaaaatcwttaggagcaaaagtaaaagtagtttatagccaaaccgttgcattaggattagacgaatggtgtaaaaatcaagatgtaaccaaattaattatcggacaacatattagaaataagyggcgagactttttcaatamacctttaattgaccatttaatgtcctttgaacatagctataaartcgaaatcgttccaatcaaacaaatacctgttgaattgaaaatgaacaaatcaccctatcgtcctaaaggcaaacgkttcgccatagatatgttaaaaatgattytgattcaaataatttgtgtaatgatgggactgtggatttatcaacttgataagcatgagtctagtacgattattttaatgatttttctcatcggcatcattttrttatccatttggacgcgrtcctwcatcattggctttttagcagcaattattaacgtatttgtttttaattatttttttacggaacctagatatacatttgaagtataycgctttgactatcctattacatttatcgtyagcattttaacaagtattttaacgagtgctttattaaaacaaattaaattccaatackccattactaaaaagcaactttatcgtacagatttattatttcaatttaatgattcgattaaacaaacttatacagttgaaaacttactaataaatgctggataccaaattaatcaattattgcaacaatcaattactatatacgttatcaatcaatcsaaagtaattaaaacaataccattgcaaaaccatatcgataatamgactcaacagcatgaacaagcattaagctgggtaattaaaaatgaaagacaagctggtgcaacaacagatacatttccaggcattaataaatggttgataccaattggcacatctccgattaaaggcattctagccattgattaccaaagttctcaagtgattaatccatatgatgcatcaatattagaatcaatgttaaatgaactttctctcgccgttgaaaatgtgacgttrcttaaacaaacragagaatccatgttacaggctgaacgtcaactgacacattcaaattttttaagatcaatttcgcatgacatacgtacaccgttaacaacaattatgggaaatttagatattttagtrtcacatagtaaagatatgtctrtcatagaaaaggaacaattacttgtrcatagttttcaagaaagtcagtatttatatctattagtgacaaatattttatcattaacaaaattacagtcatcaaatgttcagataaaattgcaaccttatctcgttagtgaattagtagaagaaatcgatatgattytagaacgtcgccatttaaaaaagcgtataactgtatcatcctcmgtaratttacagtttatacacattgacagtaagttgattttacaagctttattcaatttgattgaaaatgcagttaaacacacttctactgacaccaaaatcaatttatctattcgttatgctagckatgaacaaatcgaatttgcygttatagacgaaggacctggaattagtwtagaagaacaacaaaagatattcgagcctttttacacaggrtcaaataaatattttaaagataaccaaaaagaaagcatgggactaggcttatatttagtacagactatcctacacaaacatcaatcaaacytacaatataaaccgaaccaaccacayggcagtatattctatttcaatatakatacagactttaaygaaggagacrtataa

SEQ ID NO: 540 - DNA, 1278 bp, Staphylococcus aureus
atgaaggaaaaacgaactaacgtaaggtggatgttcgcgcttgcgttcttctttattggggttattgcgtatatggatagagcaaacatttcatatatcgctaarcaaatgatggatgatttagggatgacmaaaccacaatttggyttattggcatcattcttctctctaggttatgcattaatgcaagtaccatcggggatgttggctgaaaaattcggtccacgtaagatgattacaattgcattagtttggtggagtgcatttacaatcttaacgggtatgattaagaaccacggtttaatttatttagtgagattcttatttggtgtrggtgaggcgccaatgtayccttctaatgctgtgtttaaytcattttggttctctaaaaatgaaaaaggtagagcatcaagtgcattattagcaggatcatatttcggacctgtattagcaccaatagttacaattgctattgttaacgcatttaactggcaagcagtattttayatttttggtgcagtaggkattttaatggctgtattatgggcgattattgcyaaagacttacctgagcaacatagaatggttaatgaagcggagaaacgtttcattatggaaaaycgtgatatcgtagctactgaaaagtcatcaccaccatggaatratttctttaaacgttttagcttctatgcaattgcaattcaatactttgttgtacaatttatcattacattattcttaatttggttaccgacgtatttaacagaagtattccacgttaactttaaagaaatgagcattagttcattaccttggttattaatgttcttcttaatcttatcagcrggtgcaatttctgaccgtgtattaggattaggtcgttcaaaattcgtagctagaggtgtaattgcaatygcaggatttattgtrtttgcagtttcaattatctttgctgtacgyacaggaaatttatatgtaagtattttctggttatcactaggtcttggtggtatcggtatttcaatgggtatgagttgggcwgcagcaactgayttaggacgtaacttctctggtacagtatcaggrtggatgaacttatggggtaatataggtgcattaatcagtccgctattagcaggtctattcgtagaacatttrggttggacaatgacattccaattgttaatcgttccagcagtaatcgctgtgattatgtggttctatgtgaaaccagatcaacctttaattgttagtgatgataaagcaatagaaaaataa

SEQ ID NO: 541 - DNA, 1824 bp, Staphylococcus aureus
atggtagtagataatttttcgaaagatgataacttaatcgagttacaaacaacatcacaatataatccggttattgacacaaacatcagtttctatgaatcagatagaggaactggtgttttaaattttgcagtaactaagaataataagccgttatcaatcagcaaacataatgcgatgactagtattgtgcttaagacggataacttcgacgatgaacacggcgcttatattagtgatgaacttacaattgttgatgcaattaacggacgaatgcaatacgttatcccaaatgagttcttaaaatacactggacgcgtacatgcgcaagcatattttactcaaaacggtagcaataacgtaattgtagagcgtcaatttagcttcaatatccagaatgatctaattagtaattttgacggtaaaacaaagctagtttatatcaaatcaattcaggacttaacagaaagtgttaaagaagaagttgaggacttaaagaaaagtttgagtgatacaaaatcgttggttactgaaattgatagtcgtattaatcaaggtattcaaagattagaaatcaaacaaaatgaagcggtacagatgattacaacaacacaagacaaagccgttcaatatataaatagcgagttccagaaaattgttgataaagagcaagcgatttttgaacgtgttaacgaagttgaacaacaaatcaatggcgctgaccttgttaagggtaattcaacaacaaattggcaaaagtctaaacttactgatgattacggtaaagcgatcgaatcatctgaacagtcaatagaagctgttttaagacacgctaactcatctatgattattcatattactaatgcaaaagatgtgccagaaaaggcggatataggcacgttagagaagcccggacaagatggtgttgatgacggttcttcgttcgatgaatcaacttatacatcaagcaaatctggtgtgttagttgtttatgttgttgataataatactgctcgtgcaacatggtacccagatgattcaaacgatgagtacacaaaatacaaaatctacggcacgtggtacccgttttataaaaagaatgatggaaacttaactaagcaatttgttgaagaaatatctaacaacacactgaatcaagctaaacagtatgtagatggtaagttacaaagtataagttggcaacaacataagttaacagaacataacggtcaatcaatccaaaagaacttatataacgccaaaggtaatttagaagcattgggcgctgggaattattacgtaacaagtgtgcctgatttaccaggtattgttgaaagttacgaaggctacttatcagtatttgttaaagatgatgcaaataagttattcaacttcacaccttcaaactctaaaaaagtttatacacgatcaatcaccaatggtcgattagattcacaatgggctacacctaacgaacataaaacagccgtgttattcgacggtgctgcaaacggtgtaggaacaaggattaatttaaccgaagcttatacaaattatgcaattctattcataagcggtacttatccaggtggtgttattgaagcattcagtttaacctctataccaaatgcgattcaattaagtaaaacaaatgtagttgactcagacggtaacggtggtggtagttatgaatgcttaataactaaagaaagtggtacgacgttaaaaatcgataacgatgtgtaccttgatttaggcagtaaaacaggttctggtgctaatgcaaacagagttacgataaataaaattgtggggtggaaataa

SEQ ID NO: 542 - DNA, 696 bp, Staphylococcus aureus
atgcaatctaaaatattgataattgaagatgatcacgcaatcacacatttacttgatgttgcattaactttagattattacaatgtaactacagccgamaatgccacacaagcacactttaaaattcaaattgataaaccagatgtcattttattagatttaggtttaccagataaagatggattatgtttgatttcagaaatcaggcaacatactgacattcctatcattgtaataagtgcaagacaagaagaacaaacaattattcaagctttagataacggtgcgaatgactatatgactaarccttttaatgttgatgagcttcgggcacgaatwcgagtcatcgaragaatcgctaagtcrcatcaagaaactaacattgtatttactaacggtttgytaagcatcgactttggctccaaatctgttgttattaataatcaggaggtacatttgacdccaaatgaatttagcttgttagaactattgtcaaatcataaaggaaaagtactcacttatgagatgatattaaaacgaatatatggctatgttaataagactgaaatgcctagtttaagagtgcatatgacatcattaagacaaaaactttcacaatgtcaygaggacgcaaaagatattattaaaacacatccacgcattggttatcaaatgttgcagtggaaagagaaataa

SEQ ID NO: 543 - DNA, 1161 bp, Staphylococcus aureus
atgattaatagtaatatcagattatatattctaggatttttagcatttttcgcatcattgattcaaaacatatacacgcctattattccgagactatatgacgattttcaagtaccactattttggataaatgcgacagttggcggttttatatttatcgttgcagttatgcaaattgtacttggtagaagtatagattctcgtgattcgaaaaaagtacttttaacgggattgggaatagtaatcatatctagctttatttgtgcagtgacacataactttatattatttgctatatcaaggttatttcaagcaattggttgcggaattattcctctcgtgactttaactttattagccaaactaagtacagataatggtagagctcaagctatggcgaactatcaaatatttttatcatgtgcaccagctttggcaccaatcttagggagtactttaggtgcaagatgggattatattggtatttttagttttttgctcgttatatctatcgtattatttttgattatcttttttattgatattccaaatgttgaaaaagggattgtaaaattaactgaaaaaattgaagaaaaatatttgaccgataaagtgtttattactttagtgacattgggatttttaatattttttacgtacttttcaatattagtttatttaccaacattattaaataatacctatgatataggcgttggaatatcaggagttttgtttttacctattactgttagtgttatattaggaagtttattttataagcgattttcaaaaaaatataatgaaataatgatacttcgtgttactataactggatttgctatatttacgttattgtttggatggttaaacgaatcaaatgtaattatattatcagtaattatatttatattaggtacttgtgttggtattgtgccagctttgctgtctactataatttctaaaaggtttgaacatataaaagggaaagtgctaggtgtatttaattttgtgagatatattggaatgactgtcggtgcattattaattggtatcatttctcagccgttggtagccttttacttcacaactataactatcatgttaatagtaatatttctttatataaagatagttgactttcagctaaagtatgccaaa

SEQ ID NO: 544 - DNA, 633 bp, Staphylococcus aureus
atgacatataatattaatacgattgcgaaatggtttgtagagaataacattactagcagtgaaaatagttacgacggaaatttaacattaaataaactcatttattttgcagatgcgatgaattacgcaatcaacaacaaaaaattagtggatgaaataccagtaggatttgcgaacggcccggtgtaccagtctgtttatgttgatcatagataccgcactttagaatcaattaattcagatgacgctgaaatttctgaagaaactttaaaattgcttagaattgttaaattcgcattcggatcatacacctctcaatatctatcggaattaacacatgaacaaactccatggaaaaataaagagaaattgtgcaaaaaaagttttatcaatccgcaacttagttttgaagatttaactgatgatgaaaaatttgatttgattgaaacgtataatatgtacggagatatgaatttagacaattatgtgattgacagaataggaaacaatgtttttgtatatgatataaacactaacctaaatgaagatgattacatggaactacagcaattaaaaaatgaaaatgatagtatttttatcgaaaaaattgatggagaaatagtgtatgcatga

SEQ ID NO: 545 - DNA, 432 bp, Staphylococcus aureus
atgcatgatggttcggtatttatagcaaaaataagatttaaaagagataccagtcctaatataaaacctcgtcaatttattgttattagtagcgataatggatatttatattttttagagactgagagcgttatcaacaaagtaaaattcaacctatcaaatattaaaagatcaagtttgaaatatcatattttaacgtctgaagaaagcctaagatgtggatttaatgttaaaactgcagtgaattgctatgaattgttttattgtgaatattttcctgaaattttgtctttgaaacagagagatctacctattgaaattttaaaagacatccaaggaaaagtaaggtccattaaagaagaagagttaaacattgaagattgtaaaataagcaaacaagaattgataaatttaaatccgaaattaagataa

SEQ ID NO: 546 - DNA, 1968 bp, Staphylococcus aureus
atgaatcggcagtccactaagaaagctttactaataccatttgtcatcatgatcatcacagcaattgttttaatgggtgtatggtttatctttaatagycttatagcaytaattgcatctatcgttcttgtcgtgatgattattgttagcatcrttttattcagacaagctttaatgaaaatggatagttatgtagatggtttgagtgctcaaatttcaacaacaaataataaagcaatcaaacatttaccaattggtatcattgttttagatgaaaatgatcacatcgaatgggttaaccaatttatgacaratcatatggaagcraatgtcatttctgaatctgtaaatgaagtatttccaaacattttaaagcaattagatagagtgaaatccgttgaaatagaatataatcagtatcatttccaagtacgttattctgagaatgatcaytgcctctatttctttgatataactgaacaagtacaaacaaatgaactatatgaaaattctaaaccaatcattgcgacattatttttagayaactacgatgagattackcaaaatatgaatgatacgcagcgttcggaratcaaytcaatggtaacgcgtgtyattagtcgatgggcaactgagtataatatattyttyaaaagrtayagttccgatcaattcgtagcctatttaaatcaaaaaatattagctgacttagaagaatctaaatttgatatcttgagtcaattacgtgaaaaaagtgttggttatcgtgcccaattaacattaagtatyggtgttggtgaaggyactgaaaatttaatcgayttagrtgaattatcacaatcaggcctagacttagcattaggrcgyggtggygaccaagttgcaattaaaagtattaatggtaatgtgcgyttctatggcggtaagactgacccgatggagaaacgtactcgtgtaagagcrcgwgtkatctcacatgcgttaaaagayatccttgcagagggtgacaaagtcattatcatgggacataaacgtcctgacttagatgcaattggtgcagcaatcggtgtgtctagatttgcaatgatgaataatttagaagcatacatcgtattaaatgagactgacattgatccaacattacgacgcgtgatgaacgaaatwgataaaaagycagagttaagagagcgatttatwacatcagatgatgcttgggatatgatgacatctaagacaaccgtagtgattgttgatacgcataaaccggaactggttttagatgaaaatgtcttaaataaagcaaaccgtaaagttgttatcgatcatcatagacgtggtgaaagcttcatctctaatccattgttgatatatatggaaccatacgcaagttcracagcwgaaytkgtaacagarttactggaatatcaaccaacagaacaacgtttaacrcgtcttgaatcaacagtgatgtatgcaggtattattgtagatacaagaaactttacattacgaacaggatcaagaacattcgatgcagcgagttatttacgtgcacatggtgcagatacgattttaacgcaacatttcttaaaagatgatgtggatacttacattaatcgatctgaattaattcgaactgtaaaagttgaagataatggcatagcmattgcgcatggttcagacgataaaatttatcatccagtaacagttgcacaagcagcagatgaactgttaagtttagaaggtattgaagcatcatatgttgttgcgagacgtgaagataatctgattggtatatctgcgcgttcactcggttcagtaaatgtycagttaacaatggaagcacttggtggcggtggacatttaaccaatgckgcaacacaacttaaaggtgtgacagtcgaagaggcgatagcrcaattacaacaagcaattacagaacaattaagtaggagtgaagatgcatga

SEQ ID NO: 547 - DNA, 99 bp, Staphylococcus aureus
atgatgcygcaaaatacaatagcaaagaaaaaacaggcgcgtcaccttatgaaggtatacgcacctgtttatagtaagcattatttagcttcaaataat

SEQ ID NO: 548 - DNA, 192 bp, Staphylococcus aureus
atgaatttaaatattgattggtctaaagattttcaagaattccaagagatacttaatagtggyattcatcctgaatggctttattgtgcaaaggctaatcttgttttagagcctgcttatactggcgaaggcaaacaatttttcagcactcaagatattattwacgcgagtaaaatyattccattcttttaa

SEQ ID NO: 549 - DNA, 1203 bp, Staphylococcus aureus
atgaattattcatctcgtcaacagccggataagcattggcttcgcaaagtagactgggtattagtagccactatagctgttttagcaattttcagtgttctgcttattaactcggcaatgggcggtggtcaatacagtgctaatttcggtatcagacaaattttttattacattttaggtgcaatttttgcaggtatcatcatgtttatttcacctaaaaagattaaacattatacatatttattgtatttcttaatctgtctattattaataggmttgctcgttattcctgagtcacctattacacctattatcaatggtgccaaaagttggtacacgtttggccctatcagtattcagccatctgaattcatgaaaattattttaattttagcattagcgcgtgtcgtttctagacataatcaattcacattyaataaatcattccaaagtgatttgttattatttttcaaaattattggtgtctcgttagtaccaagtattttaatattactgcaaaatgacctaggaactacattagtattagcwgcwattattgcaggtgtgatgttagtaagtggtataacatggcgtatcttagcacctatctttattacaggtattgttggtgcaatgacagtcattttaggtattctatatgcacccgcattaattgaaaatttattaggtgtccaactgtatcaaatgggacgaatcaattcatggcttgacccctatacatatagtagtggygatggctatcatttaactgaatcacttaaagctatcggttcwggacagttactaggtaaaggatacaatcacggtgargtttatatacctgaaaatcatactgactttatcttttcagtgattggagaggaactwggytttatcggttctgtcatattgatcttaatatttttatttttaatcttccatctaataagattagctgcgaaaattgaagatcaatttaacaaaatctttatcgttggtttcgtyactttacttgtgttccatattttacaaaatattggtatgacaattcagttgttaccaatcactggtattccattaccatttattagttatggtggtagtgcgctatggagtatgatgactggaataggtatagtcttatcaatttattatcatgaaccaaaacgatatgtmgatttataccatccaaaaagtaattaa

SEQ ID NO: 550 - DNA, 465 bp, Staphylococcus aureus
gtggatatgaagagagaagttattttaaaattacaacaatttattatagaaagagaaaatgccgataaaagaagacagtataaaaaggaaaatgaggaactagatttatctctaacacaatttcatatcatagagttgattgataataatgataaagtgaataataaatttttgtctgaaatgttaaatgtatcaaaaccagcaattactaaatcgataaaaaaacttttagcgaaagacttagtagttgaatcgcacaatgaatttaacaaaagagaagttaattattcattaacacaaaaaggaaaaaaattatcttatatacatgatgaattacatgaaaaatcggtaaaaaaatatgaagaggtacttaaagtctttgatgatgatgaaatggcagttattatagagtttttaaaccgtagtatagaagaattaaaaaaagaagatggtttaaatgattaa

SEQ ID NO: 551 - DNA, 1485 bp, Staphylococcus aureus
atgatagagttattatccattgcactcaarcattctaatattattttaaattcmatatttattggtgcatttattttaaacttattattcgcctttaccattattttcatggaaagacgttctgccaattctatctgggcttggttactagtcttagttttcttgcctttattcggcttcattttatacttactattaggacgacaaattcaacgygaccaaattttcaaaattgataaggaagataaaaaaggattagagttaatcgttgatgagcaattagcygctttaaaaaatgaaaacttttcaaattccaattatcaaattgtaaaatttaaagaaatgattcaaatgttgttatataataacgcagcatttttaacaacagacaaygatttaaaartatacacagacggccaagaaaaatttgatgacytaatacaagacatccgtaatgctactgattatattcattttcagtactatattattcaaaatgatgaattaggtcgtaccattttaaatgaacttggwaaaaaagcggaacaaggtgtagaagttaaaattctttatgatgacatgggttctcgtggactgcgtaaaaaaggcttacrcccgtttcgcaataaaggtggacatgctgaagcatttttcccatcaaaattacctttaattaacttgcgtatgaacaatcgaaaccatcgaaaaattgttgtaatagatggrcaaattggatatgttggtggttttaatgttggtgatgagtacttaggtaaatcaaaaaaattcggctattggcgagatacgcatttacgaattgtcggggaygcagtgaatgcattgcaattacgatttattctagattggaattcacaagccacacgtgaccacatctcctatgatgatcgttatttcccagatgtaaattctggyggaacrattggcgtwcaaatagcttctagtggtcctgacgaagaatgggaacagattaaatayggytayttgaaaatgatttcatctgctaaaaaatcgatttatattcaatctccctatttyatacctgatcaagcctttttagattctattaaaattgcggcattaggtggtgttgatgtcaatatcatgattcctaataaacctgaccatccgtttgttttttgggctactttaaaaaatgcagcatccttattagatgccggtgttaaagtatttcactacgacaatggctttttacactcaaaaacacttgttatagatgatgaaattgcaagtgtkggaacagctaatatggaccatcgcagtttcacrttgaatttcgaagtcaacgcytttatttatgaccaacaaattgccaaaaaattaaaacaagcttttatagatgatttagcagtatcttctgaattaacaaaagcacgttatgctaagcgaagtctttggattaaatttaaagaaggtatttcacaattattgtcacctatcttataa

SEQ ID NO: 552 - DNA, 594 bp, Staphylococcus aureus
atggaacatatttttmgwgaaggacaaaawggtgcrccracrctaatattrttgcatggtacaggtggygatgarttcgatttattrccrttaggcgaagcattgaatgaaaattatcacttgttaagtattagaggacaagtttcagaaaatgggatgaaccgktatttcaaacgtcttggtgaaggtgtttatgatgaagaagatttggmatttcgkggacaagaattgttrrcgttyattaaagaagctgctgaacgttatgawtttgatattgaaaargcwgtacttgttggattttcaaatggatcaaatatagcgattaacttaatgttgcgttcrgaagcaccatttaaaaaagcattgttatatgcaccgttatayccarttgaagtaasgtcaacaaagrakttatcagatgtmagtgtgttgctttctatggggaaacatgatccaatwgtgccattagctgcaagtgaacaagtcattaacttgtttaakacacgtggggcaswagtcgaagaagtttgggtgaakggycatgaaattacagaaactggattaacggctggtcaacaaatacttgrgaaataa

SEQ ID NO: 553 - DNA, 123 bp, Staphylococcus aureus
gtgacaaagaacgcagggaaccatgagattgaaattgataggcctatagttaatccaattaaaaaactaccaactagatttactatcaatgttgcgataggtaactttgaagtaaatttatga

SEQ ID NO: 554 - DNA, 648 bp, Staphylococcus aureus
atgcaacaatcagacrtcattagtgcwgccaaaaaatatatggaatctattcatcaaaatgattwtacaggccatgatattgcgcatgtatatcgtgtcactgctttagctaaatcaatcgctgaaaatgaaggtgttaatgatactttagtcattgaactcgcatgtttrcttcatgataccgttgacgaaaaagttgtagatgctaacaaacwatatgttgaattgaagtcatttttatcttctttatcactatcaaccgaagatcaagagcayattttatttattattaataatatgagctatcgcaatggyaaaaaygatcatgtcactttatctttagaaggtcaaattgtcagggatgcagatcgtcttgatgctataggcgctataggtgttgcacgaacatttcaatttgcaggacactttggtgaaccwatgtggacagaacawatgtcactagataagattaatgatgatttagttgaacagttgccaccatctgcaattaaacatttctttgaaaaattacttaagttagaatctttaatgcatacagatacggcgaagatgattgctaaagaacgtcacgactttatgatgatgtacttgaaacagtttttwacggaatggaattrtcacgactag

SEQ ID NO: 555 - DNA, 873 bp, Staphylococcus aureus
atgcgtttagttaaaaagacagtcaatcaagatgatatttatacgtatcatacwttttttgcagatgaygtwggttcrgcaggtacagayatgacrttctttgattttccaaatattacaaaagggcaggcaggaacaaattccattacaagaccgtcttttagagtgcctaacgatgacgcrttaayrtattatgaacagcgctttgatgartttggtgttaaacaygaaggtattcaagaattatttggtaaaaaagtgttgccatttgaagaagtcgatggccaagtgtatcaattaatttcagatgagttaaatgawggggtrgcacctggtgtaccttggaagaatggaccggttccagtagayaaagcgatttatggattaggmcccattgaaattaaagtaagttattttgacgactttaaaaatattttagagactgtttacggtatgacaactattgcgcatgaagataatrtcgcattacttgaagttggcgaaggmggcaatggtggccaggtaatcttaataaaagatgataaagggccagcagcacgtcaaggttatggtgaggtacatcatgtgtcatttcgtgtgaaagatcatgatgcaatagaagcgtgggcaacgaaatataaagaggtaggtattaayaactcaggcatcgttaatcgtttytattttgaagcattatatgcacgtgtggggcatattttaatagaaatttcaacagatggaccaggrtttatggaagatgaaccktatgaaacattagghgaaggkttatcmttrccaccatttttagaaaataaaagagartatatwgaatcrgaartwagaccwtttaatackaagcgtyaacatgrttaa

SEQ ID NO: 556 - DNA, 501 bp, Staphylococcus aureus
atgaaattatctttagacataaatactgattttgaagttactactcttacagatttaccaaaattaaaaattgtcatggagaacttaaacatgaaaataaacaaaagtgaaatagcgagacacatgggtgtttatagaagaacagttgataaatatttaaatggctttgagccaaccaaaaagagaaatcgtcagtctattattgacaagtattatcctatcatcgaaaaattactttcagactctagtgaacaaaagttctactataagcttattctttggcaatatttgaaagataaacatggattaacctgtgcatattctacatttagagcttatatccttaaacatgatgaatttaatcgttattttatgaaaggttatcaacggttgtcgcctaaaggcaaaacgagattcgagacaaaagccagtcatcaagcacagtttgactggaaagaaggcattaactttaaaacgaaggataatcaaatggtcctttag

SEQ ID NO: 557 - DNA, 441 bp, Staphylococcus aureus
atgaaaacttttaaagcagtaaggtttcaaattgtgaatgaacacggcagaattatagaatatgaattagaagatggcgtaataattaataaagaggaaagtggcacgggttggytgcttgaaattgtcatttctaatgagcattatgaaacatttaaggaatatcaagacaatgaacagttattggatattcgtgtcgtcatcacgcgtccagccaatgatccagctttatttgaatctactgtgaaaagtattaaaaattttaaaacaacaatgtctatcgtatttgaatgycatatttacactttacgtcaacagtatgctgaaagtttattagaacaacttattgatgatggattatctggtgaagaattaaaaaaatcatttaatcgaatgatgcagtctaaaccaaagttaaaggatgaaaaattagaagagtaa

SEQ ID NO: 558 - DNA, 435 bp, Staphylococcus aureus
atggatcgaacgaaacaatckctcaatgtytttgtcggaatgaatagggcgttagacacattagagcaaattacaaaagaagacgtaaagcgatayggcttaaatattactgaatttgcagtgctcgagttgctttataataaaggtccgcaaccaattcaacgtattagagaccgcgtattaatygcaagtagcagcatttcatatgttgtaagtcaattagaggacaaaggttggattacacgtgaaaaggataaagatgataaacgtgtatatatggcttgtttaactgaaaaaggtcaaagycaaatggcagatattttccctaagcatgctgagacattaacaaaagcgtttgatgtgttaacaaaggatgaattaacaatcttacaacaagcgtttaagaaaytaagtgcacaatctacagaagtgtaa

SEQ ID NO: 559 - DNA, 522 bp, Staphylococcus aureus
atgtcaaaaatcttaaacacacaactaataggtatctttaataggctagaaaaacaatctttagaaattcaaatggccgcccaatgtttaattcaagcaattggtggcgaaggttatgtttatgtaaaaggttatgatgatttacagtttttcgaaagtttcattctacatagtgatgagcgtttaaaatctagccgaaaacttgacgctattaaagactttaaagaaattgactcaactgatcgtgtattattattcgcaccattttataatgatcaagttgcattagatattcaaaaacttatcgmcttagatatcgatgtggtcttaataagcaacaaacctaaaacagatgatttccctgatcatctcgtacattttatcgatttatctacaccaagacctatagtctayactgaagattaygataagattgtccarccacatgcgatrgcattgaattatgtatactatgacatttatacacaaatgattgaaatgacaagagacttagaattataa

SEQ ID NO: 560 - DNA, 672 bp, Staphylococcus aureus
atgagcaatatgaatcaaacaattatggatgcatttcatttcagacatgckactaagcaattcgatccacaaaagaaagtttcgaaagaagattttgaaacaatattagagtcaggtagattgtctccaagttctcttgggttagaaccttggaagtttgtcgtgattcaagatcaagcgttacgtgatgaattaaaagcgcacagttggggcgcagcrwaacaattagatacagcgagccattttgtgctaatttttgcgcgtaaaaatgtaacgtmaagatcaccgtatgtacaacatatgttaagagatattaaaaaatatgaggcacaaacgatyccagctgtkgaacaaaaattcgatgcattccaagcagatttccatatttctgataatgatcaagccttgtatgactggtcaagtaaacaaacgtatatygcattaggcaatatgatgacgacagccgcattgttaggtattgattcatgtccgatggaaggttttagtctggatacagtgacagacattttagcaaataaaggkatcttagatactgagcaatttggtttatcagtgatggtygcatttggctacagacaacaagakccaccgaaaaataaaacacgccaagcwtatgaagatgttattgaatgggttggaccaaaagaataa

SEQ ID NO: 561 - DNA, 804 bp, Staphylococcus aureus
atgaaagttggcattgacgctggcggtacactaattaaaatcgttcaagagcaagataaccaacgtacttttaaaactgaattaactaaaaatattgatcaagttgtggaatggttaaaccaacagcaaattgaaaaattatgcttaactggaggtaatgcaggtgtyattgctgaaaacatcaacattcctgcacaaatttttgtagagtttgatgctgcatctcaaggactaggtattttgttaaaagagcaaggccatgacttagcagattatatttttgcaaatgtyggtaccggtacgtcactacattatttcgacggccaatcacaacgtcgtgtaggcggtatcggtacaggtggwggcatgattcaaggactcggttatttactaagtcaaatcactgattataaacagttaactgacatggcacaacacggtgatcgtaacactatcgatttaaaggttagacatatttataaagataccgaaccrcccattcccggtgatttaacagcagctaattttggtcatgtactacatcatttagatgctgattttacacctagcaataaattagcagccgttattggtgtcgttggcgaagttgttacgacaatggccattactgttgcacgtgaatttaaaactgaaaatatcgtttatatcggttcttcattycataataacgctttattacgcaaagttgtggaagattayactgtgttacgcggttgcaaaccgtactatgttgaaaacggcgcattttcaggtgctattggtgcattatatttagrwaaatag

SEQ ID NO: 562 - DNA, 801 bp, Staphylococcus aureus
atggttaaggctattgcggtagatatggacgggacgtttttagattcraaaaagacataygataaayydagatttgaagcgawttttactgaacttagaaatagagatattacatttattgctgcgagtggyaatcaatatgcgaagttgaagtctattttcggggatagagatatgtattttatttctgaaaatggtgcagttatttataawggcaatgagttatataattataaaagctttaatcgtcaggtgtttcaacaggtygtcgattayttaaatatgaascaaagtattgatcaactcgtcatctgtggtttgaaaagcgcgtatattttaaaacatacttctgaagcrtttaaagaagatacgagattttattatcatcagttaaaagaaattgacagtctacarcaattacctgaggatgattatgtcaaaatagcatttaatattaatcgtgagacgcatccraatgttgacgaagaagtagcaacgcaattcagcaatgatattaaacttgtctcaagtgggmacgatagcattgatattattatgccaaacatgactaargggcaggcattaaaacgattgttagataaatgggraatgtctycttcagagctcatggccttyggagatgcgaataatgataaagatatgytwgcrttcgctaagcatagttatgtgatggaaaayagtcatgatgaagaattgttcaakattgcctckgctgtcgctccaagtaatgataagcagggtgtwttaacgattatcgaacaagaagtrttgaamaagtag

SEQ ID NO: 563 - DNA, 471 bp, Staphylococcus aureus
atgacaaaaatgaatgttgaaagtttyaatttagatcatactaargtggttgccccatttattagattagcgggaacgatggaaggattaaacggagatgtcattcacaaatacgacattcgtttcaaacaaccaaacaaagaacatatggatatgcchggaytrcattcattagaacatttaatggctgaaaatattagaaatcatagtgacaaagtygttgatttaagtcctatgggttgccaaactggtttctatgtatcatttattaatcatgataattatgatgatgtattaaatattgttgaagcaactttaaatgatgtgctaaatgctactgargtgcctgcttgtaatgaagtacaatgtggctgggcagcaagtcattcattagaaggtgctaaaactatcgctcaagcatttctagacaaacgaaacgaatggcatgatgttttcggtacaggaaaataa

SEQ ID NO: 564 - DNA, 567 bp, Staphylococcus aureus
gtggcagcatatttgtttgctaaaccacatatcgataattatcttcacgataaagataaagatgaaaagattgaacaatatgataaaaatgtaaaagaacaggcgagtaaagayaawaagcagcaagctaaacctcarattccgaaagataaatcraaagtggcaggctatattgaaattccagatgctgatattaaagaaccagtatatccaggaccagcaacacctgaacaattaaatagaggtgtaagctttgcagaagaaaaygaatcactagatgatcaaaatatttcaattgcaggacacactttcattgaccgtccgaactatcaatttacaaatcttaaagcagccaaaaaaggtagtatggtktactttaaagttggtaatgaaacacgtaagtataaaatgacaagtataagagatgttaagccwacagatgtagragttctagatgaacaaaaaggtaaagataaacaattaacattaattacttgtgatgattacaatgaaaagacaggcgtttgggaaaaacgtaaaatctttgtagctacagaagtcaaataa

SEQ ID NO: 565 - DNA, 177 bp, Staphylococcus aureus
attatttcacatcccgatgcagggaaaacaacgttaactgaaaaactattgtacttcagtggtgctattcgtgaagcgggtacagttaaagggaagaagactggtaaatttggcgaccaagtgactgggaatgaaagtttgaaccaaagaggcgttggttatttcctgtatacttag

SEQ ID NO: 566 - DNA, 711 bp, Staphylococcus aureus
atgacaaaaggtacaccacatattcaaccaaatggagtaaaaattgctaaaacagtattaatgcctggcgatccgctacgygcaaaatatattgctgataattttttagaaaatgttgaacaatttaacgatgtacgtaacatgtttggttacactggtacatataaaggtaaagaagtttctgtaatgggttctggyatgggtattccaagtattggtatttactcatatgagttatacaacttctttgatgtagatacaatcattcgtatcggttcttgtggcgcattacaagaaaatgttaacttatacgatgttattattgcacaagctgcatcaactaattcaaattatgtagatcaatacaatattccaggtcatttcgcgcctatcgctgacttcgagttagtaactaaagctaaaaatgtcgctgaccaaatcggtgctactacacacgtaggtaacgtattatcttctgatacattttacaatgccgatccaacattcaatgatgcttggaaaaaaatgggtattttaggtatcgaaatggaatcagctggtttatatttaaatgcgattcatgctggtaaaaaagcacttggtattttcacagtaagtgatcatattttacgtgacgaagctactacacctgaagaacgtcaaaattcatttacacaaatgatggaaatcgctttagaaatcgcagagtaa

SEQ ID NO: 567 - DNA, 153 bp, Staphylococcus aureus
atgagtcattttgaaattaatggtatactatatgaaatgttaacaggcattgtgaaatgtataaaaggagccttaacgtatgaaaaaatggacaaatcgattaatgacaatcgctggtgtggtacttatcctagtggcagcatatttgtttgc

SEQ ID NO: 568 - DNA, 321 bp, Staphylococcus aureus
atgtcagaacaatattcagaaataaatacagatacattagaacgcgtaactgaaatyttcaaggcattaggcgattacaatcgaatacgtatcatggaattgttatcagtcagygaagcaagtgttggtcacatttcacatcaattgaatttatctcaatcaaatgtctcgcaccaattaaaattacttaaaagtgtgcatcttgtgaaagcaaaacgacaaggccaatcaatgatttattcattagatgacatccacgtagcaactatgttaaagcaagccatacatcacgcgaatcatcctaaagaaagtgggttataa

SEQ ID NO: 569 - DNA, 168 bp, Staphylococcus aureus
atgctaagactatcaatcatctttatagcattcatcattaacacaacgattacatatggatatacgactgagggaacgtgggtcaatctattatttaaatctttatcgctcagcatgattatcgttttcatgttctactatattcgttttgttattgagaaaaagcgt

SEQ ID NO: 570 - DNA, 981 bp, Staphylococcus aureus
atgtctcattcacatcatcatcatgaccatatgcatagtcatgtaactacarataataarraagtattgtttatatcgtttttaataatcggtctatatatgtttatcgaaatcatcggcggtctccttgctaacagcttggcattactaystgacggtatccatatgtytagcgacacattctcattaggtgtygcwytwrtcgcatttatwtatgctgaaaagaatgccacaactacaaaaacatttggttataaacgtttcgaagtactcgcagcgttatttaacggtgtaacgctttttgtaataagtattttrattgtttttgaagcgattamacgtttctttgttccttctgaagtycaatcwaaagaaatgttaatcattagyattatyggtttaattgtcaatatcgttgttgcattctttakgtttaaaggcggcgacacttcacacaatttaaatatgcgtggtgcttttctacatgttatcggagacttattaggttcagttggcgccattactgcagctattttaatttgggcatttggatggacaatcgccgatcctatcgcaagtattttagtttccgttattattttaaaaagygcttggggtatcacaaaatcttcwattaacattttaatggaaggcacaccaagtgatgttgatatagatgaagttatarctactattamaaaggattcacgaatacaaagtgtgcatgattgccatgtttggacaatttcaaatgatatgaatgcattragttgtcatgttgttgtagaccatacattgacaatgaaagaatgtgaattattattagaaaacattgagcatgatttattacatttaaatattcaccatatgastattcaattagaaacgcctaatcacaaacatgatgaatcgattatatgttcaggaacacatagtcattcacatarccaycatgctcatcatcacgcgcatgyacattaa

SEQ ID NO: 571 - DNA, 96 bp, Staphylococcus aureus
ttgataaaaaagaagcatctgtctggatcattagtaccagatagatgcttcttaattatctctgaagaagttgaaagatttatggaaaatgcatac

SEQ ID NO: 572 - DNA, 1056 bp, Staphylococcus aureus
ttgacaggcttttcagtgtatttaggacaacctttagatgaagcgtatattaagcgaatgattaaacaaggttaccaaatgatttttacatctgtacaaataccagaagaagatgacgagacaaaatatcattatttcacaaaactactcaatttattaaaayatgaacaagtgacttacctcatagatgctaatccatctatwttaacaccatctttttatgascatcttcgacaatatgatgcrcaatttatgattcgtatcgatcatagtacatcaattgaggcaatcgaagcgataatggcacagggtttaaagtgctgtttgaatgcaagtattatttcccgggaattgttaacaagcttacatcaacaattgaatgattttacattactttcattttgtcataactattatccaagaccagatacgggattatctgttgacttggtcaataagaaaaatgaactcatttatcaatttaatccaaaggcacaaatatatggttttattgtagggagtgrtttgcgaggtcctttgcataaaggcttgccaacaattgaagcaacgagacatagtcatcctgtcgttgcagctaaattattacaagaaactggtgtatctgaagtgttagttggagactcattgattgaaatraggcaggcaaaacaacttatagatttttgyaagcataggcatttcacgttatgtattgaagaagtgtttgatacgacagtgacttaccttttcgatatgtgtcataaagtacgyccggataatccggaraatgtcattcgttcggaaacgtcaagacaaatatgtccrcattcgattcaaccacagtttacgacgcaacgacgcattggttcagtaaccgttgataatttgaataacggacgttatcaaggygaaatgcaaattgtgagacaaacgcttagtgcacatgacartgtgaatgttgttgcacaaattattaaagaagacttaccactgttaagttgtatcgagccgaatgatacatttgattttcaaaaaactagggagtgtaagaagtga

SEQ ID NO: 573 - DNA, 939 bp, Staphylococcus aureus
atgctcaattttgatgagcaaatagcraaattaaaacagatgaatatattttttaatattattgacaccgaaaaagcaaatgaaattcttagaaaaaataatyacttcttcaaactagcttatttccgaaaaaatttcgaaaaaaagaatggcggctatttcatagaatttgcttatttatcagatttagcaactatagatatgaaattaagatacacaatgttgcatttaactttagatattgaacatagtttaaagtrtctagtcttaaaactaataacagaaaataaccaagaagatggttataaaataatagatgagttcttatgtattgataaatcatatagcaattcaaattttgacacaaattcaagaacaccagaagaagttatggaaaccaaaatcaaaaataaaaacgaaatattcaagcatatgaataaacgaggacaactacccgagaagttgaataaatactatcaaaatccacccgcatgggtttgcattgaattcatgcaactaggtcaattcgtttcgtttctcaacttctattacaagaagtacaatgacgaagaattgagagttgctaatattttaatgcctttagttaaaaatataagaaacaaatcagctcataaccaacccatcatagcaaatctaaattatgacagtagatywcctcaatatttatttgaaaaagggaataatataggcatatctagaaacatgttcggaataaaaaatttcatagatactttcgctacgctagaattacataatcaagtttgtagtaatgcaattatccaagcaagatatcacgatttggaccaacttcaaaagcgatataaaagaaacgaaagctattataataatgcattagctatcaaaagattttttatagctttagataaaattattgacttcaacagaccaaaagtataa

SEQ ID NO: 574 - DNA, 900 bp, Staphylococcus aureus
atgtttgattcaattagagagactatagattatgccgtagaaaataatatgtcatttgcggatatcatggttaaagaagaaatggaattaagcggtaaatcacgtgatgaagtgcgagcgcaaatgaaacaaaatttagatgtcatgcgagacgcagtaatmaaagggacgacaggtgatggsgttgaaagtgtaacgggctacactggtcatgaygctgctaaactacgtgattataatgaaacacatcatgctttgtctggatatgaaatgattgaygcagtcaaaggtgccattgcaacaaatgaagtcaatgctgcgatgggtattatttgtgcaacgccaacagctggttcctcgggtaccattcccggtgcactttttaaattagaaaaaacacatgatttaacagaagagcaaatgattgayttcttattcacttcagcattgtttgggcgtgtcgtagcaaacaatgcaagtgtagctggtgcaacaggtggctgccaagctgaagttggttcagcatctgcaatggcsgcagctgcagcagtagctatattcggaggatcaccagaagcatccgggcacgctatggcattagcgataagtaatttattaggtttagtttgtgayccagtagccggacttgttgaaattccttgtgttatgagaaatgcaattggttcgggtaacgctttaatttcagcagatttagcattagcaggtattgaaagtagaatmcctgttgatgaagttattgaagcaatggataaggttggtcgtaaccttcctgcatcattacgtgaaactggattgggtggactagcaggcacaccaactggcgaagcaattaaacgtaaaatctttggcacagctgaagatatggttaaaaataattaa

SEQ ID NO: 575 - DNA, 1035 bp, Staphylococcus aureus
ttgatatatgcacttatagcatttgctgtaattgcagttgtatatttacttgctaatttccagcttgctaagtatgyacaaactattgcaatttattcacaatttgggcaaaaaccaccagtagatgcatatttaaaagttatcgctgtattacttatagcagctgtagtttcactgtttgttttagttcaaatttttatcggaattacaaatgttatgaaacgagcaatgagtcatgaaaaagtaaaatttaccgatttatttattgcatttaaaaaaggtaattatttaaagagcgttctgatmggycttgtatctatagcaatgattatcgttctttcacttctgacatcattactatacaaattattttctccaktatyakawaykatkrtkaatwcagtmywatcawsatawgcagatagtacacacctgrttggtattgctattacaactcaaagcatcataatcattgttgttttattgattaaagcaattattacttggttattgttaatacctrttttcaactttatgactagtttcgttgaatcaactaacgataaagtaaaaacacacttagctaatggatttaaagcaatgaaaaatggtcaaaaaacatttttcaaatttttcattggaatactattattaaacttarttattattttatttaaaacacctgtkggttacttgatttcatttaatacgcaatcactctctcaaagtgttgcagaaaawwtcataagagtttatacagtaatracaatyattttattcgttgttattcatgcartcattttaatgggtatcgttcaatattacttaaaacgtggtcaaaaaattactaaagataaagtaaaaacagctgacaagrataaaaaagttgtcactgaaccaaaaaatacaaaagtagaaaatgrtaaagtgacaacatctgttgaaacraaaacagaaaaagcacaagattcattaaatgataatacwacaaaaacratgacttcagataaaccagaagacaaycaaccaaaataa

SEQ ID NO: 576 - DNA, 681 bp, Staphylococcus aureus
atggcaaagagctatgattatcaaagtgctttcgatattatcggaccagttatgatgggmccttcaagttctcatacggctggtgcagtaaagattgggaattcagcacgcgcaatattgggagatattcctaaaaatattgaaatacattattatgaatcatttgctcaaacacaccaaggacatggtacagatgtcgctattgtgggtggagcaatgggatattcaacatttgataaccgaattaaatcttcattagaaattgcagctgatgatggtattaaaatagatatcrtcgaagaagaaggcgatagtattggtcaacatccaaactgtgcttatatyaaatcatytcgtaatgatggtcgctayattgaaattatcggtatttcaatcggtggtggtacaattaaaattaaaggtattcatataaatggactagaagtagatttaaatcatggattaccaattttagttgttgacggaaatatgactaaagcacaagtaaatcatttcatyaatgatatcaacgatatgaaattagactgtaaagatgaatttattawgatagatgaagataaatgcttggttgtaataccattaaataaagcaatctcagaatcracattaaatacaattaaagagaaatacagtgacgtaaacgtttcctatataaattag

SEQ ID NO: 577 - DNA, 1539 bp, Staphylococcus aureus
atgtcrcaaactgaagagaaaaaaggaattggtcgtcgygttcaagcattyggatcattyttragtagtatgatyatgccaaacattggygcwttcatcgcttggggtttyatcgcggccatttttatagataatggwtggttmcckaayaaagatttagctackttrgcwggwccaatgattacttatttaatcccaytattgatygcatttagtggyggtcgtttaatttatgatttacgtggtggtatyatcgcwgcaacrgcaactatgggggtcatcgttgcattacctgatacaccaatgttacttggwgcwatgattatgggtccwytwgttggttggttaatgaaraagacygaccaattgatycaacctagaacrccrcaaggttttgaaatgytatttaataayttttcwgctggtattttaggatttatcatgacrattgcaggatttaaaattttagcaccacttatgaaatttatyatgcatattttatcagtggcagttgaagcattagtacatgcacacctacttccacttgtaagtattttagtagagcctgcaaaaattgtatttttaaacaatgcgattaaccatggtgtattcacaccgcttggtgcagatcaagctgcaaaagctggtcaatcwattttatacacaattgaatctaaccctggaccaggtttaggwatyttacttgcwtatatgatttttggraaaggyactgcaaaarcaacktcatatggtgctggaattatccacttcttmggtggtattcatgaaatttatttcccatatgtattaatgcgtcctttattattyatcgctgttattttaggyggaatgactggtgttgcaacttatcaagcaacaggatttggatttaaaagtcccgcgtcaccwggttcatttatagtttactgtttaaatgcacctagaggtgaattcttgcacatgttrctcggtgtcttccttgctrcacttgtatcattygtygtagcwgctttaattatgaagttcactaragaaccwaarcargatttagaagctgcracwgctcaaatggaaamtactaaaggkaaaaaatcwagygttgcwtctaagttagtatcttctgataaaaatgttaatacagaagaaaatgctagtggtaatgttagtgaaacatcttcatyagatgatgatcctgaagcgctattggataattacaacactgaagatgttgatgcacacaattacaataatataaatcatgttatttttgcctgcgatgcgggtatgggttctagtgcaatgggtgcaagcatgttacgtaataaatttaaaaargcgggcattaatgatattacagttacaaatactgcrattaatcaattgccaaaagatgctcaattagttatcactcaraaaaaactaactgatcgtgcwattaaacaaacaccaaatgccatccatatttcagtggataatttccttaattcaccaagatatgaagaacttttaaataatctaaaaaaagatgatcaagcataa

SEQ ID NO: 578 - DNA, 996 bp, Staphylococcus aureus
atgacgctatttttaaagtatgcaccgtacggtaaacaaggactacaagcattatccggtgcagcttgtgcgacatttctaccacaagcattcttaagttaygctattggtggcgtatttgatattaaatttctacaagatattggggatttagcaggaagtttaagcggtatcgcagtaggtattctaacgtgcttaaacttaggcgttgcaccagtatttgcggtyattgttggtttagtattacatgactttaaattattaccagcattcatcgcagcttatkgcgtagcttttttaattaaatggattgaaaagaaagttccrgaaggcttggacttaattgtggtgatcttatttgcaccagcaattgctttcggacttgcatcaatcattacacctggtgtgctagcaacattaaaacaaataggtagtgctgtcactgcggtaggtgataacaatccatatgcattagcggtcattttaggactagtgattcctgttacaggtatgacaccgctaagttcaatggtattaacaagtttattaggactgacaggtgttcctatggctattggagcactaacatgtacaggtagctcatttgttaaccttattttattccgaaaattaaacattggtggaccgtcaaaagcatttgcagtttgtattgagccattgacgcaaattgatttaatagcgcaatatccagtacaactatatggtacaaatgcactgattggggtcgtcaacgcatgtatcgtgacatttagcggactagtaataggtgtcaaaggtatggcaacaccaattgcaggygccatcgtattrtttggctttaataatgcagtgacatcaattgtaacaatcgcaacagtgattattgtcagcattgtcttagcctatattattggaacactaattaataagtttaatttaatgaatatcaactttaaaatgccgagcaaaaagaatcatattaaggagagtgtttaa

SEQ ID NO: 579 - DNA, 2133 bp, Staphylococcus aureus
atgttattgagtacacgtgaaaaagaaatgatagccctattgattaagtaccacrgtcaatatatcactatacacgacattgctcagcaacttgcggtgtcctctcgtactattcaccgtgaattaaaaggtgttgaagcatatttaacttcattttcattaactttagaacgcgcaaacaaaaaagggctacgcattrctggcrcagattctgatttaaacgatttgaagcaatcgattgcacaacatcaaaccattgacttatctgttgaagagcagaaagtaattattatatacgctttgatacaagccaaggagccagttaaacaatatagtttagcgcaagaaattggcgtttctgtccagactttagcaaagatgttagatgatttagagctygatttaaataagtaccaactatctttatctcgaaagcgtggcgaaggyatttacttggtaggtactgaatcaaagaaacgtgaatttttaagtcaattaatggtgaataacttaaatagtactagcgtttattcagtaattgaaaatcattttgtctttcattcattaaatcaaatccacaaagactttgttgacttagagcgyatttttaatgttgaaagactattaatggactacctaagtgccttaccctaccaacttaccgaatcaagttatttaactttaactgtccatatcgtgctmtccatttcacgtataaaaaatggwgagtmtgtcgcattaaacgatgatatttatgattctgtacaaaacacatttgaacacaaagtagcaagcgaacttgctgataaacttggtcaaatatatgacgtcacgtttaatcwggcagaaattgctttcattactatccatttacgtggwgctaaacgaaaaaatcttaatgatacatcattaaataatcgttgtgaagaaaacaaaattaaagcgtttgttaamaaagtagaaatgatttcmggtatgacatttgcagatttggatactttagtagatggactgacgctacaccttaatcctgcaatcaatcgtttgcaagctaatatcgagacctataatccgttaacagacatgattaagttcaaatatccaagactrtttgaaaatgtaagattagctttaaatgattgttggcctgatttgatttttccagagagtgaaattgcttttatagttttacactttggtggctcgattaaaaaccaaggtaatcgatttttaaacatattagtcgtttgcagcagtggtatgggaactagycgtctattatcaactcgtctagarcaagtttttagtgagattgagcgtattacacaagcatcagtcagcgatttgaagtcactagatttaagtcaatatgatggcattatttctactgtgaatttagacatmgactccccctatttaacggtaaacccattattaccagatagtgatatcagttatgtcgcacagtttttaaatacaaagtctacgttccaagagacgcrygataaatcatcaaacatgattgataaggatgatgttcatrttgaaacgaaagatrttgatggcaayacatcttttgaaaatgaacaaacttcatacttaacttcagttttcgaaaaacatttaagtgacgaaaaatcagaacaattawtgcatcatatgcgttcgggtttaactttgcttgattcagtgaaaatagttagtaccgaagttaaacagtggcaaacatatatcgcagattatctatatcaatgcgatgyaataaacgatccaacgtcattcgctgaactactagagcaacgattgattgacaatccaggatggatattaagtccatatcctgttgcrataccacacctaagagacaatatgattaaacaccctatgrttctaatcacagttttagaagaaccgttaayattgcctagtattcaaaatgacaatcaaacaattaaatatatgatttccatgtttattyctgacaatgattttatggcatcactgrtaagtgacttgtccgaatttttaagtttgaaattagaatctattgatacttttatggaaaatccacaggaacttgaaacattattaagaaacaaatttttagaacgaattaaaaaacaatttatttag

SEQ ID NO: 580 - DNA, 969 bp, Staphylococcus aureus
atgcgtaaaaaatggtctacacttgcgtttggatttttagtwgcrgcatacgcacatattagaattaaagaaaaacgcagtgtgaaaagttatatgttagaacaaggtatacgattatctagagctaagcgtcgttttatgtataaagaagaagcgatgaaagcattagaaaaaatggcgccacagacagcaggygaatatgagggmaccmattatcagtttaagatgccagtaamagtggataagcactwcggttcaaccgtttatamcgttaaygataaacaagataagcatcaacgygttgtattataygcacatggaggygcatggttccaagacccactyaaaattcayttcgaatttattgatgaacttgcagaaacactcaatgctaaagtcatcatgccagtatatccgaagattccgcatcaagattatcaagcgacgtatgtgctttttgaaaagttrtaccatgatttattgaatcaagtagcagattctaaacaaatcgttgtaatgggtgactctgcgggcggtcaaattgctytatcatttgctcaattgttaaaagaaaaacatattgtgcaaccaggacatattgtattaatttcaccagttttagatgcaacgatgcagcatcctgaaattcctgactacttaaagaaagacccaatggtaggtgtgratggcagtgtgttcttagctgaacaatgggcaggggacacacctttagataactacaaagtatcrccaattaatggtgacttagatggtttaggtcgtattacattaactgttggyacaaaagaagtactgtacccagatgctttgaacttatcgcaattgttgagtgcraaaggtatcgaacatgactttatacctggatattaccaattccatatttatccagtatttccgataccagagcgmcgacgctttttataccaagtgaaaaatattattaaytaa

SEQ ID NO: 581 - DNA, 435 bp, Staphylococcus aureus
atgagcgaattatttagtaatgacaatatctttttaaatgtaaatgttaacagccaaaatgaagcaattgaaaaagcaggtaaagccttagttgatagtggtgctgtaacagatgcttatattcaagcaatgaaagatcgtgarcaagtygtatcaacatttatgggaaatggcttagcaattcctcatggcacagatgaagctaaaacaaatgtgattcactcaggtttaacattattacaaatccctgaaggcgttgactgggatggcgaagtagttaaagttgtmgtgggaatygctggtaaagatggcgaacatttagacttgttatctaaaattgcaattacatttagcgaagaagraaatgtrgaycgtatcgttcaagcaaaatctgcagaagaaattaaacaagtwttcgaggaggcagatgcataa

SEQ ID NO: 582 - DNA, 357 bp, Staphylococcus aureus
atggttaagcaattaaatagtgtcgaagcattccgtgaatttattcatcaatatccgttagcagttgtacatgtcatgcgcgatcagtgtagcgtgtgtcatgccgttttaccacaaattgaagacttgatgcaatcataycccaatgtgccattagctgtgattaatcaaagtcargtkgaagctattgctggagaattaaatattttcactgtacctgtggatttaatttttatgaatggaaaagaaatgcatcgtcaagggcgttttatcgatatgcaacgttttgaacatcatcttaagcaaatgaatgatagtgtraataacgatgtcgatgagcatkaatatcgcaaatga

SEQ ID NO: 583 - DNA, 243 bp, Staphylococcus aureus
atgaaaattaatgaatctttgaagaaattaaaagaaaaaggatacaaagaaaatgaagataaagctatttttaatttagctgatggtacgctagaaatttacatcgaccatgacgaaaaaacaataattacagaattccatgatttaaaggtattcgtgtcagaagatttaaaagataaaagtatggagagcgttatgtatgaattggctggaattgatgaggaggacaaggaaaatgactaa

SEQ ID NO: 584 - DNA, 1107 bp, Staphylococcus aureus
atgaaagcagttcaytttggtgctggtaayataggtcgtggwttyattggwtatattctwgcagayaacaatgtwaaagtaacatttgcagaygtmaatgaagaaatcattaatgcwttagctmmtgrwcatcaataygatgttattttagctgatgagtctaaaacaacracrcgygtraataatgttgmwgcrattaaytcaatgcaaccttctgaagmrttgaaacaagcaattytagaagcwgatattattacaacagctgttggtgttaayatactacctattattgctaaatcttttgcgcctttcttaaaagaaaaaacaaaccatgttaatattgttgcttgtgagaatgctattatggcaactgatacattgaaaaaagcrgtacttgatattactggmcctcttggtaacaatattcattttgctaactcagcagttgatagaattgtaccattacaaaagaatgaaaatatattagacgttatggttgagccattttaygaatgggttgttgaaaaagatgcatggtatggyccagaactaaaycatattaaatatgttgatgatttaacaccatatattgagcgtaaattattaactgtgaatacaggacatgcatatttagcgtatgctggwaaatttgcwggtaaagctacmgtwttagaygcwgtwraagatagttcaattgaagctggcttacgccgtgttttagctgaaacwagtcaatatattactaatgaatttgattttactgaagcggaacaagctgsttatgttgaaaaaataatagaycgtttcaacaattcttatttatctgatgaagtracacgtgtcggacgaggtacrttacgtaaaattggccctaaagatagaattataaaaccattarcatatctttataataaagatttagaacgcactggtttattaaatacagctgcattgttattgaagtatgatgatacagcagaccaagaaactgttgagaaaaataattacattaaagaacacggtttaaaagcgttyttaagygaatatgctaaagttgacgatggcttagccgatgaaataattgaagcktacaattcactttcataa

SEQ ID NO: 585 - DNA, 411 bp, Staphylococcus aureus
atgacaacagaaggtctattagttgcagagaaagaaatcgaagtgaatggttacgacattgatgcgatgggtgtcgttagtaatatcgtttatattagatggttcgaagatttgagaacagcgtttattaatcagcacatgaattactcaacaatgatcaatcaaggcatttcacctatacttatgaaaacggaagcagartataaagtacctgtcacaatacatgacaaaccagtaggycgtatttacttagttaaagcaagcaagatgaaatgggtgtttcagtttgaaattgtgtccgcacatkgcgtgcattgtattggtacacagacaggcggtttttacagattgagygataagaagatwacctctgtgccacaagtrtttcaagacattttagcaacaaaataa

SEQ ID NO: 586 - DNA, 303 bp, Staphylococcus aureus
atgactaaaaattataaagacatgacgcaagacgaaataagaggcttattatctgaaaaaacctcagaactgtatgatttagcgaaagaaattaagagagaaactgaatttgatattttgtttttctcagcaataggagttggcgacggagatttcataaaaagttcaagttctgctcttggcaatgcttttaatcttgctgaattattggataatgctactaatttcgacgatgtcattaacgccattcaaaaacgtaaactacaaaaatttcttgttatagataacaacaaggaggactaa

SEQ ID NO: 587 - DNA, 2067 bp, Staphylococcus aureus
atgtttaagaaattgtttggacaattgcaacgtatcggtaaagcattaatgttacctgttgcgattttaccagcagctggtattttattagcgtttggtaacgcaatgcacaacgaacaattagtagaaattgcaccatggttaaaaaacgatatcattgtaatgatttcgtcggtcatggaagcagcaggacaagttgtatttgataacttgccattattatttgcagttggtacagcacttggattagcaggaggagacggtgttgcagcattagcagcgctagtaggttacttaattatgaatgcaacaatggggaaagtgttgcayattacaattgatgacattttctcatatgccaaaggggcaaaagaattaagtcaagcagcgaaagaaccagcacatgcyttagtattaggtattccaacrttacaaacgggtgtgtttggtggtattatcatgggtgctttagccgcatggtgttacaacaaattttataatattacactaccaccatttttaggattctttgcaggtaaacgatttgtaccgattgtgacatcggtcgtagcaatygcaacaggtgtgsttttaagytttgcgtggccaccaattcaagatggattaaatagtttatcgaatttcttattaaataaaaatttaacattaacaacktttatattcggtattattgaacgctcattaattccatttggtttacatcatattttctattcaccgttctggtttgaattcggaagttatacaaatcacgcaggtgaattrgttcgtggtgaccaacgtatttggatggcacaattgaaagatggcgtaccatttactgctggtgcatttactactggtaaatatccattyatgatgtttggtttaccagcggcggcatttgctatttataaaaatgcacgaccagaacgyaaaaaartcgtgggtggtttaatgttatcagcaggattaactgcatttttaactggtatcactgagccattagaattttcattcttatttgtagcaccagtactttatggaattcacgtattattagctggtacatcattcttagtaatgcatttattaggcgttaaaattggtatgacattctcaggtggtttcatagattatattttatatggtttattaaactgggatcgttcacacgcattattagttattccagtcggtattgtatatgctatcgtgtattacttcttattcgactttgcaattcgtaagtttaaattgaaaacaccaggtcgtgaagatgaagaaactgaaattcgtaactctagtgtcgcaaaattaccatttgatgtcttagatgcaatgggtggaaaagaaaacattaaacatttagatgcatgtattacacgtctrcgcgtagaagtggttgataaatcaaaagtagatgtagcaggtattaaagctttaggcgcatcaggtgtattagaagttggaaacaatatgcaagctatctttggtccaaaatcagatcaaattaaacatgatatggcsaagattatgagtggtgaaattacraarccaagtgaaacgacagtgactgaagaaatgtcagatgaaccagttcacgtagaagcacttggaacaacagacatctatgcaccaggtrtcggtcaaatcattccattatcagaagtacctgatcaagtattcgctggtaaaatgatgggtgatggtrttggctttatccctgaaaaaggtgaaattgtagcaccgtttgatggtacagtgaaaacaatcttccctacgaaacatgcgataggattagaatctgaaagtggygtcgaagtacttattcatattggtatcgatacagtgaaactgaatggtgaaggattcgaaagtctgattaacgttgatgaaaaagtaacacaagsycaaccattaatgaaagtgaatttagcatacttgaaagcrcacgcaccaagcatcgttacaccaatgattattacaaatcttgaaaataaagaacttgtcattgaagatgtmcaagatgctgatccaggtaagctaattatgacagtcaaataa

SEQ ID NO: 588 - DNA, 1710 bp, Staphylococcus aureus
atggaaacaggtaaaagtgatgtacttgataaaattgaaaaaattaataaaaaagatagtgccttacaagaaattataccgaaaggctatgaaattgaacatcatcaatgcggtgttgccttataccaacttataccaagtaaaaaagaaggcgaaccagataaaaaggtttttatcacaaatacaatccctcaaattactgaacgctttgaagatattgagagtaacgaagttagctttaatatgcttttctatgacaataaaacgccagtaaatatagctgtgagtgccgaagaaatttcagatagtcgtcaactcttgaaattggttaataaaaagctagatgtaacatcgtcgacatctactaaacttgttgactatattaatgtatctaaaaggtataatccaccattaaatgttaaagttgcaacgcgtttggggcatgtgaaaggttattttatttatccttatcaagaagtaatgaaagacagcaatgtcaagttgtttagcaatgataaagggtttcaaaagttaatagactcttttcgaagtaaaggaacactacaaggttactctaaaaaggtgtttgctcaaataaaagatttaccaatggtaatggttatgttgtatgcatctttaggctcagttttattaagagaatttggattacaaccctttattgtagaaatatcaggtagtacatccacaggtaaaacattcacactcaacttagtatcaagtgtttggggaaccagtgaccttattacgacatggagttctactcaaaatagtattgaatcaatggcgtcatttttgaactcatttccaatgtttaaagatgatacgcgtaacacacatcctaagtttgttaccagtaccacatataacttttctagtggtgaaagtaaatcgagaagtaatattaatttaacgctaaatgctaaaaaagaatggcgaaatattttaatttctactggtgaatcatctatcgcaaatatggctgatgaaaaagcgggtgtatcagcacgtgtagttacactacaagatccaccatatccagataattttgattttaccacattagacaaatcgtttagggagaactatggaacgttagggttggcatttattaaacaatatgagtctaaaaaagacgtgtataagaacgcttttgagagctatcaacggtattttaatcaaaaaggtagtaatgaaatcatgcaacgtttaggacgtgcctttgcgttactacaagttaccggtgaggttttgaatgatattgatgggtttgaacatgaccattttaaaattatcgaacaagcctatgacagcatggttaaaaacaataagacgattgataaacctaagcaactgttagaggaactattacaatatttagatgcgaatagaaataatattgtaggtgacggttatgattcagtaaattacggagatgttaaagcggtatataaacatgattttctttgtattaaaaacgaaactgttaaaaataaattaggacacgaaatgcagacgattacagggcaatgggacaaaaaaggttatttaataaaagataaaaaaagaattcaaaaacaagtaaaacataaatctcaaaggcatctgggttatgcgattaaaaaagaaataattgaagaactaggatttgatttctcgatttcacataatccatatacagaaagttattag

SEQ ID NO: 589 - DNA, 270 bp, Staphylococcus aureus
atggcaatgacagtaaaraargataataatgaagtgcgtattcaatggagagttgctgatatcaaaattcctacaagtgaaattaaaaatattacacaagaccaagatattcaygcagttcctaaattagacagcaaagatgtatctagaatcggctcaacrtttggtaaaacgaatcgcgttattatcgatactgaagaccacgaatacattatttatactcaaaatgatcaaaargtttacaatgaattaactaaatmaattgtataa

SEQ ID NO: 590 - DNA, 1740 bp, Staphylococcus aureus
atggcaaaaataaaagcaaatgaagcattagttaaagcattacaagcatgggatatakatcacttrtatggtattccaggwgaytcaatcgacgcagtdgtcgatagtttacgtacagtgagagatcaatttaaattttatcatgtacgtcatgaagaagtagcaagyttagcrgctgctggttayacaaaattaactggtaaaatcggtgtggcattaagtatcggtggccctggtttaattcatttattaaatggtatgtaygatgccaaaatggataatgtaccgcaattaatattatctggacaaacgaatagtacagcacttggaacgaaagcattycaagaaacaaatttacaaaaattatgtgaagatgtagccgtttataatcaccaaattgaaaaaggtgacaatgtgtttgaaatygttaacgaagcaattcgtacggcatatgaacaaaaaggtgtmgctgttgttatttgtcctaaygacttattaactgaaaaaattaaagatacaacgaataaaccagtagatacatcaagaccaacwgtwgtatcaccaaaatataaagacatyaaaaaagcggttaaaytaatyaataaragtaaaaagcckgtyatgttratyggtgtwggtgcraaacatgcgaaagatgagctacgtgmrtttrttgaaryggcwaaaattcckgtcrttcattcattaccwgctaaracaatcttrccggatgaycatccatayagtatyggtaacttaggtaaaathggtachaaaacmtcwtatcaracaatgcaggawgcrgatttaytaattatggtwggtacaaactatccatatgtrgattacttacctaagaaaaatattaaagcmatycaaatygacacaaatcctaaaaatatcggacatcgtttyaatattaatgtaggaattgttggagayagtaaaattgcrttgcatcagttaactgaaaatattaaacatgttgckgaaagaccattyttaaacaaaacgttagaacgtaaagcggtttgggataaatggatggaacaagataaaaataataatagyaaaccattacgtccagaacgwttaatggcatcaatyaayaaatttattaaagatgatgcagtratttcagcagatgtwggtacwgcaacagtttggtcwacwcgwtayttaaaycttggtgtraayaacaagttcatcatttcaagttggttaggtacaatgggttgcggtcttccaggwgcdatkgcatcaaaaattgcatatccaaatagacaagcsatygcmattgctggtgacggtgcattccaaatggtratgcargacttygcwacagcwgtacaatatgatytacctttaacwgtrtttgtwctwaataayaarcarttagcrtttattaaatatgaacaacaagcwgctggtgaattagaatatgcrgttgatttytctgatatggatcatgcmaaatttgctgargcagcaggtggtaaaggttatacaattaaragtgctagcgaagtagatgctatwgtmgaagaggcaytagcacaagatgtaccaacrattgtagatgtwtatgttgatcctaatgctgcgccattaccaggtaaaattgtaaatgaagaagcgcttggttatggtaartgggcatttagatcwattactgaagataaryatttagatttagatcaaattccaccwatttcagtkgcagcaaaacgtttcttataa

SEQ ID NO: 591 - DNA, 870 bp, Staphylococcus aureus
atgaatgaaattaaattagaatatgacacacatgtttcagtggtacattatgaaagtttagactcacgttcatttaagagcttttcaaaacctgaatggagtaagttggttaataaactgtctgtgcctatagaagcgaattataagtatgcacgtggtgttgctgtgtacggtgatattaaagacggtgcaaatgatcatggtgaaacaataaaaaagcatcgcaatgacgttaatgtcatatacagagatgtgattgtacttgattatgatgaaataaatgatttaaagcaattacatgaagcaatcagctcagttttaagcagtgttgcatggtattggcacacatcgtttagccatacaactgaacaagctagaatacgcctatatatccctctgaatgagcgaataagtgcagatgattatcgtaaatatacaaaagtattagcaaataaaattggccataaagtggatgaaggttcatatcagccaagtagatgttttgcgttaccagttattcaaaaaggacacatatttattaagcgagtgaatgactgtccaattatgaatgttgatatgctcgaacagtggtcgaaggagtttgaacaatcaaatgctagtcctaatgtcataggatacactcgacgcgatagtgagtactggcgcgagctatgctttggaacaaccgaaggcaatcgtaacaatgcactagctagcttaattgggcatttattgagatgtcacgttaatgattatattgtttattcatttgctttattatggggacaattcgcatgtaaaccacctatgaaagaacaagaaatcaacgctacttttcaatcgatattaaataaacactataacaattag

SEQ ID NO: 592 - DNA, 219 bp, Staphylococcus aureus
atgactattttagcgaatactagaaagtttaaagaagccatgttcttaaaaggctttaatttatctgatttatcacgtgaaacaggtgttggaatttcttatttaagccaaattattaatggtaaaaagattccaagccctaaattagctaagaaaatggcagaagttttacaagttgaggtaaatgaattatttgaatttgaagtaaaggaggcataa

SEQ ID NO: 593 - DNA, 1977 bp, Staphylococcus aureus
atgaacttgaacttaatttttaaagaacagacattaaaatttaacaaagaagaacaagaaacatatttatttttacaacaacataatagcgattgggctaatatttttaaagagatgattttacaaggaagagataaagtcactcagagattrgtcacatcaatgcatcgcgaaaacttagttaaagcgcgcactcaaagtaagaaaatattgagtcgtgatttgattatgttagatatctcaacgactcatatactagaaatccagttcccacaagctaagcaaacattatatgctcctatcactggagaacacgcctttgatcgaattgatgttgaaggccctttctacattaaagatracattacaaataygattacacgagtacaccatccaaatgaaattcttgagtgtattttaattgaagcaccagatttaaaaaatgctgctagtgatcaatttcagcaagatttaataaacagtgcaactaatatgacatttgcratkagctatcaagcactgtcaatgcaacatgattctrcacctttatttaatattatcgaaaatagcgaagatagttacttgcgttcagagcaagccgttattgaaggtcatccgctacatccyggggctaaattacgtaaaggtttaaatgcattacaaacattcytatattcttcagaattyaatcarcctattaagttgaaaatagtactgattcacagtaaattargycgkactatgtcactgtctaaagattatgatacaactgttcatcarctatttccggamttaattaaacaattrgaaaatgaatttacrccaaastttaactttaatgattatcacattatgattgtwcatccatggcaattagatgacgtattacattctgattatcaagcagaagtagataaagaattaatcattgaagcaaaacatacgttggattattatgcyggtttatctttcagaacattagttcctaaatacccagctatgtcgccacacatcaaattgtcgacaaacgttcatattacaggtgarattcgtacattatcagaacaaacgacgcacaatggtccactaatgacacgtattttaaatgatattttggagaaagatgtcatatttaagtcctatgcatcaacaattattgatgaagttrctggtattcatttttataatgagcaagacgaagyagactatcaaactgaacgaagtgaacaattaggtacattatttagaaaaaayatataccaaatgattccacaagaagtcacaccawtgattccttcaagcttagttgcaacctacccatttaacaatgaatcacctatcgtgacattgattaaacgttatcaatcagctgcatcattgtctrattttgaatcatcggcgaaatcgtggrttgaaacttayagtaaagcattgcttggtctcgtaatcccactagttactaaatatggcattgcattagaggctcacttgcaaaatgctattgcaacatttcggaaagatggtctattggacacgatgtatattagagactttgaaggtttaagaattgataaagyacaactaaatgaaatggkatacagtacatctcatttccatgaaaaatcaagaattcttactgattcaaaaacgtctgtgtttaacaaagccttttattctaccgttcaaaaccatttaggcgaattaattcttacaatctctaaagcatcraatgattcaaacttagaaagacatatgtggtatatcgttcgtgatgtactagataacatytttgatcaacttgtacwttcgacacacaaatctaatcaagtaaatgagaatcgyataaatgaaattaaagataccatgttcgcgccatttatagattataagtgtgttacaacaatgcgkcttgaagatgargcacatcattatacttatattaaagttaayaaycctttgtatcgagaaaataattaa

SEQ ID NO: 594 - DNA, 396 bp, Staphylococcus aureus
atgcacaaagtccaattaataatcaaaytaytactacaactaggaatcatcattgtgattacttatattggcacagaaattcaaaagatttttcatcttcccttagccggcagtattgttggtctatttttattttatttactattacaatttaagattgtaccgctaacttgggtagaagacggtgcaaactttttattaaagacgatggtctttttcttcataccgtcagttgtaggtattatggatgttgcttccgaaattacgctaaattatatactctttttcgcagtcattatyataggaacatgtatcgttgcattatcttcaggttatattgctgaaaaaatgtctgttaaacataarcawcgtaaaggtrtagaygcttatgaatga

SEQ ID NO: 595 - DNA, 828 bp, Staphylococcus aureus
atgactaatgcytccaaatcattatatattgcacaacctacaattagtaaagcaattaaagatattgaaaatgaaatgggyacgcccttatttgatagaagtaaaagacatttaatwcttaccgatgcaggtcaaattttttatgagaaaagtaaagaaattgttgcactrtaygattatttaccatctgaaatggaacgcttgaatggactggaaacaggrcatataaacatgggcatgtcggcagtcatgaatatgaagattcttatmaatattcttggtgcattccatcarcaatatccaaatgttacatataatttratagaaaatggcgghaaaacrattgarcagcaaattatcaatgatgaagtagatataggcgtgaccactttgccagtsgatcatcatattttcgattatactaccctagataaggaagatttgcgacttatcgtgagcagagagcatcgactcgcaaaatatgaaactgttaaactcgaagatttagcaggtgaagacttcattttatttaataaagacttttacttgaatgataaaattattgaaaatgctaaaaacgttggctttgttccgaatactgtagcgcaaatttcacaatggcatgttatagaagatttagttacgaatgaattaggtattagtattttaccaacatcaatttcagagcaactaaatggagatgtgaagctrctacgcattgaagatgckcatgtacattgggaattaggtgttgtttggaagaaggataaacaattaagtcatgccacaacgaaatggatagaatttttgaaagaycgtttaggctaa

SEQ ID NO: 596 - DNA, 900 bp, Staphylococcus aureus
gtgatggaaaatagtacgaccgaagcgcgtaatgaagcgacgatgcatcttgatgaaatgactgtggaagaggcwttaattacgatgaataaagaagatcagcaagtcccgttagcagttcgaaaggcaataccacaattgacaaaagtaatwaaaaaaacaattgcacagtataaaaagggtggacgattgatytatatcggtgcaggtacaagtggamgrttgggtgtcttagatgcagcggagtgtgtacctacattcaatactgaycctcatgaaattataggtattattgctggtggacaacatgctatgacgatggctgtagaaggtgcggaagatcacaaaaaattagcggaagaagatttgaaaaatatagatttaacatcaaaagatgtcgttataggaattgccgcgagtggcaaaacgccatatgttataggcggtttaacatttgctaayacaatcggtgctacaacagtatctatttcatgcaatgaacatgcagttataagtgaaattgcgcagtatccagtagaagttaaagttggtccagaagtattaactggttcaacrcgtttaaagtctggtacagcacaaaarttaattttaaatatgatttcaaccatcacaatggttggtgtcggaaaagtttacgataacctcatgattgatgttaaagcaaccaatcaaaaactgatcgaccgttcagtgcgtattattcaagaaatatgtgctatcacatatgatgaagcaatggcgttatatcaggtatctgagcatgatgtgaaagttgcgacagttatgggtatgtgtggcatttctaaggaagaagcaacaagacggttattaaacaatggtgacattgttaaacgagcaatcagagatagacaaccttag

SEQ ID NO: 597 - DNA, 741 bp, Staphylococcus aureus
gtgtttawyttgaramatgatttagagacaytaaaacatattatagatagttcgaatcgtattacatttttyacaggtgctggtgtatctgtcgcaagtggygttccagatttccgttcaatgggtggcttatttgatgaaatttcaaaagatggrctttcgccagaatacttgttaagccgtgattatttagaagatgatcctgaaggttttatcaatttctgccataagcgyttactatttgtcgatacgawgccyaatatcgttcatgattggattgcaaaattagaacgtaatcaacaatctttaggtrtcatcacgcaaaatatcgatggtttgcactcagacgctggaagtcaacatgttgatgaattacatggcacgttaaatcgtttttattgtaatgyatgtcataaatcttataygaagtcagatgtyattgatagaactttgaaacattgtgataattgtggtggtgccattcgaccggacatcgtattatacggtgaaatgttagatcaacctaccatcatamggkcattaaataaaattgaasatgctgacacccttgtygtactaggttcatcactcgttgtacaacctgccgcaggattaatatcamattttaaaggcgacaatttaattattatcaataaagatcgaacaccttatgatarmgacgctactttggtcatacatgacgacatggtttccgttgtaaaatcattaatgacagagtaa

SEQ ID NO: 598 - DNA, 132 bp, Staphylococcus aureus
ttgactgataaaaatggtcatggaatcgctataactgggattatactttttgttataaatgctcttcaaataaataatgatttaccaataagtatatcaagtaaactaaagaaatatattcataaacctgac

SEQ ID NO: 599 - DNA, 258 bp, Staphylococcus aureus
atggagattataatagagatttatatgtatttaagagatggaattaaagagcattttattttgaaaaaggttagaaaaaaatttaaaaaattaaatgagattaacagcgatatacaaaatatgtatgcagaaaatcaggggctcttagaaacagataaaacaataattgacaaggtcttaagcactgacgttacaaatagccatgatattaatgaattatatttatttcttaaaaactatttggataagacgcaatga

SEQ ID NO: 600 - DNA, 426 bp, Staphylococcus aureus
atgaaactaaaatcatttgttactgccactttagcattgggmttattatcaacrgtmggwgcwgcwttacckagtcaygaagcatctgcagatagtaataacggytataargaawtgacwrtggatggdwawcacactgtdccttacacratytcagtagatggtattactgcattacatcgaacttactttrtyttyccagaaaataaaaadgtwctttatcaagaaattgacagtaaagtaaaaaatsaattagcttcwcaacgtggtgttacaacagaaaaaattaataatgcvcaaacwgcaacktatacrcttactttgaatgatggtaataaaaaagtagtgaatctaaagaaaaatgacgacgctaaaaattcaattgatccaagtacaatcaaacaratacaaattgtagttaaataa

SEQ ID NO: 601 - DNA, 1281 bp, Staphylococcus aureus
atgcaaartttagataagaatttycgacatttatctcgtmaasaaaagttacaacaattggtwgataagcaatggttatcagaagadcaattcracattttaytgaatcatccattaatygatgargaagtagcmaatagtttaattgaaaatgtcatcgcgcaaggtgcattacccgttggattattaccgaatatcattgtggacgataargcatatgttgtacctatgatggtggaagagccttcagttgtcgctgcagctagttatggtgcaaagctagtgaatcagactggyggatttaaaacggtatcttctgaacgtattatgataggtcaaatcgtctttgatggcgttgacgatactgaaaaattatcagcagacattaaagctttagaraagcaaattcatmaaattgcggatgaggcatatccttctattaaagcgcgtggtggtggttaccaacgtatagckattgatacatttcctgagcaacagttactatctttaaaagtatttgttgatacgaaagatgctatgggcgctaatatgcttaatacgattttagaggcyataactgcatttttaaaaaatgaatytccrcaaagcgacattttaatgagtattttatccaatcatgcaacagcgtccgttgttaaagttcaaggcgaaattgaygttaaagatttagcaaggggcgagagaactggagaagaggttgccaaacgaatggaacgtgcttctgtattggcmcaagtwgatattcatcgtgcwgcaacacataataaaggtgttatgaatggcatacatgcygttgttttagcaacaggaaatgatacgcgtggtgcagaagcaagtgcgcatgcatacgcragtmrwgayggwcartatcgtggtattgcwacatggmgwtacgatcaarawcgtcaacgwttrattggtacmatwgargtgcctatgacattggcaatygttggsggtggtacraaagtattaccaatwgctaaagcwtcwttagarytrctaaatgtagaktcagcrcaagaattaggtcatgtagttgctgccgttggtttagcrcaraactttgcagcatgtcgcgcgctygtktchgaaggtatycarcaaggycatatgagyttrcaatataaatcwttagctatygttgtaggdgcaaaaggtgatgaaattgckmaagtagctgaagcwttgaarmaagaaccycgtgcraatacacaagywgckgaacryattttacaagawwkwagmmrmcaayartag

SEQ ID NO: 602 - DNA, 522 bp, Staphylococcus aureus
atggwrtataagagttactatgattckcctgtaggacgattggaacttktgagtgatggggkaagtctgaccgctgttttgtttgaaaatcaacaagrtgatrgtactagggaagaaaatacgtctttagcgatatttaragaggcgacacagtggttagacgcgtattttaaaggtgacaatcctgaaatcacaatacctttaaagccaacaggtagtcattttcaacagtgtgtttggaatgaattaagacagrttccttatgggackytaacaacgtatggtgctattgccaaaaaagtaggyaagstgcttrayaagccaaaaatgtcagcccaagcggttggaggtgcagtcggaagtaatccattatcwattatcgtgccatgtcatcgygttgtcggtaaaacgggtagcttaacaggrttcggtggaacgattaataataaaattaagctgttagagttggagaatatcgatatgtcaaagctttatrtaccwaaacayagyacraagccgtaa

SEQ ID NO: 603 - DNA, 244 bp, Staphylococcus aureus
ttgttacgatatttttgggatgwggtgtttagtcaatggcggkytgaaattgtcgttttatggtgggctgaaaatgctgttttatgtcgggcttgaatttgtcgttttatggagatataaaaatgctgttttatggcggtttcaaaatggtgtttcgattaataagccacagcaagacttagatctaactatgacttatacatttcacacttatattagcgattatttttatagttataaatga

SEQ ID NO: 604 - DNA, 390 bp, Staphylococcus aureus
atgaaaaatggaccaaaattatctttagcacttataggtatctttttaatactttgtgagtttttctatggcattccttttttaggtgcaacgtttattttaagttttggatggcagcctttactctttaatgcattactttatctaattcttactattatattattagtgaatagacaaaatgcrattagacctatagcgattattccaatatttggtatagtaggtagttttttagctatyatccccttcttaggaattttgattcattggattttatttttcctaatgattctatttgtcctagttgtattatcagcgccaacctatatacctaataaaaatgctcgtgtcatttacacacaatacaaagatggacatagagaataa

SEQ ID NO: 605 - DNA, 1995 bp, Staphylococcus aureus
atggaaaattattgtattttaggaaaycctaatgttggtaaaacatctttgtttaacgctttaactggttcgtatgaatatataggcaactggagtggcgtaacggtagagaaaaaagtagggaarctwaaagaaaatgtaggacaattaattgatttaccaggtacatatgatttatcgccgatttctaaagatgaaactgtagtgacagactatttattaaacgattcwttttcaggaatcattaacattgttgaygcgagtcaactaaaaagraatrtgcaattaacagtacaattgttagaacttaatcaaccaatatacatcggattaaatatgattgatgtagctacaaagcgcgggataaaaatcgattatcataaattgatgaaaaagttaaaaacacctatttttccagttgtggcacgtacaggcaaaggaacwaaayatttacttggcgaaataaagcatctaggggaagggtatcaaccgcattttaaaatcaattatggtgagaagattgaagagacaattaaaaatatgtgtcaaataataatgacagagacatctcatgataartatcaagctagrtttattgcgattcaattcttaytaaataacatgcaaattgcaaaygaacttaattcagaggttgtaaataaattgtcgagtttacgtgatcaagttgmtraacaagtagrggctgtatctgttcgtcgagagatggarcgtatacgcaatcattatattgagacgttattgcaagacgtggtaacgtatccagatgaagataagcaatatttcagctctagaatagacaagatattaacacataaatatatagggatgcctatytttctagcrattatgtggttgatctttcaaactacatttacatggattggcacacctttgtcggatcaactcgatgcatttataggtggtacatttacrgatagtgtgaagacgattatgaattatctwggbgttataccatttttacaagatttaattacagatggcattattgctggtgtaggatcagtattagtctttgtaccacaaattgttgtgctmtttttctttatatctttattagaagattcrggttatatggcrcgtattgcrgttttaatggatcgtattatggaatcgttcggtttaagcgggaagtcttttataccratgattatcggatttggttgtaaygtaccgagtattatggctgcgcgcagtattgaaaatgaaaaagagcgtttaacaacgatattaattgcaccattcatgtcatgctctgctagactgccagtgtatgcrttgttcgtaggtatctttttcaaagaraatcaatctttagtagtattaagcytgtatgttttaggtattattatggcatttttagtcagtacagtacttactaagacrrttttaaaaaatgataatgcaatctttattgtggarttgccaacataccgtgtsccttccattaaaacgttgtggcgtagtacttgggaaaaggctaagggctttgttcgtaaagcaggtacatttatttttggcggctcagtagtcatttggctattaagttatgtaggaccacatggtatcaatgtgaatatcaatcaaagttttttrcatatggttggtagyttctttggtatgttagtgcaaccgctcggatttggaacatggcaagcaggtgctacgttagtgccaggatttttagcaaaagaagttatcgtaagttcgatggcgattatctattcatcaggtgatgcaggccttgttaatgtgattcaaaatcaattcacaccgctatctgcgtatgcatttatgatatttatactattgtatattccttgtgtttctacagtrgcagcaatccgtaaagagacttattcatggaaatggacggcacttgcagttgyctatcctctagtcactgcatatgtcttaacattcattttttatcaartcggacatttatttgtttaa

SEQ ID NO: 606 - DNA, 888 bp, Staphylococcus aureus
atgagcatagttcagttatatgatattacacaaataaaatcgttcattraacattcgaattatgaatcagcatcatacttatataaacttcctcaacagtacaatgaaatagatgtattaataaccgatgcgattgaatcacctggtgtattttcrattaaagaaaacgattcaatyaaagcaatcatattgtcttttgcatacgataaaaataaattcaaagtcataggyccwttcgtggctgacaattatgtattatctgtcgawacgtttgaaacgctrtttaaarcaatgacttcgaaycaacctgacgatgccgtctttaacttttcttttgaagaaggcattcaacaatacaaaccattaatgaaagttattcaagcaagttataacttcactgactattacatagaagcccgtacaagattagaagaagatatgcaccaaccaaatatcattccttatcacaaagggttttatcgtgctttcagcaaattacacacaactacatttaaatatcaggcmcagtcaccrcaagatatcattgatagtttagacgaccatcatcatttgtttttatttgttagcgaaggtttacttaaaggttatttataccttgaaattgattcacaacagtcaatcgccgagattaaatacttcagttctcatgtagattaccgtttgaaaggtatcgctttcgagttgcttgcgtatgcattgcaatatgcttttgataaytttgatattagaaaagtttattttaaaattcgtaayaaaaataataaactcatcgaacgatttaatggtctaggtttccatatcaactatgagtacattaaattcaaattcgaatcacgtaacgtaaaagatcaaacaatccctgaataa

SEQ ID NO: 607 - DNA, 228 bp, Staphylococcus aureus
atgttaaacattaaaaatggtgaaatgaataaggcttataaaataaagcgaatggatattgctaatgagaatatgttgtatcgtctaagtgcctttgggttaacagatgacgctatcataacgattaaacaaaaatgtttatttaaagggccatgtattattgaagtaaacggacaacagttaagtattagrcattgcgatgcttgttctattgcattagaagaatag

SEQ ID NO: 608 - DNA, 864 bp, Staphylococcus aureus
ttgcaatttcttgatttcttaatcgcacttttacctgctttattctggggaagtgtcgttcttattaatgtgttcgtcggcggtggaccttacaaccaaattcgtggtacgacgctaggcgcactcattgttggattaggtttacttattactggtttcgcaaaattcaataatcctactgtaattattgtcggtcttatttctggtgcattatgggcgtttggacaagcgaatcagcttaaatctattagtttaatcggtgtatcaaatactatgccagtttctacaggtatgcaattagttggtacaacattattcagygttatctttttaggtgaatggtcttcaatgactcaaattatctttggtttaatcgccatgatattattagttactggtgtagcacttacttcacttaaagcyaaaaatgaacgtcaatcagataatcctgaatttaaaaaagcaatgggtattttaattgtatctacagttggatatgtaggtttcgttgtacttggtgacatctttggtgttggtggaactgatgcattgttcttccaatctgtcggtatggcaattggtggctttatcctatccatgaatcataaaacatcacttaaatcaacagcacttaatctattgccaggtgtgatttggggaattggtaacttgttcatgttctattctcaaccaaaagttggtgtagctacaagtttctcattatcacagttacttgttatcgtttcaacmttaggyggtattttcattttaggmgaaagaaaagatcgtcgtcagatgackggtatttgggyaggtattatwattatcgtgatagctgctataattctaggtaatttgaaatag

SEQ ID NO: 609 - DNA, 2490 bp, Staphylococcus aureus
ttggcaaaatttttatataagatggggacattcatcgcaaaayataaatggtccgcggtcattgcatggatagtgattgtagctgcaatattgataccacttgctacaaatgcaccgaaatttgacaatgatattaaaatgacaggaytagagtcgttrgatacgaataaaaagattgaaaaacattttaatcaagatagtgaaaaggcacaaatacgtgttgtctttaagacgactaaagatgatggtattgtgcaaccgaryattacwraagayattaagaaaacrttagakgatatwaaaaaagatgacaagcacattgataaaatatcagatccwtatgaaaataagcaaattartaaagataaaacaactgcatttgcagatatcacatatgacgttagtcaaacatctttaaaagatggctctagagataatgttaaaagtcatttgaaagacttacgtgacaatcataatgtacaaacagagttaactggtacaggaatgacatctacagaagtaggcggtaattctgaactagttggtatyattgttgcatttgtwgtrytrttratyacattyggttcagtyattgctgcaggattaccaattataagtgcattrattggtytagchtctggkgtwggyattatcagtttgttaacttatgcattygatataccaaatgtcacaytgacattagccgtaatgattggactagcagttggtatcgattatgcwttrtttattttattcagrtatcgacaagttatgaaaactgaaacagattacattaaaggcattggtcttgcartrggaacagcaggtagygcagtyrtyttygctggtgtracagttgtrattgcmgtatgyggtttatcrytagtwggyatwgayttcttagcrgtratgggrtttgcttcggcaattagtgttrtwtttgcwgtaytyagygcwytractttattacctgcrttaatwagyattttccataaacrcattaaagtgaayaaattrcagtctaawttyaaaaaagatattgatacgccdtggtctaaatttattacwggwaatgcacttgcrgcagtattaytaggtttaatyatattagtwgcagckgcwatwccagttagtcatatgcgwcttggyattccrgatgayggygtwaarccagcagattctacwcagaaaaargcwtacgatatwatytcrgataartttggygaaggatttaatggccaaatwccgatgytgatwaaygtkaaagataaaaargatgatccacaaggattacaacaagatttacartctgtrtataaagatattaaagataagaaaaatgtrgatatygttacgccrccacaaatgagtaaagataatgattaygctttgatggtcgtgatacctaagmaagggcctaatgcagaragyacaaatgayttagtgcatgatttacgagattatmataaagatgcrcaagataaatatggrttyaaaacggaratttcrggacaaagtgtcattaatattgatatgtctaaaaagttaaatgaggcgatacctttatttgcmwcagtmattgttgtattrgcatttttcttattaatgattgtcttccgttcaatyytaataccrttaaaagcagttttaggattygtcttgtcattaatggcaacrytaggwtttacaacmttwgtratgcaagatggytttatgaaaggwytrttyggtatwgaaacgacaggaccaatgctagcmttyttrccggttattacwatwggtatmytattyggmttagcratggattaygaagtcttccttatgtcgcgaattcatgaagaatatagtaaaacaggggataatgattattctatcaaagtaggrttgaaagaaagyggtcctgttattgtagcmgctgcattaatyatgtttagtgtcttctttgcgtttgtattccaagaagatgtcatgattaaatcaatgggtatggcattagcgtttggtgtactctttgatgccttcgtagtcagaatgatgttaattcctgcattaackaaattgtttggaaaaggttcgtggtatttaccagcatggttgaatcgyattattccacgagttgatattgaaggacatgcacttgaaaaatataaaacggttgaatcacaggaatctgaagcyaaagatagtaaggaaacatacgacacaacctttaaartatatccacaaggtgcaacaaatgtatcgaaacatcaagatgyacatggrcaagatgatgyacrttcaatagtactagatgataaaackatggcattgtaccaagaagtgaaacagcaatcwgcaagttcattkttcttatatgatgctttaatrgattatcaaaacaagcatcaactaaattcaaaacaacaagymacgaatatagaacagttgaataaaaatattgaaaagctcaatcaattgttagaaaaaaayytamgaaataaatcataa

SEQ ID NO: 610 - DNA, 165 bp, Staphylococcus aureus
atgtctttagaaaaccaactagccgaacttaaatatgattatgttcgtcttcaaggtgacwtagaaaaacgggaatctttgaatttagatacttccgcwcttgttcgtcaacttaaagatattgaaaatgaaattagaaacgttcgygctcaaatgcaagattaa

SEQ ID NO: 611 - DNA, 165 bp, Staphylococcus aureus
gtgagatacgttatttcaataataatgggaattgtattagcaatttggtcatwtaaacaactgagtcaaagtcatttagatagcggatttatktttttcttcatagtttatgtgttgtrtatcagttrttttaatarcgataagcaygataaaaataaaaaacga

SEQ ID NO: 612 - DNA, 318 bp, Staphylococcus aureus
atgcaattttatctgattttactagcaatactttatctaattgttagttttattagtatttttaaaatggaagttgtatttactcgmattttgagaattattatgggtgtgttgttattrttcgtcttagcattaacgaygatgagttttccaaaagagaattggtgggtatttatcgtcttaytactcttagtyggyaatgtcgaagtgacaggatttaaaatgcttaaaaaagatctaaaaggygtaaacatcttgaatttaatgtcattatttatcttygtcatatatttcatcttaaccatcgtaytattctaa

SEQ ID NO: 613 - DNA, 1545 bp, Staphylococcus aureus
atggtagtagaatttaaaaatgaacctggttacgatttttcagtccaagaaaatgtggatatgtttaagaaagcattgaaagacgtggaaaaagaattaggtcaagacataccattagtgattaatggagagaagattttcaaagatgacaaaattaaatcaatcaatcctgcagacacatcacaagtgattgcaaatgcatcaaaggcaacaaaacaagatgttgaagatgcrtttaaagcagcraacgaagcttataaatcttggaaaacatggtcagcaaatgatcgtgcagagcttatgttacgtgtttcggcaattattcgtcgtcgaaaagcggaaattgcagcaattatggtttatgaagcaggtaagccatgggatgaagcagttggtgatgcagctgaaggtattgattttattgaatactatgcacgttcaatgatggayttggctcaaggyaagccagtacttgatcgtgaaggtgaacacaataaatatttctataaatcaattggtacaggtgttacaattccrccgtggaacttcccgtttgcgattatggctggtacractttagcaccagttgtkgcaggtaatayagtgttattgaaacctgctgaggatacaccttatatcgcttataaattaatggraattttagaagaagcaggattaccaaaaggcgtagttaactttgttcctggtgatccgaaagaaattggtgattacttagttgatcataaagatacgcatttygttacatttacaggatcacgtgcgacaggtactagaatttatgaacgtagtgccgtwgttcaagaaggtcaaaacttcttgaaacgtgttatcgctgaaatgggyggtaaagatgccattgtagttgatgaaaatattgatacagatatggcrgcagaagctattgtaacgtcagcrtttggtttytctggtcaaaaatgttcwgcatgttcacgtgcaattgtgcataaagacgtttatgacgaagtattagaraaatcaatyaaaytaacaaaagaattaacgttgggyaatactgtagacaatacgtatatgggcccagttattaataaaaaacaatttgataagattaaaaattatattgarattggtaaagaagaaggtaaattagaacaaggtggcggcactgatgattcaaaaggttactttgtagaaccaacaatcatttcaggacttaaatctaaagatagaatcatgcaagaagaaatttttggtccagttgttggctttgtgaaagttaacgattttgatgaagcmattgaggttgcaaatgatacagattacggtttaactggtgcagtgattacaaataatcgcgagcattggattaaagcggtaaacgaatttgatgtaggyaatttataccttaacagaggytgtacttcagcagttgttggataccatccatttggtggtttcaaaatgtcaggtacggacgctaaaacaggtagyccagactacttattacacttcttagaacaaaaggttgtttcagaaatgttctaa

SEQ ID NO: 614 - DNA, 441 bp, Staphylococcus aureus
atgctatcacaagaatttttcaatagttttataacaatatatcgcccstatttaaaattarcmgagcckattttrgaaaaacacaatatatattatggycaatggttaatcttacgcgatatcgctaaacatcarcccactactctyattgaaatttcacatagacgtgcaattgaaaagcctactgcaagaaaaactttaaaagctctaatagaaaatgaccttataacagtwgaaaacagtttagaggataaacgacaaaagtttttaactttaacacctaaagggcatgaattatatgagattgtttgtcttgatgtacaaaagctccaacaagcagtagttgccaaaacaaacatttcrcaagatcaaatgcaagaaaccataaatgtgatgaatcaaattcatraratattattaaaggagrcacacaatgactaa

SEQ ID NO: 615 - DNA, 600 bp, Staphylococcus aureus
atgactgaaaaagaaaaaatgttagcagaaaaatggtacgatgcaaactttgatcaakacttaatcaatgaacgtgcacgagcgaaagatatttgctttgaattaaatcatacaarrccgagtgmyamaaataaaagaaaggaattaatygatsaattatttcaaacaacaacagacaatgtaagtatttcgattccttttgatacagattatggttggaacgttaaactaggaaaaaatgtctatgtaaacaccaattgttaytttatggatggtggacagattacaattggcgataatgtttttataggacctaattgtggattctacacagcracacatccacttaatttyyatcatagaaatgaaggwtwtgaaaaagcmggaccmattmatattggcagtaatacttggtttggcggwcatgtagccgtgytwccrggrgtgacgattggagaaggcagtgtgattggtgctggtagtgttgtcacyaaagatattccgccacacagyttagcggttggaaacccttgtaaagtcgttcgtaaaattgataatgasstaccatcmgaarcattraaygaygaaacrmtaaaktag

SEQ ID NO: 616 - DNA, 1017 bp, Staphylococcus aureus
atggagaaaattgagaatgaaatagttaataagacatatcttgcaattaattctttggaagaattaagaaatatgattggtattaaatcagactatttttataaatgtctttatgtgaatgaccatttttataatgttatcaaaatacctaaacgaaaaaaagatgaatatagagaattgatgattcctaatatggctctcaaaaatatccaaaggtggattttagataatgtattgtacagaaggcaagttcataaatgtgcaactggttttgttcctaggaaatcaatagtgaacaatgcaatcccacacgttgggcagaaatatatattgaaaatggatatagaaaacttttttccgagtatcacatttaagcaggttagaaaaatattttctgagatgggctataaatttgaacttgcgacagcactcgcaaatttgtgtacagtgaataatcagttgcctcaaggtgcaccaaccagtccatatatagctaatatcatcttttacaatatagataaaagaatcttttcttattgtcaaaaaaataatttgagatatactcgatatgctgatgatattactatttctggatctaataaagtaagttttagtaaagaaattatcagggaaatagtaaaccaatataattttagaattaatgaaagtaagacaattatgtttaaaccaggagacagaaaaaaagttactggtattatagttaatgaaaaaatatcggttcctaaaactttaataagagaggtcaggaagcaaatttattttgtaaataagtttggattagaagaacacttaattcgaaataattattcattggattatgagcagcaatttattatgagtatatatggaaaaatcagttttattaaaatgattgatttcaagaaaggcgttagtttacaaaagaaatttaatgaagtactaggtaatatagaatcgtctaacatgtacagagataatattgactttgatgatatagaactacattggataaattaa

SEQ ID NO: 617 - DNA, 666 bp, Staphylococcus aureus
ttgcatacatataaccgaagatgcagaaaaaaaataatggatacttcaataaaaaacggtattgagataaaaatagcttttgtacaaaaaacagagaaatattttataaataataaagagctagagaaaaaattttatgaatttgaaaaggatattgtaaatccaggtaagtactacaacttaggctataaaaatactcaagcattagtatcaaattttagaaatactccaaataatacactgagccttttttggcatgagaatgatcagtggaaacctttatttaaaagaaaagctaaaaatgattttagtaataaatggaaagaaaaggttcatattattagatggtttctggcatataaaaaagttcctaaaattttggtagataaaattatagcaataatgtatgttaaaaatcatgctgatatgaaatcgaaatttttagaaattgagattaataggatattattatataatgacaatatattgcaagaatgtctttctcaaaaatttctaattaaacaaacagatttttatattattacttatgcaggaatagaattactaaaaaaatatggattagaaaaaataactttaagtaatatactttatgaatttaagagtaacggattacatcagcagaaaaattttgatggtaataaataa

SEQ ID NO: 618 - DNA, 648 bp, Staphylococcus aureus
ttgaaacaaaatgtagaatttaatcaagcggttattaagtttaataaaagaaataaaataaataaatcatctaatgatgagtatataaaaaattttagaaataaattcggaaaatttctaagtcaaagttttttgaatagtaataatgtaataaagcaagagattataaaaattattaaagatgaatattattattatgatcaagaaaatacgaagaaatatttaataaagttttgtcaagatcttatagaacatataaaagagcacagaaatcaaatcaatgattgtcactttacaaatatattaaataaagatgcagaaaaaactaatagttcaagtatcttaacttcattatttttaactgcaaacaatataccaaataatctatcatctaatttttctaaagcagtggaatattattttgcaaaaaacaaggaaatatatggagatggatatgaaaagtatttagacgagtattttagaaatgttttaggcgaaaaaagttatttaattttgatagatgatttttcagggacaggaaaatcaatcagcgactttattgatgcaataaaaaagtatatactaacattaaaaatagagattattatattttgcatacatataaccgaagatgcagaaaaaaaataa

SEQ ID NO: 619 - DNA, 156 bp, Staphylococcus aureus
gtgaatgtaagaaactcatataaagtgaaacataaatatttgaaagtcaaccgctctaatatgattacatataagtccaatcaatattcagcatcagctgaatattgtgggaaaacagttgaagttcaagtttatgatcaaaaacaacacgtttaa

SEQ ID NO: 620 - DNA, 1455 bp, Staphylococcus aureus
atgaccaaagaacaacaacttgcagaacgaattattgctgcagtaggtggtatggataatatagatagtgtcatgaactgyatgacacgtgtgcgtattaaagtattagatgaraataaagtagatgaccaagaactaaggcayattgatggtgtcatgggtgttatacacgatgaacgyattcaagttgtrgttggacctggtacagtcaataaagtggctaatcatatggckgarttaagtggtgttaaactaggtgacccaataccacacmatcacaatgatagtgaaaaaatggactataaatcatatgcagctgataaagcaaaggcraataargaagcrcataaagcaaaacaaaagaatggtaagttgaataaagtattgaaatcaattgccaatatctttataccgttgattcctgcatttattggagctggattaattggtggtattgcagcagtactgagtaacttaatggtggcaggctatatttcaggtgcttggattacgcaacttataacagtattyaatgtcattaaagacggtatgttagcatacttagctattttyactggtattaatgcggctaaagaatttggtgcracaccaggacttggtggcgtgattggtggtacaacgttattaacgggtattgctggtaaaaatattttaatgaatgtyttcactggagaaccattgcaacctggacaaggtggrattattggygttatttttgccgtttggattttaagtattgtcgaaaagagattrcataaaattgtgccaaatgcgattgatattattgtaacgccgactattgcattgttgattgtaggactattaactatctttatctttatgccattagcaggttttgtttcagacagtttagtttcagtagttaacggaattattagtattggtggcgtatttagtggatttatcattggwgcaagcttcctaccgttagttatgttagggcttcatcatatttttacgccaattcatatagaaatgattaaccaatcwggtgctacttacttattgccaattgcagcgatggctggtgctggacaagtaggtgccgcattagcactttgggtaagatgtaaacgcaacacaacattacgtaatactttaaaaggtgcattgccagttggtttcctaggtatyggagaaccattaatctatggtgtgactttgccattaggtcgacctttcttaactgcttgtattggyggtggtattggtggcgctgtaataggtggaattggacatattggtgccaaagcaataggcccaagtggtgtgtcactmttaccattaatctcagataatatgtatttaggttatattgcaggattacttgctgcrtatgctggtggattcgtttgtacatatttatttggaacgacaaaggcgatgcgacagacagatttgttgggtgattaa

SEQ ID NO: 621 - DNA, 264 bp, Staphylococcus aureus
atgaatatgcatattttatataacttacgaactaaacataatttagaaattgacgaattagcacarcaattaaatgagaaatatggtactaaatatgaagcacatcaaatttgggaatgggagaatcatcaycatgaacctaaatttaaagaygccatgcatttagctgayttctttgatgcaccatatgaaatgtttttagaaagtaaggttaaagaatatcagaaacatttagaagaagtcgatattcgcatggataaatag

SEQ ID NO: 622 - DNA, 1212 bp, Staphylococcus aureus
atgactaatcaaggctcattaaataaatcacctattttcaccaaaagttttacaatyaactttttwgtcaaytttatcgtatacctatgcatgtatttgttacttgtagttattgctggctatagtaagcaagctttcgacgcttccgattcattagccggattagttgtaggactatttattgtyggktctttaattggtcgatttgctacaggtaaatttgtaaatcaaatcggacctaaacgattattatttattggtttaattgctttaattatcacgcaattactttattttattgatggatctttagcttttttaatctttgtacgtctcataaacggtatcrcaactgcagttgtgacaactgcaacaggtactattgcggcatacgttacccctgttaatagaaaaagtgaaggcatcagtttattttcyttaagtttagtattaggtacagcgattggcccatttctaggcatgttacttattacaaaatacscaattgayttactgtttattatttgtgtyatattaggcatactcggastcattatctcattatttataaaagttgatttcgaagtaacaaataryaaaactgaaactratgtcattrataaaccaagatttagtattcatcaatttattgcaaaagaggccattcctgttgctgtwattatgcttttaattggcgttacctatgcgtcmatcctaacttatttacaagcatttgctwtagagcgacacctagtmactgcagcaagctatttctttatttgctatgctatagcatcgttaattactagacctattgctggtagattgatggatgataaaaatgaaaatattattgtctayccagcatttatcatgcttttcctttcatttgtrtgcttaatttcaagctatcaaagctggttaatattacttgctggtgcttgcctaggtttagggtatggaaatttatcatctgcaatgcaatctattgcgataaaagtctcaccyccgattaaatatggtatcgcgacatctactttttacgttggtctagatgcaggtgtcggcttcggtccatcattccttgggttatttactcatatgttttcatatagtgaaatcttcggytttatggccgctttagcaatcattactatgcttgtttacttcttaattcatggacgtcatgtaactagaaatgccatgaactaa

SEQ ID NO: 623 - DNA, 999 bp, Staphylococcus aureus
atgacaaaaattaaaatcatgagtgtacgtgatgaagatatgccttatatcaaggcgtgggcagagaaacatcatgttgaggtagatattactaaagaagcattaactgatgacaatgttgaaggtgtcgctggttatgatggcttatcgctatcacaacaaataccattatcagagcatgtttataaacgattaaatgaactwgrtattaaacaaatcgcacaacgtagtgctggatttgayacatatgatttggagttagcaaacaagtataacttkattgtgtcaaatgtgccgtcatactctccgaattcaattgcggagtttgctgtgaaccaggctattaatgtggttcgtcattttaatcaaattcaaacgaaagtgcgrgagcatgattttagatgggaacctactattttatcgaaatccattaaagatttaaaagtagctgttattggtacaggtcgaattggccgtgtagtagccgatatatttgccaatggttatcaaagtgatgtggtcgcatacgacccgtttcctaatgctaaaattgcaacgtatgtcgattacaaagatacgattgaggaagcggttgaaggtgctgatatcgtgacattacatgtacctgcaacgaaatataatcattatctatttaatgctgaattatttaaacattttaaaaaggrcgcagtatttgtcaattgtgcgagaggttctttagtagatactaaggckttattagacgcattagacaatggtgtgattaaaggtgcagcacttgatacgtatgaatttgaacgcaaacttttcccaagtgatcaaaggggcaaaacacygaacgatccattgttagaatcgttgattgacagggaagatgtcatattaacaccacatattgcgttttatactgaagctgcagttraaaatctaattgtygatgcattagatgcaacattagatgtattgcagactggagatactaggttacgagtaaattaa

SEQ ID NO: 624 - DNA, 237 bp, Staphylococcus aureus
atgcttttttcattattcgttgaaaaagaagagtcacaaaagttaacatatttaaaagaacttggtgaagatgacgaatataaatatgttgccaaaatagatagtaaaacatctaaattatgtcattcactcaacggaaaaatatttatagttaaagatatgataccaggtgtgaatgcgccacctatgcatccttggtgtagaagtaccacagtgccacatgttggcaattggtga

SEQ ID NO: 625 - DNA, 168 bp, Staphylococcus aureus
ttgtttagatttatatcttttggacaacttgttgtttattcgacaacatttatacctaaaaaagatatattacaactcaatggcatggagtgtgacatcaatgttaaagaaccactaaagatttattatgtagtgattcttaagagtgggatagaaatgatattctca

SEQ ID NO: 626 - DNA, 1155 bp, Staphylococcus aureus
atgatctctaacaaattagcaaatatccctgatagttatttygggaaaacgatgggacgtaaaatcgaacatggaccattgccattaattaatatggcagttggratccctgatgggccyacgccacaaggtattattgatcattttcaamaagcactaactattcctgaaaatcaaaaatatggtgcttttcatggtaaagaagcgttcaagcaagctattgtagatttttatcaaagacaatataatgtgacgttagataaagaagatgaagtrtgyattttatatggtacaaaaaatggattagtggcagtaccaacatgtgttatcaatccaggagactatgtattactacctgayccaggctacackgaytatttagcaggtgtacttttagctgatggcaagccwgtyccgcttaatttagaaccgccrcattatttgccagattggtccamagttgattcamaaataatagataaaacaaaactcatttatttaacgtatccaaataatccaactggatcgacagctacgaaagaagtttttgatgaagcgatagctaaatttaaagrtacagacactaaaatcgtgcatgattttgcttatggtgcyttcggtttcgacgctaaaaatcctagtatacttgcttcggaaaatgggaaagatgttgcgattgaaatttattccttgtctaaaggttataacatgtcaggttttagagtcggttttgcagttggtaataaagatatgattcaagctttgaaaaagtaccaaacgcacacaaatgctgggatgtttggtgcattacaagatgccgcaatatatgctttgaatcattatgatgattttttagaagaacaaagcaatgtatttaaarcacgtcgtgaccgattcgaagccatgcttrcaaaagctgatttgccatttkttcatgctaaaggtggcatatatgtatggttggaaacaccgcctggttatgacagcgagcaatttgagcaatttttagtgmaagagaagtcaatacttgttgctccagggaaaccatttggagagaatggtaatcgttatgtgagaatytcattggcgttagatgaccagmaattagacgaagctgcaataagattaacagaactagcatatttatatgaataa

SEQ ID NO: 627 - DNA, 1408 bp, Staphylococcus aureus
atgaatcaattaaagaaagayggctttacatttgatatgggycccrcaattgtcatgatgccagatgtttataaagatgtwtttacarygtgtggtaaaaattatgaagattatattgaattgagacaattacgttatatttacgatgtgtattttgaccrcgatgatygtataacggtgcctacagatttagctgaattacagcamatgctagaaagtatagaacctggttcaacgcatggttttatgtcctttttaacggatgtttataaaaaatatgaaattgcacgtcgctatttcttagaaagaacgtatcgcaaaccragtgacttttataatatgacgtcacttgtgcaaggtgctaagttaaaaacgttaaatcatgcagatcagctaattgaacattatattgataacgaaaagatacaaaagcttttagcgtttcaaacgttatacataggaattgatccaaaacgaggcccgtcactatattcaattattcctatgattgaaatgatgtttggtgtgcattttattaaaggcggtatgtatggyatggctcaagggctagcgcaattaaataaagayttaggcgttaatattgaactwaatgctgaaattgagcaaattattattgatcctaaattcaaacgrgccgatgcgataaaagtgaatggtgacataagaaaatttgataaaattttatgtacggctgatttccctagtgttgcggaatcattaatgccagattttgcacctattaaaaagtatccaccacataaaattgcagacttagattactcttgttcagcatttttaatgtatatcggtatagatattgatgtgacagatcaagtgagacttcataatgttatttttkcagatgaytttagaggmaayattgaagaaatatttgarggrcgwttatcryatgatccttctatttatgtgtatgtwccwgcggtygctgayaaatcwcttgcrccasaaggmmaaacwggtatttatgtkytaatgccracrccrgaacttaaaacaggtagcggaatcgattggtcagatgaagcwttracrsamcaaataaargawrttatttatcgtaaattagcaacdattgaagtatttgaagatataaaatcgcatattgtttcagaaacaatctttacgccaaatgattttgagcaaacgtatcatgcgaaatttggttcggcattcggtttaatgccaactttagcgcaaagtaattattatcgtccacaaaatgtatcgcgagattataaagatttatattttgcaggtgcaagtacgcayccaggtgcaggcgttcctattgtcttaacragtgcgaaaataactgtagaygaaatgattaaagatattgagcrrggcgtrtaagggagtagtctaa

SEQ ID NO: 628 - DNA, 495 bp, Staphylococcus aureus
atgactgagtttactcatattaatcaacaaggccacgccaaaatggtcgatgtatcagacaaacaaattacaaaaagaactgctgtcgctcattcaagcattactgtraatraaactatttwtaagcagatttctaataacaccaataccaaaggcaatgtattgaacactgctcaaatcgctggtattatggctgccaaaaatacatcaacamttattccgatgtgycatccattaccattgactggcatagatgttcacttcarctgggatgaaacaaatgcacccctttatactttaaacattcaaacaactgtctctacaactggcaaaaccggtgttgaaatggaagctttaaccgctgcatcagcaacggctttaaccatttacgacatgacgaaagcagttgataaaggtatgattattggcgaaacctaccttgaaagcaagtctggcggtaaatctggagattttcaacgccaatyarrtcaataa

SEQ ID NO: 629 - DNA, 798 bp, Staphylococcus aureus
atgaacaaagatgtatctttaggtcaaccaattgttagatatgaagatggaaaattattcaatacaacagatcaatatgtgacagaatttccacttacaattatggtgaatggtgaagaatttgcgactgttatatgcagtccaacaaaccttgaggagttagtcattggatttctggcttcggaaggtgccattttaaagcgagatgaattaaaatctgtrctgattgatgatagtaaaggwtttgcccatgttgaactkaataaagatttaggcgatcgctttcaatattccacaaaacgaatgattgcatcttgttgyggaaagagtcgtgagttttattttcaaaatgatgctgctrtygctaaaacwtctatgtctaaaatcactttaacwccamwrcaaattattaayatgatgackcgwttacaaagtgcmagtcatatttaccaagaaacaggtggcytrcataatgctgctmtaagcgatggtttgacattttttgtacatcgacaagacattggyagacataacgctctagataaattatatggattttgtatycagcgacatattactgtccgagataaagtattaattttyagtggacgtatttcatcagaaattttaattaaagccgcraaaatyggtgttggcgtcattttatctaaatcwgctccgacaacgcttgctgtaaccttagctaatgacctaaatattacggcagtwggwtttattcgaaatggtggctttaatatatayagtcatccagaacgtatcatygaytctgaacaataa

SEQ ID NO: 630 - DNA, 864 bp, Staphylococcus aureus
atgacaatgatggatatgaattttaaatattgtcataaaatcatgaagaaacattcaaaaagcttttcttacgcttttgacttgttaccagaagatcaaagaaaagcggtttgggcaatttatgctgtgtgtcgtaaaattgatgacagtatagatgtttatggcgatattcaatttttaawycaaataaaagaagatatacaatctattgaaaaatacccatatgaayatcatcactttcaaagtgatcgtagaatmatgatggcvcttcagcatgttgcayaacataaaaatatcgcctttcaatctttytataatctcattgatactgtatataaagatcaacattttacaatgtttgaaacggacgctgaattattcggatattgttatggtgttgctggtacagtaggtgaagtattgacgccgattttaagtgatcatgaaacrcatcagacwtacgatgtcgcaagaagrcttggtgaatcgttgcaattgattaatatattaagagatgtcggtgaagattttgamaatgaacggrtatattttagtaagcaacgattaaagcaatatgaagttgatattgctgaagtgtaccaaaatggtgttaataatcattatattgacttatgggaatattatgcagctatcgcagaaaaagattttcragatgttatggatcaaatcaaagtatttagtattgaagcaymaccaatcatagaattagcagcacgtatatatattgaaatactggacgaagtgagacaggctaactatacattacatgaacgtgtttttgtggakaagmggaaaaargcaaagttgtttcatgaaataaatagtaaatatcatagaatatag

SEQ ID NO: 631 - DNA, 303 bp, Staphylococcus aureus
ttgcattttacacaacgagagcaagacaaattaatgattgtagtggcggcggaagttgcacgtcgtcgtaaagcacgtggtttgaaactaaatcatcctgaggcattagctttaatcagcgatgaattattagaaggtgcacgcgatggtaagaccgttgcagagttaatgagttatggtagacaaattctaaacaaagaagatgtcatggatggtgtcgaacacatgattacagatatcgaaatcgaggctacgttccccgatggtactaagttaatcacagtacatcaccctattgtttaa

SEQ ID NO: 632 - DNA, 1128 bp, Staphylococcus aureus
atgaaatggttatcacgaatattaacagtaatagtgaccatgtctatggcgtgtggtgcattgatatttaatcgtagacatcagctaaagrcgaaaacgctgaacttcaatcataaagcattaacaattattattccggctagaaaygaagaaaaaagaataggtcatttactacattcgataatacaacagcaagttccagtagatgtcattgttatgaatgacggatcgacagatgaaacagcaygtgtagcrcgttcatatggtgcgactgtagtagatgttgttgatgatrctgacrgcaaatggtatgggaaatcacatgcttgttatcaaggtgtgacgcatgcatgtacgaatcgyattgcytttgtagatgctgatgtaactttcttaaggaaagatgctgttgaarcgttgattaatcagtatcaattacaaggtgaaaaaggattgttaagcgtacagccttatcatataacaaagcgtttctacgaagggttttcagcratatttaatttaatgacagtcgttggtatgaatgtattttctaccttagacgacggtcggactaaccagcatgcatttggaccggtgacattaacaaataaagaagattattatgcaactggaggtcataaaagtgcraaccgtcatattattgaaggatttgctttaggaagtgcatatacttcacaatcattgcccgtaacagtttatgaaggrtktccatttgttgcatttcgcatgtatcaagaaggatttcagtcattacaagaaggatggacaaagcatttgtcractggggcaggtggcacaaagcctaagatcatgrcagcaattgtgttgtggttgttyggttctatwgcgagtattttagggctatgtcttagtttaaaatatcgccaaatgtctgtargaaaaatgktarcastttacttgagctatactacacaatttatttatctgcatcgaagggtcggccaattttctaatttattaatggtatgtcatccattgttatttatgttttttactaaaattttcatccaatcttggaaacaaacgcatcgktatggtgtagttgaatggaaaggtcgtcaatattctatatctaaagaacaataa

SEQ ID NO: 633 - DNA, 411 bp, Staphylococcus aureus
atgataccwggagaaattattacaaaaagtacagaggttgaaattaataaccatcatcctgaaacagttatcgaagttgaaaatacaggagatcgaccaattcaagtgggctcacattttcatttttatgaagcaaatgcagcattagatttcgaacgtgaaatggcatatggaaaacatttagatatyccagctggagcagctgtycgatttgaacctggggataaaaaagaagttcaattagttgaatatgctggcaaacgtaaaatttttggttttcgtggtatggtcaatggtcctatcgatgagtcacgtgtctatcgcccaactgatgaaaatgatgmatatgcaggygtattcggagataacggtrctgaaaacgtgaataaaaaaggaggaaaaagatcatga

SEQ ID NO: 634 - DNA, 1374 bp, Staphylococcus aureus
gtgaatcgtcatgartcagatgrctttggctttgatttaggtccatctattttaacgatgccttatatttttgaaaaattattcgaatatagcaagaagcaaatgtcagactacgttacaatcaagcgwttgccacatcaatggcgtagcttttttccagatggmacgactatcgatttgtatgaaggtattaaagaaacaggtcagcataatgcgatattgtcgaaacaggatatagaggaactgcaaaattatttgaattatacaagacgaatcgatcgtattactgaaaaagggtatttyaactatggtttagatacactatctcaaattattaaatttcatgggccattaaatgcwcttattaattatgattatgtacatactatgcaacaggccatagacaagcgtatctcgaatccatacttgcgacaaatgttaggctattttatcaaatatgtaggttcttcatcrtacgatgcgccagctgtattatctatgttattccatatgcaacaagagcaaggcctttggtatgtagaaggtggaatccatcatttagccaatgccttggaaaagctagcgcgtgaagaaggtgtcacaattcatacaggtrcacgtgtggacaatattaaaacatatsaaagaygtgtgacgggtgtcagattagatacaggtgagtttgtaaaggcagattatattatttcaaatatggaagtcatacctacttataaatatttamttcaccttgatactcaacgattaaacaaattagagmgggaatttgagccrgcaagctcaggatatgtgatgcatttaggtgttgcttgccaatacccgcaattagcacatcataatttcttttttacggaaaatgcttatctcaattatcaacaagtttttcatgaaaaggtattgccagatgatccgaccatttatytagtaaatacgaataaaactgatcacacacaagcgccagtaggttatgaaaatatcaaagtcttaccacatattccatatattcaagaycagccttttacmactgaagattatgcgaagtttagggataaaattttggataaattagaaaaaatgggactyactgatttaagaaaacacattatttatgaagatgtttggacaccggaggatattgaaaaaaattatcgttctaatcgtggtgcaatatatggtgttgtagcagataaaaagaaaaacaaaggatttaaatttcctaaagaaagtcagtattttgaaaacttgtactttgtaggkggatcagtaaatcctggtggtggcatrccaatggttacattaagtgggcaacaagtcgcagacaaaataaacgcgcgagaagcgaagaataggaagtga

SEQ ID NO: 635 - DNA, 1716 bp, Staphylococcus aureus
atgagctttaaaatgacgcaaaatcaatatacgagcttatacggtccaactgttggagattcyattcgtttaggtgatacgaatctatttgctcaaatwgaaaaagactatgcggtttatggtgaagaagctacttttggtggtggtaaatctattagagacggtatggcgcaaaatcctcgtgtaacacgtgatgaygtgaacgttgcagaccttgtcatttctaatgccgttattatcgattacgataaagtggttaaagctgatataggcattaaaaatggttatattttcgccataggtaatgccggcaacccagatataatggataatgtcgacattattataggttcaacaacagatatcattgccgctgaaggtaaaatcgtcactgctggtggtattgatactcatgttcattttattaatcctgaacaagcagargtcgcattagaaagtggyattacgactcatattggtggtggtactggtgcttcagaaggttctaaagcaacwactgtaactccaggtccatggcatattcatagaatgttagaagctgccgaaggtttaccgattaatgtcggttttacaggtaaaggacaagcaacaaatccaactgcactcattgaacaaatcaatgccggagcaattggattaaaagtacatgaagactggggtgcaacaccatctgctttgagtcatgcattagatgttgctgatgaatttgatgttcaaattgcattacatgcagatactttaaatgaagcaggatttatggaagacacaatggctgctgttaaagaccgtgtacttcatatgtaccatactgaaggtgctggtggcggtcatgcgcctgatttaattaaatcmgctgcatttycaaatattttaccttcatctacaaatccaactttgccttatacacataatactgtagatgaacatttagatatggtaatgattactcaccatttaaatgcggctattcctgaagatatcgcattcgcagattcacgtattcgtaaagaaacgattgcagcwgaagatgttctgcaagatatgggtgtattcagtatgattagttccgattcacargcaatgggccgtgtaggtgaagtaattacacgaacatggcaagtagcacatcgcatgaaagaacaacgtggtcctttagatggtgattwtgwacataatgataataatcgyatcaaacgttatatcgctaaatatacaattaacccagcaattacacatggtatttctgaatatgtaggatctatcgagccgggcaaactagctgayattgtcttatgggayccaattttctttggkgttaaacctgaattagttgtaaagggcggattaattaactctgccgtaaatggygatgcaaatggttctatacctacatctgaaccgatgaagtaccgtaaaatgtatggtcaatacggcggaaaccttacaagtacgtcaatgacattcgtgtctaaaactgcttatgaaaatggtatcaatcgtgcattaaatttaaaacgcatggtgcgtccagttaaaaatattagacaattatctaaagcagatatgaaaaataacagygcaacacctaaattagacgttgatccacaaacatatgaagtatatgtagatggagaaaaaattacaagtaatgcagcaactgagttaccattaactcaaagatacttcttattctag

SEQ ID NO: 636 - DNA, 489 bp, Staphylococcus aureus
atgaaaaaatatatyaaaacagcatttttytgtagtatgtattggttaattgttcaactaaatatagcaaatttaggtacaagaattcctgayaagtattttcgtcagaagyayataatatttaaatcatttaabtttgagaagcatggaaaattttggaacaaatggttttacgtaagaaaatggaarcataagattttagatggtcatmagcttaatcraaatatatatgatcagcgtcatttaatgacaatcaataytgatgaaatygaaaaaatgattatagagacaaagagggcagagttgattcattggatatcgatacttccagtcatyatattcaataaaggcyctcgtktagtaaagtatataaatattttctatgcaatgatagctaatgttccaatcattattgtgcaacgctataatcgaccgagattaacgcagttactacgcatattaaaacgaaraggtgaacgtcatgactaa

SEQ ID NO: 637 - DNA, 453 bp, Staphylococcus aureus
atgattgttgaagaaatccaaggcaatattgccaatttgtcaaattcagaaaaacaaaagcacgtcgaaaaagtataccttgaaaattcagatctygttaaacgtattcaaagagtcgtwacagaycatggcactgaaatwggcattcgtttaaaacaacctattgacttacaatatggagatattttatacgcagatgaccataatatgattrttgtggatgttaattcagaagatcttttagtgattcaaccaagaacattgcaagaaatgggagatatagcccatcaattaggaaatcgtcatttgccagcacaatttacagagactgaaatgctagtacaatatgattatttagttgaagatttattaaaaagtttaggcatcccatatgttcgagaagaccgtaaagttaataaggctttyagacatataggrcattctcatgattga

SEQ ID NO: 638 - DNA, 768 bp, Staphylococcus aureus
atgaaaaaaatcgttacagctacaatcgctacagcaggacttgccactatcgcatttgcaggacatgatgcacaagccgcagaacaaaataacaatggatataattctaatgacgctcaatcatacagctatacgtatacaattgatgcacaaggtaattatcattacacttggacaggaaattggaatccaagtcaattaacgcaaaacaacacatactaytacaayaactacaatacttatagttataacaatgcatcttacaataactactataatcattcatatcaatacaataactatacaaacaatagycaaacagcaacaaataactattayactggtggttcaggtgcaagttatagcacaacaagyaataatgttcatgtgactacaactgcagcgccatcttcaaatggtcgttcaatttctaatggttatgcatcaggaagtaacttatatacttcaggacaatgtacttattatgtatttgatcgtgttggtgggaaaattggttcaacatggggyaaygcwagtaattgggctarcgcagctgcatcatctggctatacagtgaacaatacaccaaaagytggtgctatcatgcaaacaacacaaggctattacggtcatgttgcttacgttgaaggcgttaacagcaacggttctgttcgtgtttcagaaatgaactatggacatggtgctggtgtggttacrtctcgtacaatttcagcaaaccaagcaggttcatataatttcattcattaa

SEQ ID NO: 639 - DNA, 690 bp, Staphylococcus aureus
atgattgatcatacacacttaagattatttcagttctgtgattcacartttccaacaggtgctttcagtcattcatttggtcttgaaacatatattcaacgaaatataattcatgaygatcatacttttattgcttggttaaaaatgtttttacaagagcaacttacctattctgatggtttagccatgcgtttagtttatgatgcattggaaaatgatgatacacaaaaagtattacacatagataarctgatgtttgttcaaaacttacctaaagaaacacgtgttggtgcaaaacaaatggggactcgcatggttaaattggctttagaactttataatarcccatggattgcttggtatcatcaacaaatgcaagataagaaagcaaagttaaatccagctatttgttttactatgctaggccatyatttaggtgtagatattgaaacgattattgattactatttatatcaaaatgtttcaagtttaactcaaaatgctgttcgtgctattccacttggacaaactgctggtcaaaagatagttactcacatgattccttatatagaagraacaagaaagcagattttcgaattaaaagaagcagattttggcatgacagcgcctggtttagaactaaatcaaatggcgcatgagaaygtcaatgttagaattttcatatcatag

SEQ ID NO: 640 - DNA, 1812 bp, Staphylococcus aureus
atggatacaaaagactttaaacgtttagaaaaaatgtattccccgcgatacttaccyggattagatggrttgagggcattcgcagttataggaatcattatttatcacttgaatgcacaatggttaagtgggggctttttaggagtagatacattcttcgttatttcaggttatttaataacaagtttgttgataagtgagtattatcggacgcaaaaaatygatttgctagagttttggaagcgacgattgaaacgactcattccggcagtgttrtttttaatytgtgtcgtgcttacgttcacmytgatatttaaaccggaattgattatacaaatgaaacgagatgctattgcagctatattctatgtttcaaactggtggtacatytcacagaatgtagattattttaaccaatttgctattgaaccactcaaacatttatggtctttagccattgaagaacaattttacttgcttttcccattggttatcacgttcttattacatagatttaaaccgagaaatattattcaaacgctatttattgtatcgttgatttctttaggacttatgatagtgattcatttcatcactggagataattcacgtgtgtattttgggacagatacacgactgcaaactttattgcttggttgtatattagcatttatttggcctccgtttgctttgaaaaaagatatttctaaaaagattgtcgtatcattagatattatagggatatctggttttgcggttctaatgactttgttctttatagttggmgaccaagatcaatggatctataatggaggattttacattatatcatttgcaactttattcattattgcrattgcggtacatccttctagtttatttgctaaatttttaagtatgaaacctttactaattataggtaaacgatcatatagcttatayttatggcattatcctatcattgtttttgtgaacagttattacgtacaaggacaaataccggtatacgtttatattatagaaattttgttaacagcgttaatggctgaaatttcgtatcgctttattgaaacacctatacgtaaaaaaggatttaaagcttttgcatttttacctaaaaagaagrgkcaatttgctagaacwgtgttagttatcytattattgrttccrtctatcrtygtkctcagtggrcartttgatgcrcttggyaaacaacatgaagcygagaagaaagagaagaagacggaatttaaaacaacgaagaaaaargtcgttaaaaaagataagcaagaggataagcagacrgcgaatagyaaagaggatattaaaaagtcatcaccactattaattggtgactcggtyatggtggatattggtaatgtctttactaagaaaataccaaatgcacaaattgatggtaaagttggacggcaactcgttgatgctacaccaattgtgaaatcgcaatataaagactatgctaaaaaaggtcaaaaagttgtagtagagcttggtacaaatggggcatttacgaaagatcaattaaatgaactattggatagttttggaaaagcagacatwtatttagtttctattagagtacctagagattatgaaggtagaataaataaattaatttatgaggcagctgaaaagcgctctaatgtacatctagtcgattggtataaagcttctgcaggtcatccggartactttgcatatgacggtattcacttagaatatgcaggtagtaaagcgctgactgatttgattgtaaaaacgatggaaacacatgctacaaataagaaataa

SEQ ID NO: 641 - DNA, 615 bp, Staphylococcus aureus
gtggcaaatccgattaaaattggtattggtggtcctgtaggtgcaggtaaaacacaattaattgaaaaagttgtaaaacgtctttcaaaagaaatgagyatcggcgttattacaaatgatatatatacaaaagaagacgaaaagatattagtaaattcaggagttctacctgaaagtcgwatcattggtgttgaaactggtggatgtcctcatactgcgattcgtgaagatgcatctatgaactttgcagcaatagacgaattattagaacgtcatgacgatatagaactaattttcatagaatctggtggcgataacttagcagcaacatttagyccagaacttgttgacttttcaatwtatattatcgatgttgctcaaggtgaaaagattccacgtaaaggtggtcaaggtatgattaagtcagatttctttrtaattaacaaaactgatttagctccctatgtwggtgcatcattagaacaaatggctgaagatactaaagtatttcgtggtaaacgtccatttacttttactaacttaaaaacygacgaaggtttggatgaagttatcgattggattgaacgcgacactttactcaaaggattatcataa

SEQ ID NO: 642 - DNA, 489 bp, Staphylococcus aureus
atggctataaacataattgaatataataggtcttataaggaagagctaatcgagtttattttatcgattcaaaaaaatgaatttaatataaaaattgatagagatgatcaacctgatttggagaacatcgaacataactatttgaatartggagggcaattttggcttgcaataaacaatcatcaaaatattgttggtactataggtttgattagactagataataatatgtctgcacttaaaaaaatgtttgttgataaaggttataggaatttaaaaataggtaaaaaacttttagataaagttataatgacatgtaaagaacaaaatatcgatggtatttatttaggaacaattgataaatttattagtgcacagtatttttattctaataatgrcttccgtgaaattaagcgaggagatttaccaagtagttttcctaaattagatgtagataataggttttattacagaaatttaaaagattaa

SEQ ID NO: 643 - DNA, 876 bp, Staphylococcus aureus
atgacaaatattttatatcgcattgataarcagttgagtgattttacgaagacagaaaagataatcgctgattacattttaaagaatccacataaaatcattgatatgackgtgaatgatttrgcagatgttacgaatgttagtacagcatcaattgttagatttagtcggaaaatgacacatcaaggttttcaagagctaaagattgcgatatctcgatacttacccgaagatattgcaaccaatccacatttagaattgattgaaaatgaatctgtagaaactttgaaaaataaaatgattgctagagcaacgaatacgatgcgatttgtagctactaatattatggatgcgcaaattgatgcaatttgtgatgtgttgaaaaatgccaggacaatatttttatttggatttggcgcatcgagtttgactattggtgatctttttcaaaagttatctcgtattggcttaaatgtcaggttattacatgaaacgcatttacttgtgtcaacatttgcgacgcatgatgatagagattgcatgatttttgtgacgaatcaaggtagtcatagtgaattgcagtcaattgcacaggtggccacacattacagtattcccatcataactatatctagtacagctaataatccagtggctcaaattgcagactatgcattgatttatggcagaactgatgaaaatgaaatgcgtatggcggctacaacktcactatttgcacagttattcacggtagatatattgtactatcgatttgtagcattaaattatcatgcgattctagattgtataacccaatcgaaaatggcacttgataattacmggaagcatcttgcgacgatagattttaaacattag

SEQ ID NO: 644 - DNA, 384 bp, Staphylococcus aureus
atgaaagttcgaatyacttttattattttagcaattttatcgacgattgtttgcttgttcttarcagcaatgyatccaacaggwccaaacacagtaactttygaacagccatatttattcacmctcaacatcattwtaatggtattagtcgcattaccykcacttrttttagctatatwyratwatatgagttttagaatttcttctgctattttacaatttctaggggctatctcttggttctttttatcattgatattatcgctcacacaatttacaccttttacattagcgtcatttataacttcaattattttgttcryaagcrcaattatcacattagcyattggtggkaagtctkttgawaagaatgaytyccmttaa

SEQ ID NO: 645 - DNA, 837 bp, Staphylococcus aureus
atggatgaacaacaatggactgggcaacttgatttaacagtgtttttygatggcaaycgatcagtrtcaagagatattttctttgaaaaagcacttaaagtgatacgtccagtttatctaaatcaatctaccattcctacattttatatagtaaatgtaggtggtggytatttagatggagatcgttaccgtatgaatgtgaatgtcgaagataacgctaaagtgacattgacatctcaaggtgcaacaaaaatatacaagacaccttccaatcatgttgagcagtatcaaacttttaatttraaagataacgcatatttagaatatgtcgctgatccaatcatcgcatatgaaaatgctaaattttatcaacacaatacgttcaatctcaataattctagttcattattttatactgatattttaactcctggttattcaaaaactggcgaagccttcaagtatcaatatatgcatttaataaatgaaatttatattgaagatgagttagtcacatatgataatttattattgaatcctaataaacaatcgatcaatgaaataggttatatggaacattactctcattayggctctgcttacttcatacaygaagatgttaaccaaaaactaatcgattcagtttatgaaaccattagttcttayagcaatacattcgattgtcgtgttgctatttctcaattgcctacacatggytttgcagttagaatttttgcttatcgcacacaaattatagagaaaatacttggaaycatccaaagctatatcgcagaaaatatttatgatcgtaaacttgattttctaagaaaatattaa

SEQ ID NO: 646 - DNA, 702 bp, Staphylococcus aureus
atgaaaaagacaattatggcatcatcattagcagtggcattaggtgtaacaggttacgcagcaggtacaggacatcaagcacacgctgctgaagtaracgttgatcaagcacacttagttgacttagcrcayaatcaycaagatcaattaaatgcagctccaatcaaagatggtgcatatgacatccactttgtaaaagatggtttccaatataacttyacttcaaatggtactacatggtcatggagctatgaagcagctaatggtcaaactgctggtttctcaaacgttgcaggtgcagactacactacttcatacaaccaaggttcaratgtacaatcagtaagctacaatgcacaatcaagtaactcaaacgttgaagctgtttcagctccaacttaccataactacagcacttcaactacttcaagttcagtgagattaagcaatggtaatactgcaggtgctactggttcatcagcagctcaaatcatggctcaacgtactggtgttycagcttctacatgggctgcaatcatcgctcgtgaatcaaatggtcaagtaaatgcttacaacccatcaggtgcttcaggtttattccaaactatgccaggttggggyccracaaacactgttgaccaacaaatcaacgcagctgttaaagcatacaaagcacaaggtttaggtgcttggggattctaa

SEQ ID NO: 647 - DNA, 804 bp, Staphylococcus aureus
atgaagaaaatcgctacagctactatcgcaactgcaggattcgctacaatcgcaattgcatcaggaaatcaagctcatgcttctgagcaagataactacggttataatccaaaygacccaacatcatatagctatacttacactattgatgcacaaggtaactaccattacacatggaaaggtaactggcatccaagtcaattaaaccaagataatggctactacagctattaykrctacaatrgytacwatarctayaacaattacaacaayggttatagctacaataaytacagccgttacaacaactactcaaataataatcaatcatataactacaayaactataatagttacaacacaaacagctaccgtactggtggtttaggtgcaagctacagcacttcaagcaacaatgttcaagtaactacaactatggctccatcatcaaatggccgttcaatctcaagtggttatacttcaggacgtaacttatacacttctggtcaatgtacatactacgtatttgatcgtgtaggtggtaaaatcggttcaacttggggcaatgcaagtaactgggctaacgcagctgcaagagctggttacacagtgaacaatacaccaaaagctggtgcaattatgcaaacaactcaaggtgcatacggtcacgttgcatacgttgaaagtgttaacarcaatggttcagtaagagtttcagaaatgaactatggttatggcccaggtgttgtaacttcacgtacaatctcagctagccaagctgctggttataacttcattcactaa

SEQ ID NO: 648 - DNA, 1056 bp, Staphylococcus aureus
atgacatcaattaaaacaattacacccaaagattttatatttagagttttatcaggtgtcgccataggtattgttgcgggtttagttcctaatgcgatacttggagaaatttttaaatactttatggattatcatccgatttttaaaacgttattaggcgttgtcgttgcaattcaatttacagtacctgctttgattggtgcattggttgccatgaaatttgacctatcgccattagcaattgctgttgtggcragtgcagcatatgtaggaagcggtgcagcgcagtttaaaaatggtgcttggatgattacgggtattggtgatttaattaatacaatgattacagcagcgattgcagtgttrttcattttacttattcaacatcgygtaggtagtatggcwttgattgtattcccaacagttgttggcggtatttcaggtgcaattggtrttttaatattgccgtatacgaaaatgattacaacagccatcggtaatatggttaatggttttacagaattacaaccrattgtcatgagtattttgatttcaatggtatttagtcttattattatttcgccactatcaactgtggccattgcctttgcgataggtattwcaggtttagcagctggatcagcktcaattggtatytccgcgactgaagcagtattgataattggtacaagtaaagtraatcgtttaggggtgccgttatccgtcttctttggaggcgttaaaatgatgatacctaatatggtgaaatatccaattcttatgttaccaatattracracagccattgtatcaggwttggtatcagcattagtaggtattcatggaacgaaagartcagctggatttggttttataggaatggtaggaccgattaatgcatttaaatttatggaggttgattctgcttggttgagtgtcttactaattgtagtagcgttctttgttgtrccatttgtaacagcttggcttgcagatatcatttatcgtaaagtgtttcgtttatatactaatgatatttttaaattcatgggataa

SEQ ID NO: 649 - DNA, 423 bp, Staphylococcus aureus
atgacaactgaaatgaacgacgtaacaaatcatcaaccgaatcgcaaatccaatgatgagaacattatggcgatgcttatctatttattaagtttattcacatctattattggtccactgatwatatggttattgaaaaaagatgaatcgaaactagttgatcgtgctggaaaaaattatcttaactatacgatttcttatattatttggtctatcgttttagtcgttatcactttwataggcgttttcctaattgctacmgatattrrtttcattatyattataggtttcatcattacrtttatcggtattttatccatattcgctttctcaatwttatcttttgtattcacaattattgcgtgtgtcaaatattataatggycaagaatatrtaatacctttaacaattcgatttatttaa

SEQ ID NO: 650 - DNA, 378 bp, Staphylococcus aureus
atgattcaatcaatgtggtttaatttgcatgtgcaagatttagaaaagagcgcacagttttataaagcgttaggatttaaaataaatagaaacccacaaatgttagataaaatggtmggyattcaaataggtcaaacaaccgtaattttaatagaaaacaagcattttcaaaatgtaagtcagcaaagccttaayactgaaccaaatgaagtgatgatttctytaggtgtgaayacaaatgaagaagttgaccagttggtgaataaagtgaaagaagcgggtggcrcagtcgttcaagaaccaacagtaagccaagggttttatggwgcaatgttcaaagatcttgatggacaccattttaattttttrgtctgctaa

SEQ ID NO: 651 - DNA, 582 bp, Staphylococcus aureus
atgaatacaaaatttttaggtaaaacattagtagcaagtgctttagtattaacaacattaggaacaggtttacattcttcatacttaggattaaatacaaataaagttgttaaaacagcaaaagcagaagaaaaaatgacaaatggtcaattgtggaaaaaagttaaagattcattaattgattcaaatattattagtggtaacgaaaatgaagagattacagtaacatatgttaataaaaccggatattcttcaagtgtttctgcctatggtaataataatgacgatttttcaagtactccaagtaatttttctaaacttaaggaaattgacttgaaaaaagataatgtaccgtcagatgattttaatactactgttagtggtgaagatagttggaaaacacttacatctaaattaaaggaaaaaggtttggttacagatggacaaacagtaactattcattgtaatgataagtctgacaatacaaaatcatctgtttcaggtaaagtaggagcagatctgacaagtggcaatggaactacattcaaaaaacgctttattgataaaatcacaattgattaa

SEQ ID NO: 652 - DNA, 474 bp, Staphylococcus aureus
atgcatttgaaactgaacgatgaagatttaaattatttagtaaatctaagtaaagaaatacttgaacaatacaacattaaattagacgaaacttgtaagggagatattaacataacatcatgtaattctgaatactttttcactttaagctattttttaaagcctggaaaagcaactataaatttcagagaatgccgttacaactatagcttgttacgtttaaatcttaatgacggttttcataaaaactctaataatgagaaaataaggggaaatagaattaatatattttctgaaaaagaatttatacaaaaagctgacggcgcaacccatatgaaagcatatcctttaccttataatatatttgacgatagctctgattttgtaaaacaattatttactttgcttgaatatacaaaaactaatcataatgataatattaaaattgaaactaatctattcatgagttggtga

SEQ ID NO: 653 - DNA, 792 bp, Staphylococcus aureus
atgcatgacaacacaattaaatctattagcaaagactattttgattacttacaaacagaatcaaagtttatcccattagaaaatgaaactatagaattttattcacctatcgtcgattattttggtgattctatttctgtaaatatatctttttcaggggatcgatataaactaactgatcatggtgaaactttatggaacatggaacaattaggtatagatttaactagtaataaaaaacaaaaaaagtatcaacttctcaataatattgtacaaaactacagtctagtcatcgaaaataagcacataaacttttatacaaatagaataaacttatctcaagctattcatgattatgttttggctatttccgagatcagttatttgggaatattaaagaaagaaaatattaagtccttatttaaagacgaagtgatgcaatattttctatcaaacagaaagatttatcctaatatatttcccgaatttaaggtagaggggaaatctaagttaatccatagtttcgaagcagtatttccaggagaagctacagagtatgttaaaacaattaaacgaatcgataaaaacaatgcaaaaaatgtccttttcgattggaatgatgttgaaatacatagaaataaaaattttgattctaatgctagacttaatatcattacagaacaacaagatgatattagcgaagcagtatcaacaatgttgtctcaatataatgtagaggtattttcatttgaaaacaaaaaacaacttgaagaaaagtttagtaacgtataa

SEQ ID NO: 654 - DNA, 495 bp, Staphylococcus aureus
atgaggagattactcagtctattactagctagtacaatgattttagtcgcatgtgggaatgctaacaatgaaaataagaaaaaggaagacgaaaaaaaatcagaagtaaaaaaagaagctacgaaaaataatgataaaccaaagaacgaaaagaagaatcaagatataaataaaaacaataatgagcaagttcaaaatgtcaataataaacaaccagtcttaaataataatagtaatcataacaatcaacaacaaagcaataaaaataattacacagttatagaaaacgggaatacagttacagaaatttataatggacaatcacacacaactacaaataaccctattagagaagaatatgtagagggagaaacagacccgatatataaaagagagtataagcatttttatacacctgaagaagctcaaagagcacaagaaaatagcgaccaaattttaagagaaatgggtctcgaaccagaaagatatgaataa

SEQ ID NO: 655 - DNA, 501 bp, Staphylococcus aureus
atgaaaaaattagtaacagcaactacgttaacagcaggaatyggyacagcattagtaggtcawgcayawcatgcagaygctgctgaaaattatacaaattayaacaactataactacaacacgactcaaactacaacgactacracaactacgacaactacatcatcaatttcacattctggtaacttatacactgcaggacaatgtacttggtatgtatatgataaagtwggcggagaaatcggwtctacttggggaaatgctaataattgggctgctgctgcacaaggtgctggattcacagtaaaycatacaccttctaaaggcgctatcctacaatcttctgaaggaccatttggtcacgttgcatatgtagaaagtgtaaacagtgatggttcagttacaatttcagaaatgaattatagtggcggacctttctcagtaagytcwagaactatttctgcaagtgaagcaggtaactayaactacatccatatttaa

SEQ ID NO: 656 - DNA, 822 bp, Staphylococcus aureus
atgaaagatattttagtaataggcgcaacagggaagcaaggtaatgcagttgtaaaacagttgttagaggatggatggtatgtaagtgcattaactagaaataagaataatygtaaactttcagacataggacatccgcatttatcaatcgttgaaggtgatctgagtgatartgttagtttgcaatcagcgatgaaaggkaagtatggyttatacagtattcagccaatcgttaaagatgatgttagcgaagaattaagacaaggtatgaagataattgaaatagctgagcaagaaaatattcaacatattgtgtatagyactgcgggaggggttaatcgaaatcgaacwggcccacactttgaagtactagcaaaaatagaaaatagattaatggaatctaatataaatgcaacagttatcaaaccatcattctttatggataattttttacgyattgctaaagtcgaagatgaacgtattacattaccagaatttattaatccgaatataaaattcacaatgatttcttctattgatatagctaaaattgcatcgtatrtttttgmacatccacaaagctttacgcatcaatcaatagagattggttccgatgaagttacattaagtgaagcagcaacaatttttagtgaagtgacaggtaaatckactgttatagaaggagaatttgttagtggtgttgcagaaaagcaatggttggaagaaaaaggttatgaagtagactttgaattaatggctgaaataaatccaacaagattatcattaagtgattggcttaaagtccaaractataataagtaa

SEQ ID NO: 657 - DNA, 954 bp, Staphylococcus aureus
atggaaaaagtttatgttgctggtgcaataccagaagtaggkttaaaacttttacaagaacattttgaagttgaaatgtatgaaggtaaaggattagtcgataaagacactttaattaaaggtgttaaaraygcgactgccttaattagtttattatctacaaacgttgataaagatgttatcgatgctggtaaagacttaaaaatcattgccaactatggygctggttttaataatattgatatcgagtatgcycgagaaaaaagtatagatgttacaaacacacctaaagcatcaacaaacgcgactgcygatttaacaattggattagtacttgcagtagckcgtcgtattgttgaaggsgaccaattatcacgtacaactggatttgayggatgggcacctttatttttcagaggtagagaagtatctgggaaaacaatcggcattatcggtttaggtgaaattggtagtgcagtagckcgtcgtgcaagagcatttgacatggatgtrctatacacwggacctaatcgcaaagaagaaaaagaacgagaaatcggtgcaaaatatgtagatttagatacactattaaagaatgcagattttatcactatcaacgctgcttayaatcctaaaatgcatcatttaattgatacagaacaatttaaaatgatgaaatctacggygtatttaatcaatgcctctcgtggtccaatcgtgcacgaacaagcactagtgcaagcattgaaarataatgaaattgaaggtgctgcacttgatgtatatgaattygaaccagayattaccgatgacttaaaatcacttaataatgtagtattaacaccgcatattggtaatgctacatttgaagcacgtgacatgatgtctaaaattgttgctaatgctgcaattagtgccgttcaaggtgagaaaccacaatttgtcgttaactaa

SEQ ID NO: 658 - DNA, 300 bp, Staphylococcus aureus
atgtctttaaataaagagcaaagacgyatyacwgctgaagarttgcaagcacatttygaagmatctaccttatcggttcaaatgattgcwgraaaactgaatgtyactacagaagatgtggaaaaagyattagctatgamagcgccactaggcatttttagtcatcaattacaacgatttattcatttagtatgggatgtcagagatgtaataaaygacaatattaargraaatggacaaacaccagaaccatatacgtatttaaaaggtgaaaaagaggactattggtttttaagataa

SEQ ID NO: 659 - DNA, 891 bp, Staphylococcus aureus
atgaaaatagttattataggtgggtttttaggtggcggtaaaacgactgtcttaaatcatttgctcgctgaatcattaaaggartcgctgaaaccrgcagtyatcatgaatgaatttggsaaaatgagtgttgatggtgccttagtatctgaagacatacctttaagtgaactgacagaggggtgtatctgttgygcaatgaaagcagatgtatcagaacagttacatcaattatatttaaaagagcaaccagacattgtatttattgaatgtagtgggattgcagaaccrgtctctgtcttagatgcttgtttaacgccyattttagctccgtttacaacaattacacatatgattggtgtwrtagaygcaagcatgtataaacacatwaaatcattyccwaaagacatccaaggcttattttatgagcaattagcatattgttctgtcttatttgttaataaaatagattcagcagatgttgaaacracgagcaaactattgaaagatttagaagttattaacccagaggccgatatacaagtyggtatgcatggcagcgtcactttgccaatatcagttagmcaaatgacagcaacttctgacaataaacatrartcdttacaymaaayratwaatcatcaatttgtgcaatcaccagycamatgtactaaagcasagtttataaaacgtttagcatgccttccgwctcatatttataggttgaaagggtttatgacatttgaagacaccrcacatacgtatctcattcaatttacacaaggmcaatatgaattaacacctgtagcattttcaaaaaaagtgccagaatatttggtgcttatcggaaagggtatttcaaaagaagactatcaatgtttggaacagtag

SEQ ID NO: 660 - DNA, 858 bp, Staphylococcus aureus
atgaaacctagaaagcaagatgaaaaaatattatcagatcaatacagttactttgaaccaataatcagcgacagttgtgacataaaattcgacggagacaagaggagaattggttctatattcatttcacatgaggaaatttgttttataaggaaagaagaagattatatatttaaaatttcgttatcagacgtggtagattacaatactgttgttactatttggaaaaaccaagcttctttaacattaaacgataatagaaaaataacgttttatttcgtaacaaattctcctttaacaggatttatctcaattttaaaaacttatatgcaattatctaggaataaggaaacaattattccagatgataatctacttattaatgatgatgatgaacaaactaaagttgaaattttcgacgtcgtaggattaaattatgagggtcgtagaaaagaattaaagaaacttataaaaaaaatgaaaactaacgacgctttctttttcttgtatagtgatttgaaagggaatgaacttaaagaagaattgctttatgaagacaaggtgtatgaaattcctgattacgaggttattcctggtgtattcttacaaaaagaaccggataatccttatgatgaaaacgcgataaaagttatgatttcaaatgaatactctgaatttcacgttggatatgtgcctagagagtatgcttcaaggttagtcaattatatagaagacaccgtttcttgtaacgcatatattaacggtggtaagtataaaactttagattatttagaagagaaaattgttactaaagaatcagactatggattacgaatacatgtagaatataaagtttaa

SEQ ID NO: 661 - DNA, 312 bp, Staphylococcus aureus
atgatgttaaaaatcacctcatattcatatactcaatctgaattttctggccgtagaatagaaaaattacttcataacagtattcgaatgatgtggttagctcaagatcaaacaccttcttataaaactattaatctttttagagtgaatcctaatactgatgcgctaattgaatctttatttattcagtttcataataaaatgcatatcaaaaaagctgatttctatcaaataattaatagaaatcagcttttttcattgcctaaaaacttaatgtcccgacctctttatctacgcataaatacttattac

SEQ ID NO: 662 - DNA, 1320 bp, Staphylococcus aureus
atgagaackgggcattatacgcccatacctmatgaacctcattatttrgttattagycatgcggataaacttaccgcaacagaaaaagcgaaattaagattattaatcataaaacagaarttagatatttcattggcagaaagtgtagtttcttcgcctatagcgagygaacatgtgatagaacaattgacactatttcaacatgarcgacgacatttaagrcctaaaataagtgcgacatttttagcctggttgttgatatttttaatgtttgcattrccaatyggtatcgcttatcaattttcagattggtttcaaaatcagtatgtrtcagcatggatagaatatttaactcaaacaacattgctcaatcacgatatattacagcatatattatttggtgattatggtgtgctatcacttggaacatattcgctcgtatgggcattgccggtygtaatattrattagyttatcaactgcwrtaattgatcaaacaggaytyaaatcatggatgatatgggcaattgaaccktcaatgttayggatmggattacaaggtaatgatatcgtgccactattagaaggrtttggatgtaatgcagcagctatttcacaagcagcacaccaatgccatacctgcacgaagacacagtgtatgagtttaataagctttggtagttcttgtagttatcaaataggtgcgacattatctatttttagtgtagctggaaagtcatggctatttatgccgtacttaatattagtacttttaggtggcatcttacataataggatatggttgaaaaagaatgatcaacaacttagygttccgctaccttatgatagrcaattacatatgccaaatatacgtcaaatgttgctrcaaatgtggcaaaatatacaaatgtttatcgttcaagcgctacctatttttatcacaatctgtcttattgttagtattttatcactaacgccaattttgaatgttttatcacaaatatttacacctatattatcgttattaggcatctcktcagaattgtcaccagggattttattttcaatgattcgaaaagacggcatgctcttgtttaatttgcatcarggcgccttattacaaggaatgacagcaacacagttactactacttgtgttttttagttcaacwtttacagygtgctcggtcacaatgacgatgcttttgaaacatttaggtggtcagtcagcactaaaattaattggaaagcaaatggtgacatcattgtctttagttattggtgtaggcatcattgttaaaatagtaatgctgattatttaa

SEQ ID NO: 663 - DNA, 675 bp, Staphylococcus aureus
atgattagaaatagattgtctgaactactgtcagaaagaggactaaaaatatctcgtgttgcaaaagatgtaaaaatagcaagaagttcacttacttcaatggcacaaaatgattctgaaatgataagatatgatgctatagataaattatgtagttatctgcacatatctccttcagaattttttgaacataatccgatcaattttgactttacttttgatgaagaaccgaattataaaattaatgatgttttcgagggatttgaagtaactgcaaacattactcacgctttttcgattgaaaattttgactttgaaattttagtagacgtcgaattagataataggcaaaaattaaattttgacttagacgtctcatataaagaaactgaaaagataactaattcacaacatagatttattttcacgattaaaaatgaagatgaaaatatcggattaaaaaaatacgttgatagtttatctgcaggccttaaaaacttgttatttaaaaaaattaaccaaaagttaagtgggtatgtttctgaaataatagtaaaaaatatagacgatattgaagagctttttccaaataaaggcgaaaaaagtacgactctacataaagaaattttacaaactgatagccgtttatctagtgatatttttaaagaatattaa

SEQ ID NO: 664 - DNA, 330 bp, Staphylococcus aureus
atgataaacgaaactaagtatatgagacaacaaattactaatttgattcaaatcattgatacgattaaatataatacyttaatgacagattggaacattcaaacgcatatttataaatttaaccaaatagttactaatgaattgaataagttcaaaggctttgaaacatyatatataataaacgaaaatcaagtttyctattatgaaattataacactacttaataaacgtcccctccgacaagtcgactatggtaacaaaattcaatatcttaatttttatcatacasaactatctaacgcattatttgcaattaaatttgcycattaa

SEQ ID NO: 665 - DNA, 1107 bp, Staphylococcus aureus
atgcaacatcataaagtggctattatcggtgccggtgctgcaggtataggtatggccattaccttaaaagatttcggtataacagatgtcattattttagaaaaaggaacagtaggacattcatttaaacattggccgaaatcgacycgtacgatyacgccatcatttacgtctaatggatttggcatgcctgatatgaatgcaatttccatggatacttcaccagcatttacwtttaatgaagaacatatttccggagaaacatatgctgaatatttacaagtggttgccaaccattacgagctgaatatctttgaaaatacagttgtcacaaatatatctgyagatgatgcatattatacgattgcaacgacaacagagayatatcacgcggattatatctttgtcgcaacaggtgattataatttccctaaaaagccatttaaatatggtattcattatagtgaaattgaagactttgataactttaataaggggcaatatgtggttatcggaggtaatgaaagtggctttgatgctgcatatcaacttgcaaaaaatggctctgacatcgcactttatactagcacaaccggtttaaatgatccggatgctgatcctagtgttagattgtcaccttatacacgtcagcgactaggtaatgtcattaagcaaggwgctcgcatygaaatgaatgtrcattatacagttaaagatattgattttaacratggacagtatcatatcagttttgatagcggacaaagtgtgcwtacrcctcatgaaccaatastagcaactggctttgatgcaacaaaaaatccaatcgttcaacaattatttgygacaacaaatcaagatattaaattaacaacacatgatgaatcgacacgttatccgaatatttttatgattggtgcaacagttgaaaatgataatgccaaattatgctatatctataaattyagagcgcgatttgcagtacttgcmcatcttttaacacagcgggaaggcttaccagctaaacaagadgtcattgaaaattaycaaaaaaatcaaatgtatttagatgattattcatgttgtgaagtgtcatgcacatgttag

SEQ ID NO: 666 - DNA, 795 bp, Staphylococcus aureus
atgattcattcaaaaaaattaacgctcggtatatgtttggtattactcattatattgattggaggttgtatcattatgacaaaaataaatagtcgaaatgcccaaattaaagacacatttaatcaaacattaaatgtgtatccaaccaagaatcttgatgatttttacgataaggaaggctttcgagatcaagaatttgataaaagagataaagggacttggattattaattctggaatgtacatccaattaaaaggaggagccttaaaatccagagcgatggtactttacatcaatcgtaacactagaacagctaagggatattttttaataagtgagacaacagaagacaaaaaaggatacgttcataataaagataaaaaataccctgtcaagatggaacgtaatcgaataattccaacgaagcccataacggacgagaagttaaaaaaagagattgaaaactttaagttctttgtacaatatgggaattttaaagattttaaagattataaagatggggatatttcatacaatcctaacgtaccaagttattccgcaaagtatcaattgaataatgatgattataatgtccaacaattaagaaaacgatatgatatatcaaccaaaagggcacctgaattaaaattgagaggatctggcgatttaaaaggctcatccgtaggttctaaagaactagaatttaactttgtaagaaataaagaggaaaatgtgtatttttctgatggtattaatttcaaacctactgaggaaatgaatcatgaacaaaactaa

SEQ ID NO: 667 - DNA, 873 bp, Staphylococcus aureus
atgtcaaacgtactaacagaaatagatagtcaatatccatatatgactaaaaatgaaaaaaagatagctaaatttatactaaattcacctcaaaaggtgattaaaatgaggtctcaagacttagcaagcttattagatattagtacatcatcagtcattcgattcagcaagaaaattactgatggcggttttcacgacttgaaaataaatatatctaaatatgttcctaaagcatcatcaatttacaatgttgaattaatgaataacgaaagcacagaatctttaagaactaaactccatacacgtactacacgcgcacttaatcatgcwaataacgaattaaatgataaaactattgatcaaatatgtcattgtttaaaacgttctgagacgatttttatatatggttttggcgcatcttttgtagttgctaccgacttataccaaaagttatcaagaataggtcttaatattcaacttgttcaagaaacacatatttttgcwacattattagcaactcacaattcgaacgayagtgttattcttattactaacaatggtacrcaaagtgaaatgcaatcaatggttaaagttattgatgactaccatatacctataatyacaattactagtacaagggataatcccgtagcacaggcatcaaatattgttttaacwtatgggaaaactgatgaaaatgagatgcatatgggagcaacaacttcattatttgctcaaatgttcactattgatattttatattatcgttatgttgcattaaattatcacgcatcattagatttcataacacaatctaaaatggctttagataactatcgtaaacatttatcaaatattaactttaaacattaa

SEQ ID NO: 668 - DNA, 297 bp, Staphylococcus aureus
atggaaacaataggaagcattatttatttaaaagaaggttcgcaaaagttaatgattattaatagaggaccaattgtagaaattgaaaatcaaaagtatatgtttgactattctgcatgtaaatatccgattggtgttgtrgaagatgaaatttattattttaacgargaaaatatagattcagttatttttaaaggttattctgatcaagatgaggttagatttcaagagttgtttgawaatatgaaacaaaatttggatagtgaaatacaacgtggagaagttacrcmmcaataa

SEQ ID NO: 669 - DNA, 357 bp, Staphylococcus aureus
atgttaaaacaaatactgcyacgtgctacaaaaatatcgrtamtctttgctgtagcatttttcatcataaattatatcggtatggaaaaacctgacatcctatatttagttggaagaactattattgcaacacttgctttcatactcatttgtcttacaktatttwctattattaattctccagagcgcaagattaaactcggkacgactttaccgattgcattaattattggkatcattttcggcgccatatttttaacggtacaaatcggtgtcatcactgggttaatcatcggtgtgattgctacgtttatttgggaattgattgaaaaaaataaaggaggtcgttcatcatga

SEQ ID NO: 670 - DNA, 369 bp, Staphylococcus aureus
atgtcgaataaactkgatgraatcaataaratratcacagcgaaacatragcaaatggatgacttatatgatgaaaagcragaggttaaagcwttgatagaygaaagygatgmgcttaatcattcgatagawcaattatatcaacatttaggtgascgttatyatagtagcaatatggctagtcgtatggaacagttccgcgatgaatttcattttgcgaaacgacgttcaacggaagcgttatacgagcagcaacagcaaattcaacatgrcattcgtaaagyrgaagaagagatgattgacttggaaatgcgaagraatrtygaaatygagayggtgacaaaggaggaaaataaatggaaacaatag

SEQ ID NO: 671 - DNA, 2790 bp, Staphylococcus aureus
atggcataccaaagtgaatacgcattagaaaatgaaatgatgaatcaacttgaacaattgggttacgaaagagtaacgatacgtgataataagcaattgcttgataattttagaacgattttaaatgagcgtcatgcggacaaattagaaggcaatcccttaacagataaagaatttcaacgtctgttaacgatgattgatggraaaagtattttcgaragtgcccgtattttacgtgataaattaccacttagacgtgatgatgagtctgagrtttatttgtcgtttttagatamgaaaagttggtgtaaaaataagtttcaagtgacgaatcaagtatckgtcgaggatacatataaagcacgttatgatgtaacgatattaatcaacggactaccccttgtccaagttgaattgaaacgtcgaggyattgatattaatgaggcgtttaaccaagtaaaacgttaccgyaaacaaaattacacaggcttattccgctacatacaaatgtttatcattagtaatggtgttgaaacgcgatacttttctaataatgatagcgaactattgaagagtcacatgttttattggagtgataaacagaataaccgwatcaatacattrcaatcrtttgctgagtcrtttatgagaccytgtcaattagctaagatgatatcrcgctatatgattattaatgaaacagatagaatactgatggcaatgcgtccgtatcaagtgtatgcggtagaagcacttattcaacaagcgactgagacagggaataatggatatgtrtggcatacaackggaagtggtaagacrttgacttcttttaaagcgagtcagattttatcacarcaagatgacattaagaaagttatctttttggttgaccgtaaagacttggatagtcaaacagaagaggaatttaataaatttgctaagggtgctgtmgacaaaacwtttaatacctcgcaactggtacgccaactaaatgataaaagtttgccacttattgtaacgacgattcaaaaaatggctaaagcgattcaaggkaatgcccmtttattagaacagtataaaacraataaagttgtatttattattgatgagtgtcatcgcagtcaatttggtgacatgcatcgtctagttaaacaacatttcaaaaatgcccaataytttggrttcactggtacgccacgtttyccagaaaatagtagtcaagatggtagaacaactgcagatattttyggtagatgyttacatacgtatttaattagagatgccattcatgatggtaatgtacttggtttctcagttgactatattaatacttttaaaaataaagctttaaaagcagaagataacagcatggttgaagcaattgatacggaagaagtatggttagcggataaacgtgtggaattagtaacacgacatatcatcaataatcatgataaatatacacgtaatcgtcaatattcaagtatatttacagtycaaagtattcacgcgcttattaaatattatgagacatttaagcgacttaacaaaaagttggaacaaccrttaacgrtagctggtatatttacgtttaaacctaatgaagatgatcgtgatggtgaagtgccatatcattcacgtgaaaaattagagataatgattagtgattataataaaaagttcgagacgaatttttcaacagacacaactaatgagtatttyaaycatatttcaaaaaacgttaaaaagggcgttaaagatagtaaaattgatatcttaatcgttgttaatatgttcttaactggttttgatagtaaagtactgaacactttatatgttgataagaatttaatgtatcatgatttaattcaagcgtattcacgtacaaatagggttgaaaaagaatcaaagccatttggtaaaattgtaaactatcgtgacttgaaaaaagagacagacgatgcactgagagtattctcacaaacaaatgatacggatacaattttaatgcgyagttatgaagagtataaaaaagaatttatkgacgcttatcgtgagcttaaaatgattgtgccgacaccacacatggttgatgacattcaagatgaagaagagctaaagcgctttgttgaagcttatcgtttattagctaaaataatattacgtttaaaagcatttgacgagtttgagtttacaattgatgaaattggaatggatgaacaagagaatgaagactataaaagtaaatatttagcygtgtacgatcaagtaaaaagagcgacggctgagaaaaataaagtatccattttaaatgatattgatttcgaaatagaaatgatgcgtaatgatacgattaatgtgaattatattatgaatatattgagacaaattgatcttgaagacaaagcggaacaacgtcgtaaccaagaacaaattagacgyattttagatcatgcagatgatccgacattgaggttaaaacgagatctaattagagaattcatcgacaatgttgtaccttctttaaataaggatgatgatatcgatcaagaatatgttaatttcgaaagtattaaaaaagaagcggagttcaaaggatttgctggagagagatctatcgatgaacaagccctaaaaacaatttcaaatgactaccagtatagtggtgttgtaaacccacatcaccttaaaaaaatgattggtgatttgccattgaaagaaaarcgtaaagcaagaaaagccattgaatctttcgtggcagaaacaactgaaaaatacggtgtgtaa

SEQ ID NO: 672 - DNA, 627 bp, Staphylococcus aureus
atgaaaaagagattactactaagtacatttttagcatckrcattaattcttacaggttgcgcgtccgatcaatctgataacgaagatcatcayacaagtactggcatccatgcacctaaaagcgctaaaaaattagaaacaaaagatatytttaactcagataagaaaaatagtgatattagtgatgcagagatgaagcaagctatagaaaagtatttgtctgtaaatagcgatatacttgakaacaaatatattatgcaacataaactagataaacaaattgacagtcaaacaaaagtgactgaaaaacaagcagaaacacttagccacttatctaacttagctgttaaaaaygatttgcatttcaagaaatttgtcactgaaaacaatattcctaaagaatataagaaacccgttgaattaatgatgaattacttcaaagctttaaatagtacaatcgccaatgttraygaagatattgaaaagcttagctatcaaccgcaaaataaaatcaatgtwgtcgacgtgccaacaaaatatgccggtgatgttaataaaaagcaacaagataaaattaaagatttcttaaaatctaaaggtatcaagagtgatgttatcgataaataa

SEQ ID NO: 673 - DNA, 186 bp, Staphylococcus aureus
atgacaacagcattaattggtgtaattgtattaatcttactaattattagctttgtgccaaactaccgtgctatgaaatcagcaaaagaacaaggaagtaatgcaacaagagctacaattatrgtaggcatagatattatcttaattgtacttatcatcgtgacrttattattaaaatatatgtaa

SEQ ID NO: 674 - DNA, 948 bp, Staphylococcus aureus
atgaaaaagagtatttatatcttaccattagcttatatagttattgagtcacctttacaaattggcaatgttatcttaaccccatctttaaaagtaattgaatcaggtcattttcatacagacttttcactaatatcaatgtttaacaaaaaagagtttttatctattttatctacttcgcaattaaaagaagatgcactagttatttttaaggacgatttctttgaacctaccacggtagaccaaaattattattttattaataagttaagtcaaaaagccgacagaactctagatattataagaataaacgaaaataattttggtgttcctgaacaattaccaggtataccaggtattacctcaaatggttggcaagtagctgaacaattgactgaccacaaacttagaacaattaatggaaaagtcatgtttatgattcgagaaggaataggattatatccaattgacttatcttctaatatttatgaagataaattatataattgtctttatgttacttcaaatgaaattaatttacttttcagagaagctatccacagagtttctgaatcaatgtacatgaataatttaaatacatcatttgtttatcttttaagtacattagaaatgctatcaagtcgtgaatatttaaactttaaaaaaactaaatctaaaatccttccttttatttcttattctaaatatcagtatcataagtgcagtgagtatctaagaaatattagtgaaaatctaagaactgaaattattcacaatggtaaaagtatatttgatttatatgataattatgaggatgtgtacaagctattaaattggattaaattaataattattgaatatataagtaacatagttaaaaagaatatacaaacttttgatgacctcgaaaaagaaaggaaaaaaattattaattctcttggaatttag

SEQ ID NO: 675 - DNA, 531 bp, Staphylococcus aureus
atgttaattgataaattcgaaacatacatcatcaacatcgccggtttaaatgaccgtactactagaaaaaaattaagtaagttatgcaaaagtgtacaattttgtgatgcgttgcaattctcaataaacaaacagtttaatcagtatgtattagaaattagcttaccaaagcaacaacttccatacttcatttcatttttaagttttcatcagtatagtattttccaagtactttcaccaaagaaaataaatgaattacttgattctgataatttatatcaatctgcaaagcgtttcgatatcaatattgatggcttgcaagatgctttcattaaagacaaagtcatcgatattatgaatatgttccaaaatcacactgatatcacttatacgttgaataagtctcatgcrcatattatatgtacgccagaaatattygctaaattgttacatacgattgcaactagaaatatcgacattctatctgccaattatagatcgtcatctatgagcaaagctcgtatatcataa

SEQ ID NO: 676 - DNA, 765 bp, Staphylococcus aureus
atgtttttagaygaacacattaatmgaaactttgayaaactwaatgataatgatttacatatcgcycacttyatcaayacacayrtwgatgaatgtaaaaatatgaaratacaagatttagcgcaattcacacatgcctcgaatgcaaccattcaymgattyacacgyaaattaggttttgayggttatagtgattttaaatcgtaccttaaatttgaaagtaataagacacaccaattaccwtctaactctatcgatagtttcaarcaagaaatcgatagtacattcagttatttagaacgcgttgattaccagcttcttactraaaaaatgcatacagcttcaacaatatatttgtatggtacagggcgtgcacagttaaacgttgcttcagaggcacagcgtatattrttaacgttacataatcatgtcattgtacttcatgatgaacatgaacttaaaatgattttgaacaagagtgaacctaatgatttattctttattatttcattatcaggtgaaacacatgaattattagaagtaacaaacttgcttcaacttagacaaaaatactttatttctgttactacaatgaaagataatacccttgctcaaaaagcaaattacaacgtctatgtatccagtaacacattctacttaactgatggtacagactattctagcttcatcagttatcatatattctttgaaacacttgtaagaaaatataatgagtatttactacataatgatatttcaaattag

SEQ ID NO: 677 - DNA, 810 bp, Staphylococcus aureus
gtgagtggtggygatgtaaacgaagcatatcgagtcgaaacrgatacggatacatttttcttacttgtccaacgtggacgtaaagaatcattttatgctgcagaaattgcaggtttaaatgaatttgaacgtgcaggtatcacggcacctagagtaattgcaagtggcgargttaacggtgatgygtatttagtgatgacgtatttagaagaaggrgcttcagggagtcaacgycaattaggkcaactcgtagctcaattacacagtcagcaacaagaagaaggcaaatttggcttctcattaccttatgaaggtggcgatatttcttttgataatcattggcaagaygattggygtaccatttttgtcgayaarcgywtggaycatttgaaagawgagttgctaaatagagggctatgggatgccaacgatatcaaagtatatgacaaagtgcgamgtcaaattgtggmggaattagaaaagcatcaaagtaaaccrtctttattacatggtgayytatggggyggyaattatatgttyttamaagatggwcgtcckgcrttatttgatccagcrccattatatggtgacagagaattygatatcggtattacaacggtatttggtggttttacgagcgaattttaygatgcgtataataaacattatccrctcgcaaaaggwgcatcctatagacttgaattttatcgtttatatttattgatggtvcatttattgaaatttggkgaratgtaccgtgatagtgttrcgcattctatgratargattttacaagrtacaacarrttag

SEQ ID NO: 678 - DNA, 885 bp, Staphylococcus aureus
atgaaaattattcagttagaatacttcttggctatcgtgaaatataatagttttactaaagctgcacaatttttacatattagccagccatctttaactgctacgattaaaaaaatggaagcagatttaggttatgacttatttacacgttcaacaaaagacatcaagattaccgaaaaaggaatacagttttatcgttatgcgagcgaattagttcaacaatatcgatccacgatggaaaaaatgtatgatttaagcgttacatcagaaccaaggataaaaattgggactcttgaatctacgaatcaatggattgcgaatttaattcgaaarcaccattccgactaccctgaacagcaatatcgtttatatgaaatacatgayaaacatcaatctatagagcaatyactgaattttaatattcatttagctataacaaatgaaaaaataacccacgaagatataaratcyattccwttatatgaggaatcttacattttattagcaccyaargaaacatttaaaaatcaaaattgggtagatgttgaaaatttgccactcatattrccaaacaaaaattctcaagtgcgcaaacacttagatgactattttaatagaagaaatattcgtccaaatgtcgttgtagaaacagatcgattcgaatcagcagttggatttgttcatctyggcttaggttacgctatcattccgagattttattaccaatcatttcacacgtcyaatttagaatataaaaaaattcgtccaaacttakgccgaaaaatttatatcaattaycataaaaarcgyaaacactccgaacaagtacatacattcgtacaacaatgccaagattatttatatggacttttagaggctctttaa

SEQ ID NO: 679 - DNA, 723 bp, Staphylococcus aureus
atgattaatgctgaacctattatcagtaaaatgaaaaatcaaaaaattaattatgacaaggtgttgaagaaattaatcgggcagtgggaaagagaagcaatcagacctaaaatcttattgcatagttgttgtgcaccttgtagtacatatacattagagtttttaacacaatatgcagacattgcaatttatttcgcgaattcaaatattcatccgaaaaatgartayttacgacgtgctaaagtgcaagaacaatttgtggaagattttaatcgcaagactggtgcgaatgtgaagtatattgaagcaccttatgaaccrcataagtttgtgaaaatggtgaaggataaagaattagctgatgaaaaagaaggcggcttacgttgtaccgcttgttttgaaatgcgtttggatattgtagcgaaagcagctgtagaacatggctatgattattttggcagtgcaatcacrttatcacctaaaaagaacgcacaattaatcaatgaacttggtatggatgtccaaaaaatatacgatgtgaactatttgccaagtgattttaagaaaagtaaaggttatgagcgttccatagaaatgtgtaatgactataatatctttaggcagtgttattgtggatgtgtctttgcagcgatgcaacaaggtattgattttaaaacagttaataaagaagcgaaagcatttttagaacaatatccagattaa

SEQ ID NO: 680 - DNA, 420 bp, Staphylococcus aureus
atgttaaaatctattaatcatatatgcttttcagtcagaaatttaaacgattcaatacatttttatagagatattttacttggraaattgctattgactggtaaaaaaactgcttattttragcttgcaggcctatggattgctttaaatgaagaaaaagatataccacgtaatgaaatycacttttcatatacacatatagctttcactatagatgacagcgaatttaaatattggcatcagaggttaaaagataataacgtgaatatyttagaaggaagagttagagatattagagatagacaatcaatttactttacygaccctgatggtcataagctagaattacatactggcacacttgagaacagattaaattattataaagaggctaaaccacatatgacattttacaaataa

SEQ ID NO: 681 - DNA, 588 bp, Staphylococcus aureus
atgactatagatcgacgtattagaaaatcacaagttgcaatgagaaatgcatttattgaacttttacatcaacaccaattagaagagattactgtgcaacaaattgcagatttagctgatgttaaccgtagtacattttatacgcattattatgataartatgatttgcttgaaaaattagaggaccagcagttggaggaaataagagacttcattcatgatgagaagttaaatggagcagttaagttatccacggataacatacatcaaattatgacygttttaatagawatgatagaaaaagacatcgcattttatcaattgatgtttcgtatgggtaaagattcaaatatmcacgaaaaactwtatgayttaattatgtgtcatttrcaacgttataaaaatgaaaatgatcaaattaatggtataccattttcytatttcatgagttatgtttcaggtgcgggattgtctttkataagacattgggtagaagatccaaaccgtatagacaaagttgacttaataakgcattttaatacgattgtcaatcaagggccagcaacgataattaaaaatatacaataa

SEQ ID NO: 682 - DNA, 1260 bp, Staphylococcus aureus
atgaaraacaataaaatttctggttttcaatgggcaatgacgatyttmgtmttyttygtyattacaatggcgttatccattatgctyagagatttccagtctrtmattggtgtcaaacactttatatttgaagttacagatctagcaccattaattgctgcaatcatttgtatactcgttttcaaatataaaaagrtccaacttgcaggtttaaaattctcaatcagcctgaaagtaattgaacgtctaytgctagctttaattttacctttaattattctaattattggtatgtacagctttaatacatttgcagatagctttattttattacaatcaacaggcttatcagtacctattacacayattctgattggacatattctratggcgttcgtagtagaattcggattccgytcatacttacaaaatattgttgaaacgaaaatgaayacgttctttgcaagyatwgttgttggtttratgtaytcwgtwttytcagcaaatacaacttaygrtacagaatttgcwgcttataayttcctttayacattctcattctcwatgattctwggtgarttaattagagckacwaaaggacgtacratytayatygcaacracattycatgcttcaatgacattyggmcttattttcttrtttagcgaagaaatcggygatytattttcaatyaargtcatygcyatttcaacagcaatygtwgcrgtwggmtayattggtttaagcttaattatycgaggtattgcwtatttaacaacwagacgaaaccttgaagaacttgagcctaataattatttagaccatgtcaatgacgatgaagaaactaatcatactgaggctgaaaaatcttcttcaaatattaaagatgctgaaaaaacaggtgtagctactgcatcaacggtyggtrttgctaaaaatgatactgaaaatacwgtggctgacgaaccaagcattcatgaaggtactgaaaaaacagaayctcaacatcacatagrtaatcaaactgaatctaatcatgatgaagatcatgacatcacttcgragtcagtagaatcagcagaatcagttaaacawgcaccacaaagtgacgatttaacaaacgattcaaatgaagatgaaayagagcaatcattaaaagaacctgygacytataaagaagacagacgttcatcagttgtaatygatgcagaaaaacatatcgaaaaaactgaagaacaatcttcagataaaaacaaataa

SEQ ID NO: 683 - DNA, 96 bp, Staphylococcus aureus
gtgccaatcatcaatgttggagatttgtgggataatgaacataacgtttataatcattggggaggacttgatataaatgactatagatcgacgtat

SEQ ID NO: 684 - DNA, 654 bp, Staphylococcus aureus
atgatatcaattcacgcaatttcgacaggaaaaatccaagatttgccttatagctcgaaaagaccgatrcgctctgctttagataaaactaagatttcacaaacaacatggttatcttcaactggtttcactggtgatgaacaggcttataaagatcatggtggrccacataaagcagtttgtgggtttagtaarcataaytatgcactgtatcaagatgatttacctwcactacctaytcatgcgatgtttggagagaatttaacatttgattatttagacgaatctgatgtttactttggtaatcaatatcgtttaggtgaagcgttaattgaggtttctgaaattagagaaccatrctggaaaattcaagcaaaatataatattcctgatttagtgaagcgcatgtctacatctggtaaaacaggtttctatttccgggtattaaaacaaggctatgtatctccaaatgatcagctttacttaatacaagaagcaccaatcgaacatcgtttatctgtacaacagcttaatgamctttattataatgatagacaaaatcaagatatgttacgatatgcactaaacaatccatttctgtcaccaacaagacgcgataaacttcaaaaaatgtataacagaacattgaaataa

SEQ ID NO: 685 - DNA, 384 bp, Staphylococcus aureus
gtgataagaacaatgatgaatgctaaaattcatagagcaagagtgactgagtcaaatttaaattatgtaggtagyattacgattgattcagatatwttggaagcggtagacatcttgccaaatgaaaaagtagccatcgtgaataataataatggtgcacgttttgaaacatacgtaatagctggtgaaagaggtagtggtaaaatttgtttraacggtgcagcrtcaagacttgttgaagtaggcgatgtagtcataatcatgacttatgcacagttraatgaagaagaaattmaaaaccatgcwcctaaagtagcagtaatgaatgaagayaatgtcattattgaaatgattcatgaaaaagaaaatacgatagtgttataa

SEQ ID NO: 686 - DNA, 609 bp, Staphylococcus aureus
atggatttcgttaataatgatacaagacaaattgctaaaaacttattaggtgtcaaagtgatttatcaggataccactcaaacgtatacaggctacatcgtggaaacggaagcwtacttaggtttgaatgatcgtgcggctcatggctatggyggtaaaataacacctaaagtyacgtcattatataaacgtggtggtacaatttatgcacatgtcatgcatacgcatttactcattaattttgtaacaaaatctgaaggtatacctgaaggcgtacttatmcgcgcaattgaaccagaagamggtttatccgctatgttccgtaacagaggtaagaaaggctacgaggtaacgaatggyccaggaaaatggactaaggcatttaacattccacgggctatcgatggcgctasgttaaatgactgtagattgtctattgatactaagaatcgtaaatatcctaaagatattattgctagtccacgaatcggtattccaaataaaggtgattggacacataaatctttacgttacacagtgaaaggtaatccatttgtgtctcgcatgcgtaaatcagattgtatgtttcccgaagatacttggaaataa

SEQ ID NO: 687 - DNA, 852 bp, Staphylococcus aureus
atgactaagctgattactacggtaaaagagatgcaacacattgttaaagcagccaaacgctcaggmacaacgattggttttatcccaacaatgggtgccttacatgatggacatttaacgatggtacgcgaatcagttagtacaaatgatattacarttgtgagtgtatttgttaatccattacaatttggtccaaacgaagatttcgatgcttatccgagacaaattgataaagatttagaattagtatcrgaagtaggrgcggacattgtttttcatcctgcagtagaagatatrtatccaggtgaattaggtattgatgtcaaagtaggyccattagctgatgtgttagaaggagcgaagcgtccagggcattttgatggggtggtaacagtagttaataagctatttaatattgttatgccggattatgcttattttggtaaaaaagatgcccagcaattggctattgtcgagcaaatggtaaaagacttcaatcatgccgttgaaattattggtattgatatcgttcgagaagcagatggtttggcgaaaagttcaagaaatgtttatttaacrgagcaagaacgacaagaagcggtacatttaagtaaaagtttgctattagcacaagcgttgtatcaagacggtgaacgtcaaagtaaagtaattatagacarggttactsaatatcttgaatcacatataagtgracgcattgaagaagttgctgtttatagttatcctcaattagtagaacaacacgaaataactggacgcatatttatctcgttagctgtyaaattttcaaaagcgcgtttaatagataatataataattggagctgaataa

SEQ ID NO: 688 - DNA, 1209 bp, Staphylococcus aureus
atgatagaacttaatgcaattacaacattatgtttagcytgtatmctttayttacttggtamrgctatcgttaatcacgttaattttttraaacgyatttgtataccagcaccagtgattggyggcttaatctttgctattttagttgcggctttggattcatttggcatggtyaagattaaattagatgcttcattcattcaagatttcttcatgttagcattctttacgacaatcggtcttggtgcatcattgaaattatttaaattaggtggcaaastcttgctattatactttatgttttgtgctatcatttcagtcattcaaaacatagttggtgtatcactagcaaaagtattaaatattaaacckttrytaggattaacagcwggttcyatgtctatggaaggyggtcayggtaatgctgcygcttatggtaagacaatycaagatttaggyattgaytcrgcaytgacagcrgcwcttgcrgctgcaactttaggtcttgtatttggagggcttatcggyggwccagttgtaaaatwtttaatcaaacgttataacttaaagcctcaacatagtgacgatacatttaaagattatagccaagtwgcatataacgaacatttacatagtaaatttaatgccactgaagtattcttcattcaatttacaatcgttgtattctgtatggcagttggaagttatttcagtcatttrtttacakctcaaacagggattaatgttccaatttacgttggctcattatttgtagckgttatygtccgaaatatctctgaaagttttaattttaatattgtagatttaaaaattactaatcaaattggcgatgtcgcattaggtattttcttatctcttgcgctaatgagcattcaattaatcgaaatttataaacttgctatacctcttattattatygttttagttcaagttgtcgttatgattttatttgctgttttaattttatttagaggtttaggaaaagattatgatgctgcagtaatggtaggtggttttatcggkcatgggcttggtgcaacgccaaatgccatggcaaatttagatgttattactaaaaaatatggwaactcacctaaagcatatttagttgtacctattgttggtgcattcttaatcgatttaattggtgttatagtcattatgggattcatwcaatggtttagttaa

SEQ ID NO: 689 - DNA, 819 bp, Staphylococcus aureus
ttgaaaacagtaagtcwattaatagatatgaaacaaaagsaaactaaaatttctatggtaacagcttatgattttccaagtgctaaacaagtggaagcagcgggtattgatatgattcttgttggggattcacttggtatgactgtattaggttatgaaagtaccgtacaagtgacgttagcagatatgattcatcacggtcgtgcagtaagaagaggcgcaccaaatacatttgtagttgttgatatgccgattggtgcagtaggcatctctatgacacaagacttaaatcatgctctaaagctttatcaggagacgaatgcaaatgcaattaaagcagaaggagcgcatattacaccatttattgaaaaagcaacggcaattggtattcctgttgttgcacatttaggattaacacctcaaagtgttggcgttatggggtataaattacaaggtgcaacgaaagaagcagcggagcaacttattttagaygcgaaaaatgtagaamaagctggtgcagttgcgttagtacttgaagcaattccaaatgatttagcagargaaattagcaagcacttaacaattccagtcattggtattggtgcaggaaaaggtacagatggtcaagtattggtttatcacgatatgttaaattatggtrttgaacataaagcgaaatttgtgaagcaatttgctgattttagtgttggtgtggatggtttaaarcaatacgatcaagaagttaaatctggtgcatttccatcagaagaatatacgtataaaaagaaaattatgaatgaggtkaataacaatgactaa

SEQ ID NO: 690 - DNA, 492 bp, Staphylococcus aureus
atggttattatcamacaactttttacacatactcaaaccgtaacatctgaattcatygaccataacaatcatatgcatgatgcaaattataatatcatttttagtgacgtcgtgaatcgttttaattacagccacggtctttctttaaaagaacgmgaaaatttagcatatacrctatttacactagaagaacatacgacatacctctyagaattgtctcttggcgatgtatttactgttactttatatatttatgattacgattataagcggttgcatttatttttaacattaactaaagaagatggkacactagcatcaacaaatgaagtaatgatgatgggaattaatcagcacacacgtcgttctgatgcttttcctgaatcattytcaacacaaatagcacactattataaaaatcaaycaactatcacttggcctgaacaattaggacataaaatagcaattccacacaaaggagcattaaaatga

SEQ ID NO: 691 - DNA, 705 bp, Staphylococcus aureus
atgacgaatgtcttgtatcaacatggtacattaggtacgttaatggctggcttactagaaggmacagctacaattaatgaattgttagaacatggraatttagggattgcaacgttaacagggtctgatggcgaagtaatatttttagayggraaggcatatcatgctaacgagcataaagaatttatagaattaaaaggcgatgagaaagtaccgtatgcatcgattactaattttaaagcgagtaagacatttycattgcaacaattatcacaagatgatgtattygcacaaattaaaaatgaaatgttaagtgagaatttattttcggctgttaaaatttatggcacatttaaacatatgcatgtacgaatgatgcctgctcagcaaccgccatatacacgtttgattgattcagcacgcagacaacctgaggaaaaaagacaaratattcgtggtgccattgttggattttttacaccagaattatttcatggcgtaggrtctgctggttttcatatacattttgcrgatgatgaaagagcttatggtggacatgttcttgactttgaagtggatgacgttgtcgttgagatacaaaactttgaaacattccarcaacatttcccggtaaataacgagacgtttgttaaagcgaaaatagactataamgatgtggcagaagaaattagagaagctgaatag

SEQ ID NO: 692 - DNA, 865 bp, Staphylococcus aureus
atggataatagaaatatgattaatcgtgtttttagtcaaaagatattacatcaaattgcaatcaaaaataaaagtgatgttgttgatgaggcatatgatttttatatacarggrcctaaaaatatcaatgtaatacagaaratgaartctttatataactatcttaaaaagtcttatcgtaacgaatatttttayaaaaacacaatrcttaataaactccttytaggackacattctrttaatacaactactgcactttctgagatgccyataggraawagtattgctgattttatattgttaaayggyaaaggcgttgtctaygagattaaaacagaattagataagytggatagattrgataatcaaattaatgattattatgaagtrtttaattatgtmgtagtyattacaaatgacaaacayytgaataaagttatggctagatacaaagatacaacagtyggaattttagtrttaacawctagaaatacactgagtgaagttcaaaaaccwaaagaaaacaatagtctcttaaacwcaaaagcgatgtacaactttttacgaaaagaagaaagaaaaagagttattgcacaaaatcatatggatgtgccaacttataatgatttcacagagtatgatgtgttatttgacgtgtttaaagaaataccaatgacgaaactgcataacaatatgatttytgagttgaaaaaaagaggmaacatgaaagaatacaaagatgaatttttagcagckccgrctgaaattaagttcttgttatatttcgcaaaaatgacaaagaaagataaaaataaactatatcattttcttaaggakgaywaataatcccccgcacttcacatag

SEQ ID NO: 693 - DNA, 420 bp, Staphylococcus aureus
atgacagatgcattacaacaaaagattcatatygaaytactagatttattagatgatgttaagtttgaattaacagaattaaatgcacaaaaagggttatacattaacggaccagcaaatcagytacttaagcgtggcgtkcatatggcttatgttcaaggacaaaagcaagcyatcgataatattatgactattgtggaacarcagcttgaagatcaacatttcctagaasattatgataaatttcaaaatgaggttrctcatcgcaattatgataaaacagctaactttgcagaacttagtgatattccacgtcaattcgataattttttagatcaattttatcaaattaaagggcaatactttatcatcacacatatcaatacacttattggtgattttcactcagaagctcattaa

SEQ ID NO: 694 - DNA, 960 bp, Staphylococcus aureus
atgaaaacatttggtaaaaaggttgtattaatcggagatggatctgtaggatcaagctatgcctttgcaatggttacgcaaggtgttgctgatgaatttgtaattattgacattgcaaaagacaaagtaaaagcagatgttcaagatttaaaccatggtacagtccacagtccttcaccagttgatgtgaaagcaggtgaatacgaagactgtaaagatgcagatttagttgttattacagctggygcacctcaaaagccaggtgaaacwcgtttacaattagttgaaaaaaatactaagattatgaagagcatygttaagagtgtwatggatagyggctttgatggatatttcttaatcgcggcaaaccctgtwgacattttaacaagatttgtaaaagaatatactggwttrccagcagagcgtgttatcggttcaggtactgtattggacagtgcacgtttacaatatttaattagccaagaacttggtgttgcaccttcaagtgttgacgctagtattattggygagcatggtgatactgaacttgcagtttggtcacaagcaaatgtagcaggtatttcagtatatgacacattaaaagaacaaactggtagcgaagctaaagcggaagaaatttatgtraatacacgtgacgctgcttatgaaattatccaagctaaagggtcaacatactatggwattgcattagcattgatgcgcatttcaaaagccattttaaataatgaaaataatgtcttaaatgtttctatacaattagatggtcaatatggyggtcacaaaggcgtttacytaggtgtaccracattrgttaaccaacatggcgcagttaaaatttatgaaatgccattaagtgcmgaagaacaagcrttrttcgayaaatcwgttaaaayattagaagatacwttygattcaattaaatatttattagaagactaa

SEQ ID NO: 695 - DNA, 639 bp, Staphylococcus aureus
atgacaaatccaaatcaacgattagaaccatttgatgagacatttcaacaaycgaatattcatcgtggtaagcgatatggtaagaaaaaacgttcattggtaagcatgattattcaaatcattgttgttatattaaccrcaatcgctggatacagcatgtggaaacaacccatttttaatattgtcttcaccaaagaatctgtarattttgatggcattaaaaattttaacgagacaattggaaaaatgcatcaattaaatattaatttgggtaatatcaatgatttacaacaaggaatcgatcgcttaattttagtctttaacggtttctttattytatgtatcgttagcctagtcataacaatactgacaattgtatttaatcgcacagttctaaaagtagtaaatattttagtgttaacaattatgttagtcattacwttgtatttcagttatattattaaarcactcgcacaagaaattgcagatgytttmaaaaaatattatttaaatgtaccaccagatcaagtgattacagaagctgacgctattcataacggcatcattttactkggctgtagcatyggtttacttgttataagcttattcttccgtaatcgcatgccycgwttaaaataa

SEQ ID NO: 696 - DNA, 1338 bp, Staphylococcus aureus
atgagtaaagcacatcaattaattcaagaggatgaacattattttgcgaaatcaggacgtattaaatattatccgttagtkattgatcatggatatggagcaacattggttgatattgagggraagacatatatcgatttgttatcgagtgcragttctcaaaacgtaggtcatgcacctagagaagtaacagaagcgataaaggcacaagttgataaatttattcattatacaccagcatatatgtatcatgaaccgttggtacgtttagctaagaagctttgtgagmttrcacctggagattttgaaaaaagagtgaccttcgrwttaacyggatcagacgcaaatgatggcatcattaaatttgccagagcatatacagggcgtccttatatcattagtttcactaatgcatatcatggttcaacttttggctcrttgtctatgtcagctattagtttaaatatgcgcaaacattatggtccgttattgaatggyttttatcatattccgtttccagataaatatcgtggtatgtacgagcagccacaagctaattcagtagaagaatatttagcacccttaaaagaaatgtttgcgaartatgtacctgctgacgaagtagcatgtattgttattgaaacgatacaaggcgatggtggacttttagaaccagttccagggtattttgaagcgttagaaaakatttgtcgtgaamatggtattttaatcgctgtcgatgatattcaacaaggttttgggmgaacaggtacatggagttcagtctcgcattttaattttacgcctgatttaatcactttyggaaaatcyttagcaggtggtatgccyatgtcagcaattgttggacgcaaagagattatgaattgtttagaagcrccagcacatttatttacaacaggtgctaatccagttagttgtgaagctgcattagccacaattcaaatgattgaagatcagtcgcttcttcaggctagtgcggaaaaaggggaatatgttaggaaacgaatggatcaatgggtatctaaatacaatagtgtaggcgatgttagaggtaaaggyytgagcattggtattgatattgtttccgacaaaaamctcaaaacacgtgatgscagtgcggcacttaaaatttgtaattactgctttgagcatggcgtagttattatagctgtagcaggaaatgtgttgcgattccaaccgccattggtrataacatatgagcaattagacacggcgttaaacactatagaagatgcactgactgctttggaagcaggwaacttagatcaatatgacatatctggacaaggttggtaa

SEQ ID NO: 697 - DNA, 555 bp, Staphylococcus aureus
atgaaacgacaagccaaaatagaaattcaaaacgcacttgttgatttgatggctgaatatccttttcaagaaatatccactaaaatgatttgcgcgtattgtaatattaatcgttctactttttatgattattacaaagataaatttgatttattggataccatcaactcaaagcataargaaaaattccaatttcttctaagcgcgctacatcataatttcgaaaatattaaacaggataagcttaaactttataaattcttcattattattgctaagtatatcaagcrcaatgagcartttttcaaagacattttagttacctatccaatgaaaacattattcatagactatataaatttagcgagagattaytatcaamaaattatgaatgactatagtactacagtaaccaataaacagctttatgttacatatatcataggcggtcaagctggggtrtttattaattggctttcgaatggttgtaatgaatcacctgaagaagttgctgacattttattggctaatacgattaaacttcaaawcyaataa

SEQ ID NO: 698 - DNA, 1497 bp, Staphylococcus aureus
atggctaagtctaatagtaaagacatcgttttaattggagccggtgtacttagcacaacatttggttcaatgttaaaagaaattgagccagactggaatatccacgtttacgaacgcttggatcgtcctgcaatcgaaagttcaaacgaaagaaataatgctggtacgggtcatgcagcattatgtgagttgaactacacagttttacaacctgatggttctatcgacatcgaaaaagcgaaagtgattaacgaagagtttgagatttcaaaacaattctggggtcacttagtgaaaagcggtagcatcgagaacccaagagaatttatcaatccattaccacacatcagttatgttagaggtaaaaacaatgttaaattcttaaaagatcgttacgaagcgatgaaagctttccctatgttcgataatatcgaatatactgaagacatcgaagtaatgaaaaaatggattccattgatgatgaaaggccgtgaagataaccctggtatcatggcggcaagtaaaattgacgaaggtacagatgtaaacttcggtgaattaacacgtaaaatggctaaaagcattgaagcacatccaaatgctacwgtgcaatttaaccatgargttgttgattttgaacaattatcaaatggtcaatgggaagttactgttaaaaatcgcctaactggtgagaaattcaaacaagtaactgactaygtattcatcggtgctggcggtggagcrattccattattacaaaaaacaggtatccctgaaagtaaacatttrggtggattccctatcagtggtcaattcttagcttgtacaaacccacaagttattgaacaacacgatgccaaagtttatggtaaagagccacctggtacaccaccaatgactgtacctcatttagatacgcgttacattgayggycaaagaacattrttatttggaccatttgctaatgttggacctaaattcttgaaaaatggttctaacttagatttattcaartcwgttaaaacatacaacattacaactttattagcagcagcwgttaaaaacttacctttaattaaatactcatttgaycaagtrattatgacaaaagaaggttgtatgaaccacttacgtactttctatccagaagcacgtaatgaagattggcaattatacactgctggtaaacgtgtacaagttatcaaagatacacctgaacacggtaaaggattcatccaattcggtacagaagtggttaactcacaagaccacactgtaatygcattattaggtgaatcaccaggggcttcaacttcagtttcagttgcgttagaagtattagaacgtaacttccctgaatacaaaactgaatgggcacctaaaatyaagaaaatgattccatcatacggtgaatcattaattgaagacgaaaaattaatgagaaaaatccgtaaacaaacttcaaaagacttagaattaggttactacgaaaactaa

SEQ ID NO: 699 - DNA, 969 bp, Staphylococcus aureus
atgttattgaatttattattaatatttatacttatcgttatttgtccgttaattytcaactatactctgacgttaaatttaacatgctacatcttagttgtcatatcgatatttttgtcactcatctatagcatcatgacctatactttcccttggtctatgtttgtwacatttataataatcagtattatcatgctattcaaacatagatatttattttctcatacttctagtcgcttatttattaaaaaattattatctttttcatataaatttgtactctacacatcagcacttctatttataagtacgattcagtcacctattgtgaaaggtttgtctatgtggttagctatattatgtctttccctgttactaacctttatttgttatctcgtttggacagtatcatatagamatagatcatacaacaaagaagttgatatcataattgtgttaggtgctggtatttttaccgaatttgtcacaccaatgcttgcagcgcgtttagaycgtgcacttgatatmtatcaacaacaagcatcagcaacaaagatyattgtatctggcggacaaggaccagacgaaccaattyctgaagctttagctatgcaacgttatttgattgcacatggtgttgataaaacagatatactaatggaatctcactctataaatacatacacaaactttttatattctaaacaaatcatcaacaatttgtatcatgaagcagttaaaattgtttgtgtaacaagtcagtttcatgtattrcgcgccttacgactagcccaaaaattaggtttatctatcgatggtgtcggaagycatacaccatatcactttttcttacatgtgctcatyaaagattatctaggcgtaatgtatcagtatagattgttattaacgttatattgttcaagtagttggtttatatgtctwtacgcygcttttatttataatagttaa

SEQ ID NO: 700 - DNA, 1599 bp, Staphylococcus aureus
atgcaaaagtcagctctattcgcgcctgaaaaatataacattatttcggaaatcgaaaaatatagccacataccagataaaaaggcaattttatatcataatactgaaggcgaagatatatcagtcacttaccaacagctcattgaacagtctaataaagtaggtaatgttttagcatcgcayggtttatctaaaggcgataaagtactcattatgatgccacgatctattgcgacrtatgaattatatattgctgctttaaaattaggtgttgcaatcattccatgttctgaaatgctaagaactaaagatttacaataccgtatcacrcayggtgaaatwaatgcwgttattgcactagagccattcacagttgaatttgaaaaaattaaagaatatgatgcgttaactaaatttgttattgccggtcaaaaagatggatggatttcacttgaagctgaaaaagaaaacgcaagtaacaaactagaaatggcagatacgacgcgtgatgatatggcgattctgtcatatacatctggtacaactggcaatcctaaagccgttacacattgtcatggatggggatttgcacatttacaaatggcaccaaaacattggttatgtattaatgaagatgacttagtttgggcaacagcagcaccaggttggcaaaartgggtatggagtcctttcttatctgtattaggttcaggygcaactgcttttgtatttaatggaagrttcagycctgaracatacttagaattgcttcaaaaatatcaaattaatgttttatgttgtacaccgacagaatatcgtatgatggctaaattacagaacttaaatgattatgacttaacgcatttacatagtgccgtttctgcaggtgagccactaaatcgagaagtagttgaacaattcaagaaatactttaatttaactgtaagagatggatatggccagactgaaagtaccttgcttataggctttttaaaagatacaccacaraggattggatcaatgggtaaaggcattccrgrtagttcggtcactgtagtagatgatgaggggaatagcgtacctgctaatacgaaagggaatattgcagtaccacttgatttgccagcacttttyaaaggrtattataaagagccagaacgtacggcgaaagcgcaaacaggtaaatactacatcactggtgacttagctcatgtagatgatgatggttatttctggtttgaaggacgtcgagatgacattattattagttcaggctatacgattgggccttttgaagttgaagatgcgttaacgaatcatccagccgttaaagaatgtgctgtagtagcaaarcctcatgatatacgaggaaatattgttaaagcattcgttattttacaggaccatactgcgggtgatgatacgytagttaaagaactacaacaatttgttaaaaatgaagttgcaccatataaatatccragagagattgaattcgttgacgacttaccaaaaacaaactcaggtaaaattcgtcgtgttgaactacgagatkctgaaatagaaaaatggcaacaacaaaaagatagcaatcaataa

SEQ ID NO: 701 - DNA, 444 bp, Staphylococcus aureus
atgaamatttatgatgaatatagaagttatktaatagaagaactggatgattgtctcacaatacaaaaaaataatgacactgcatattacgatgtkytrgaagcgataaatgatttatcaaatgatwcattatgtgtgttaaatcatttatatattaacgaaggacaagaagaaacattcgagcaaaaatttttgcracgtaataagcatttrmaaaacgttgatggrtttaaagcattaaggtttttaagacctagaacagctggtagacactatatcattattacgctgtgggaaaataggcaagcattttatcattggcaaaattcagctgagtacaagcatacacacaagcatcgtggcacttcgaaaggtgcagatgtaaaaataattaatcgtgaattatcatacaatattcgtattgaattagctgatatgstctag

SEQ ID NO: 702 - DNA, 675 bp, Staphylococcus aureus
atggtgcaatgtcttgttgtcgatgacgatcctcgaatcctaaattatatagctagccatttacaaayagagcacattgatgcatwcacacaaccaagtggtgaagctgcattaaaacttttagaaaaacagcgtgtcgatattgcagtggtagatattatgatggatggtatggacggctttcaattatgtaatacattaaaaaatgattatgatataccagttattatgttaacagcrcgggatgcacttagtgacaaagagcgtgcgtttataagyggtactgacgattatgtaaccaarccctttgaggttaaggaacttatttttagaattcgtgckgtattacgtcgatataatatcaattcaaattcagaaatgacyattggcaacttaacgytaaaccaatcctatttggaactccaagtatctaataaaacgatgacgttaccgaacaaggaatttcaattattatttatgcttgcagcacgtcctaagcaaatctttacwcgygaacarataatagaaaaaatttggggctatgattatgaaggagatgarcgaacagttgacgttcatattaagcgactacgccaaagattaaaaaaattaaatgccacacttacaattgaaacagtaagaggacaaggctataaggtggagaatcatgtttaa

SEQ ID NO: 703 - DNA, 213 bp, Staphylococcus aureus
atgagcttttacgaatatatacaaacatttaaagatgataaaacaccattaggcgaattagcgatttggattaaagaagatgattcattcccaaaacaagagaagctaacagaaaacattttgtcttattttcatcaaatgtccaatatagatcatgagtttttagaaattgtaaaaagatcactttctctgtatgatcaattaaaatcgtaa

SEQ ID NO: 704 - DNA, 1374 bp, Staphylococcus aureus
atgtttaaaacactctatgctagaattgcgatttattccattacggttattttatttagtgcattaataagttttgtattaacaaatgtttactatcattataatttaaaagcatctaatgacgcgaaaatcatgaagacrcttaaagaagcaagacaatatgaacaatcagctaaaccaacgcacattcaacaatatttcaaacatttagggcaaatgaattaccaaataatgaccrttgatcamaaaggtcataagacattttatggggarccwtttagagaagatactttatcacaaaatgctattaacaacgtrttaaataatmaagattaccatggtattaaagataaaccattcgcattattcgtaactggatttttcgacaatgtaacagataatactgttggtattaactttaagacaaamgacggttcaatagcagtattyatgcgtccagatattggagaaacatttagcgagtttagaacwttcttagccgtcttgttaatrttgttattatttatctcratttcattagttatcgcatcaacctattcaatcattcgtccagtaaaaaagttaaagctagcgaccgaacgcttaattgatggtgattttgaaacacctatcaaacaaacacgcaaagatgaaattggaacattacagtatcactttaataagatgagagagtcattgggacaagttgatcaaatgaggcagcattttgtacaaaatgtatctcatgaaatcaaaacaccattaacacatattcatcatttattaagcgagttacaacaaacttctgataawacattamgacaacaatatataaatgatatytatacyattacaacgcagctgagcggattaacaactgaattgttrctcttatccgaattagataatcaccaacatttattattcgatgataagattcaagtcratcaactcattaaagatatcattcgacatgaacaatttgctgctgatgaaaagtcgttaatyattttagctgayctagaatcaatcratttcctaggaaatcaacgtttgttacatcaagcattgagtaatttattaataaatgctattaagtatacagatgttggtggtgccattgacatcgctttgcaacatagtcacaacaayatcattttyacaataagtaatgatggttcaccaattagtccacaagctgaagcacgtttatttgaacgtttytataaagtgagcaaacatgataatagyaatggtttaggtctygcaattacaaaatccatcattgaattgcatcatggtacaatccaattcacacaaagtaacgmgtatgtaaccacctttactattacactgccaaatmattcacwttaa

SEQ ID NO: 705 - DNA, 1710 bp, Staphylococcus aureus
atgagtaacaaaaayaaatcatatgattatgtcatcattggaggaggcagtgcaggttctgtactaggtaatcgtctgagtgaagataaagataaagaagtcttagtattagaagcgggtcgcagtgattatttttgggatttatttatccaaatgcctgctgcgttaatgttcccttcaggcaataaattttacgattggatttattcaacagatgaagaaccacatatgggcggtcgtaaagtagcacatgcccgaggtaaagttttaggtggatcaagttcgattaatggcatgatttaycaacgyggtaatccaatggactatgaaggctgggcagaaccagaaggtatggaaacttgggattttgcrcactgtttaccgtattttaaaaaattagaaaaaacatacggtgcagcgccttatgataaatttagaggccatgatggaccaattaagttaaaacgagggccagcaacgaatcctttattccagtcattctttgatgcaggtgttgaagcaggytatcataaaacacctgatgtgaatggatttagacaagaaggttttggaccgttcgatagtcaagtacatcgtggtcgccgaatgtcagcttcaagagcatatttacatccagckatgaagcgtaaaaacttaaccgttgaaacacgtgcctttgtwactgaaattcattatgaaggtagaagagcaactggtgttacgtataagaaaaatggcaaactacataccatcgatgctaawgaagtcatyttgtcwggtggggcattcaatacgccacaattactacaaytrtctggtatmggygattcagarttcctaaaatcaaaaggcattgagccacgtgttcatttrccwggtgtgggtgaaaactttgaagatcacttagaggtatacattcaacataartgtaaggaacctgtatcattacagccaagcttagatatcaagcgcatgccatttattggtttacaatggattttcacacgtacwggtgcagcagcatctaaccattttgaaggtggcggatttgtacgttcaaataacgaagttgattatcctaacttaatgttccatttcttaccaatagctgtaagatatgatggtcaaaaggcagcggtcgcacatggytatcaagttcacgtaggaccaatgtattcaaactctcgtggyagcttgaaaatcaaatctaaagatccattcgaaaaaccaagtatccgctttaattatttatcaacagaagaagataaaaaagaatgggtagaagcaattcgtgtagcaagaaatatcttatctcaaaaagcaatggatccattcaatggtggagaaatttcaccaggaccagaagtgcaaacagacgaagaaattcttgattgggttcgtagagatggtgaaacagcattacacccatcttgtagtgctaaaatgggtcctgcttcagatccaatggcagtagttgacccgttaacaatgaaagtycayggtatggaaaatttacgtgtagttgatgcatcmgctatgccacgtacgacaaatggcaatatacacgcacctgttttaatgttagctgaaaaagcagcagacattatacgtggcagaaagcctttagagccacaatatattgattattataagcatggtgttcatgatgaaaatgaaggtgcaatcgaagtaaaaccatacgctaaataa

SEQ ID NO: 706 - DNA, 444 bp, Staphylococcus aureus
atgatgaaactcaatttatttatcaatgcaaawgagacggaatcttatattgatatacatgcacctaaaatgaatgatmacgttcaaagtattattaatgcagtcaatgatttagacaaatcacatacattagtcggatacatagacaaagaaatccatatcattaatgtatcagatgttataacattccaagttattaataaaaatgtaacagccattacaagcaatcaaaarttcaaactaaaattacgactttatgaactagaaaaacarttaccacaacatttcattcgcatttccaaatcagaaatcgtcaacaagtattacattgaaaaattattattagagccaaatggacttatacgtatgtatcttaaagatgcacactacacctattcttctagacgttwtttaaaatctataaaggagcgcttatcaatatga

SEQ ID NO: 707 - DNA, 1491 bp, Staphylococcus aureus
atggaacttttaaaacatttatctcagcgtcaatatattgatggtgagtgggttgaaagcrcgaataaaaatacaagagatattatcaatccttacaatcaagaagtgatatttacggtttctgaagggacaaaagaggatgcagaacgtgcaatcttagctgcaagacgtgcgtttgagtctggtgaatggtcgcaagaaactgctgaaamaagaggtaaaaaagtacgtgccatcgcggacaagatyaaagaacatcgcgaagcgttagcacgattagaaacattagatactggaaaaacgttagaagaatcatatgcagatatggatgatattcataatgtgtttatgtattttgctggattagcagataaagayggtggcgaaatgattgattcaccaatwccagatacagaaagcaaaattgttaaagaaccagtaggtgtagttacacaaattacaccttggaattatccgttattacaagcatcatggaaaattgcgccagcgcttgctacgggttgttcactagttatgaaaccaagtgaaattacaccattaacaacaatacgtgtttttgaattaatggaagaagttggtttccctaaaggaacaattaatcttattctwggtgcaggttctgaagttggtgacgtaatgtcaggtcataaagagrttgacctwgtatcatttacaggtggcattgagactggtaagcatattatgaaaaatgctgctaataatgttacgaatattgccttggaacttggcggtaaaaatccaaacattatctttgatgatgctgattttgaattggcrgtagaccaagcgttaaatggtggatatttycatgcaggtcaagtttgttcagcaggatcaagaatattagtacaaaacagtattaaagacaaatttgagcaagcacttattgatcgcgtgaaaaaaatcaaattaggtaatggttttgatgctgatactgaaatgggaccagtgatttcaacagaacatcgtaataaratcgaatcttatatggatgtagctaaagcagaaggcgcaacaattgctgttggtggtaaacgyccagatagagaygatttaaaagatggtctattcttcgagccaacagtcattacaaattgtgatacgtcaatgcgtattgtacaagaagaggttttcggacctgtcgttactgtagaaggctttgaaactgaacaagaagcgattcaattagcgaatgattctatatatggtttagcaggtgctgtattttctaaagatattggaaaagcrcaacgcgttgctaacaagttgaaacttggaacggtgtggattaatgatttccayccatattttgcacaagcgccatggggtggatacaaacaatcaggtatcggtagagaattaggcaaagaaggcttagaagagtaccttgtttcaaaacacattttaacaaatacaaatccacaattagtgaattggtttagcaaataa

SEQ ID NO: 708 - DNA, 456 bp, Staphylococcus aureus
atgaaaaatttgaaaaactcattatttattagcttaatcattggtttrtccctttcactgttctttagtatgttatttgcagacggcaaatattatccactgaacccacaatcaactattggcatwttgtattatamkcatttcacagaaactaccgtaatgttgatttctatcattttatggttactcataggcgtcgtctttttccttggagattttatctttaaatacacagattggrgcattactaaagcaactatartgcatttcataacaacgtatgtcggattcttrcctttagcaatrcttgccggttggtttccactaacartrmattayctaatcatattyacaattatcttyattgtgrtttayryattratttggatwattcaattctttaaaaayaagaactacgtaracactattaacragcaactgaaacaattaaaatga

SEQ ID NO: 709 - DNA, 687 bp, Staphylococcus aureus
atgactaatcaatttaaaaataaacagtccaaattacatgacagtttagaatccatcacaaaaaacttatatgcgacacctacttcggaactgccttttgataatcgatttctatttaaatcttttattttaaaacgtgaaacaggtaatattgttatctatcattccggacacttaggtgactcccaacaagacattgcatcattaggtggtgtttcaaaagtattgatgaatcatgatcatgaatctataggaggttctaatcaagttgaagccccttactttatacatgaaaatgatgtggctgcactgaaacataagatttctgttcaaaaacaatttagtaatcgtgtaatgttggataaggatttagaagttattcccgcgcctggacatacaccagggacgacactatttttatgggatgatggtcatcaccgttacttatttactggagattttatatgttttgaagggaagagatggcgtacagttatattaggttcaagtgatagagaaaaatctattcaaagtttagagatggttaaagaattagattttgatgtacttgtaccttgggttactatcaaagatgaaccgttagtttattttgtagaaaatgaatatgaaaaacgtgaacaaatacaaaatattattgatagagtacgtgagggcgagaatagctaa

SEQ ID NO: 710 - DNA, 1674 bp, Staphylococcus aureus
atgattaaacagataaatgtttctaatatgcaaaagtttgaatctcaattaatgaaagctcagtctgaaggttatacacatgycgttccatatgcmaatgagataatgatttatcaatckatgttagatgcggttcaattatatcctaagtctatcgtggttgattatactgtggatggacaatacaaaaatgattgtcactatttcggtcaatcatcgatcaacattgccgattgggctcaaaacaataattattatcctaacctgatatatgcgattcaacagactcttgatttaatacattattactctgtagaaacgattttcgatttagctttattgacacttctgaaaggtgatttatcaatcgatggtcatgtcgtttttgattttaaagcccctwtagcaacaagtgcttcaatatgggaaactattaaaactattgaagattttgatatgatgtctcagttttatttgaataaaatggcttatatygatcatcatcctataccttttcgcaacctttttatcgaggattcagaacaacttaattsgccagatarttggttgtattctaccaagtttatgctacctaaatggttatataaaatagcaaagcaacgtgctgataacaaacaattacaaaacytcggcctgtatacgaagcaaccaaacgttttaaaagatcacatcgtttttatcggtgatcatyatcaatatataggtaattcaaaatatttatttacttacttcgttaaacataatccaatgactgcctgttattttgttactgacgatcgtcgcggaccacatttcatatcacctaaktctgaaaragctgacgaattgattaacagcgcacgygtmgttwtagttgaaaatgatatacctgaaacgttrcaaccaaacggtactttaattcaattacatcaaggcacaccaataatgcaattatttttagatagtaaagarcctattaaaaatatagaaacacctttttatcgtgctaaaaggtataatcgctggttgcaattcgattatgttatacattctgctgatgatattagccacttttatcaaacggcttttcctagtcaccaagcaaatgtattggcttatggtaatcctaaacaccaatatttactacaaaagmgtaacgaaagtactactcaacaacagtataagaaatcgtttaaaataaatgatcaaaaaccagttttattataygcacctattggattagtgagtgcgcaacaattaccaytatcagatgctttattcaaagcmtatcatgttgtggttcagggtgttgatgaarcgatsttaccagaagaggcgcttgttgcaccaaagtatctyagtgctcaagacttaattctaatgtctgatgtcgttatcactgattactcaaatataatatttgatgcgatggctatagacaaaacagtagcattatacactccaaatcacagtcaatayattgagtctcaaggtgttaacgaagatatttggcgtcatctatcaaaaatttggtatacagaccgacaattattaattaataatttaatttcccaggcaataccagtgattaaatatccacaaatacaacakaaagaacaaccattagaatctatttcacaacttatattgtctaaratgacatctaatmaatag

SEQ ID NO: 711 - DNA, 1623 bp, Staphylococcus aureus
ttgaaaaaagagaaagttatggactggacgacctttatagggacagtagctgtacttctttttgcagttatacctatgatggcttttccaaaagcaagtgaagatatcatcactggtattaatagtgccatttctgattcaattggttcgatatatttatttatggggctggcgattttttgctttgtaatgtatatcgcatttggtaaatatggtaatgtcacacttggtaaagcaagtgataaaccagaatttaatacatttacatgggcggcaatgctgttttgtgcaggcataggctctgatattttatactggggcgttattgaatgggctttttactatcaagttccaccaaatggcgcgaaaagtatgagtgatgaagcactccaatatgcgacgcaatatggtatgttccactggggrccaattgcttgggctatttaygttytaccagcattaccaattggttatttagtrtttgttaaaaaacaaccggtgtataaaattagtcaagcttgtcgyccgattttaaaaggtcaaacagataaatttgtaggtaaagttgtagatatcttatttatctttggattgctaggtggtgcggcaacatcactagcgttaggtgtgccattaatttctgcaggcatagaaagattaactggtttagatggtaaaaatatgattttacgttcggcyattttattaacratyacggtyatatttgcyattagttcatatacaggattgaaaaaaggtattcaaaagttaagtgatatcaacgtttggctatcmtttgtacttttagcctttatatttattattggaccgactgtttttattatggaaacgacagtgacagggttcggaaatatgttgagagatttyttycatatggcaacatggttagaaccattcggtggtattaaaggtcgaaaagaaacgaatttcccacaagactggacaatattctactggtcatggtggttagtatatgcgccatttatcggtttatttatcgctagaatttcaaaaggtmgacgccttaaagaagtcgtgctaggaacaattatttatggaacgcttggatgcgtattattctttggtatttttggtaactatgctgtgtatttrcaaatttctggacagtttaatgtaacacaatatttaaatacacatggtacagaggcaaccattattgaagtggtgcatcatttaccattcccatcattgatgattgtactattcttagtatctgctttcttattcttagcaacaacatttgattcgggttcatatattttagcggcagcatctcagaaaaaagtggtaggcgaaccattacgtgccaatcgtttattctgggcrtttgcattgtgcttattgccattttcattgatgctagttggtggygaacgtgcattagaagtattgaaaactgcwtcaatactggcaagtgtgccattaattgttatttttattttcatgatgatatcatttttaatcattttaggrcgcgatagaattaaacttgaaacgcgkgctgaaaaattaaaagaagttgaacgtcgytcattgcgaatcgttcaagtatcagaagaagaacaagacgataatttataa

SEQ ID NO: 712 - DNA, 600 bp, Staphylococcus aureus
atgtcattatcaaaactacctttgyttaatcactttgcaaatatccgcattcaaccaaagttaatcattaagctgtttctgactttgataataattgttacatatacatttgttagtggactatctgtggactataaaaagttattgagtgaagcaggactctcagagacatcattagcacaaataaaaatttttagtcaaattagtatttttttctcaagagttttcagcgtattatttacatttttaatcattctagttatctctagaattatgcgctcagatgctaatacaaaatctatattctctgcaacgttaagctacatactgtttacaaatgctattagtttaattatacttaccatccaaataagtgccggtttatcattaattgactattctattactagtttaaatatttttgctaaaggaaatcgcattctgggtactttcgacttacaattttttgtacaagcatacatacttacagtcatgctaattggtacgtcgaaactttctatacgagcatccactatttggggtattatatatcttattttaattatcactttttctttgattagtattagcattcagtga

SEQ ID NO: 713 - DNA, 102 bp, Staphylococcus aureus
ttgaaatgtggagataaatacgaaggtaataatgataaattaggaattattactgtattgatgattattatttcaaatccaattatatataaatatatgtct

SEQ ID NO: 714 - DNA, 924 bp, Staphylococcus aureus
atgtattatccttatttgcgtgggaaacaaaatgaactatttgcaattagagaattgttagagaaaggtttgattggtgattgtattcaacctataattgaaccaattaaatatacaaccacatttaaaaatactttgcaatactgtggtgaaaaagcattctctataaatttagtagtaaattcaaagttaactgaagaagagattagtaacgaaactgttgcacatttaactgaaataataacaaaaaacaaaagtgttattcaaaaagcttacttgggtccttctgatgaaggcaatgataggttgaaacagcaattttcaagtaatagtttagctattttaacaagtgtagatgattgggaaatgtttggagataaaaataaacttgaaatggtttttgtaccagatgatagacacattaaacgtaaattgcgtaatattccaaacaaaggcatcattatggatccttttaataaactaagtcgtaatgttgattatttagataatgatgacgagttttatagcgacgatcacctttattataaggaagatggatacgtagcattttcagactattctgttataggtggagaatatgtagacggtggcttttcgccattagctattgcgatacatattgtctattttgatgaggctaatgagctaagagttaagcattttgtctctgattctaataatgatagatcaaatccaggtaaaaagttttttgaggctgtagataaattagtaacatggtcaaaaaacttagatattaaaaatagatcttatgcgcttggacaatttgaagaattaaatgaaaataataagtatccaggattaggtttaattaaaaggttatctatcatgcatcacctagaaattatgaatagatacttggagtctcaaaatgaaaatatgtga

SEQ ID NO: 715 - DNA, 1524 bp, Staphylococcus aureus
atgcttaatgctgatttaaaacaacaacttaaacaaytattagaactaatggagggcaacgttgaattcgttgccagccttggttcagatgawaaatcyaargaactyaaagawttrttracagaaattwctgatatgtcacctagactwtcwctttctgaaaartctttaaarcgtacaccaagtttctcagtcaaycgtcctggcgaagaaacaggtgtaacatttgcaggwattccattaggtcacgagtttaactcacttgttttagcaattttacaggttagtggtcgtgcacctaaagaaaaacagtcaatyattgaccaaattaaaaamttagaaggttcattccattttgaaacattcattagtttaacgtgtcaaaaatgtcctgatgtcgttcaagcacttaacttaatgagtgtgatyaaccctaacatcacgcattctatgattgatggtgcagtgttccgtgaagaatctgaaaacatcatggcagtccctgctgtctttttaaayggcgaagaatttggcaatggtcgtatgacaatccaagatattctttcgaaactaggcagtacggcagatgcatctgagtttgaaaayaaagaaccttatgatgtcttaatcgttggtggtggtcctgctagtggtagtgcagcgatttacacagcacgtaaaggtttacgtactggtatagttgctgatcgtatcggkggccaagttaatgatactgctggtattgagaacttcattactgttaaagaaacaactggttctgaattttcttctaacttagcagcgcacattgatcaatatgacattgatgcaatgacaggyatwcgtgctacagatatcgaaaagactgacgaagcaattaaagttacgttagaaaacggtgctgtcytagaaagtaaaacagtcattattgctactggtgcaggttggcgtaagctaaacattccaggtgaagagcaattgattaataaaggtgttgcattctgccctcactgtgacggacctctattygaaaataaagacgtagcagttatcggtggcggtaactctggggttgaagcagcaattgaccttgctggtatcgttaatcatgttacattattcgaattcgctagcgaattaaaagcagacaacgtgttacaagatcgtttacgttctttatcaaatgttgatatcaaaacaaatgccaaaactactgaagttgtcggagaaraccatgttacaggtatacgttacgaagacatgarcaccggcgaagaacatctacttaacttagatggtatctttgttcaaattggtttacttccaaacacatcatggttaaamgatgctgttgaattaaacgaacgtggtgaaattgtkattgatygtaacaataatackaaygtwcctggaatatttgctgctggcgatgtcacagatcagaagaacaaacaaattatyatttcaatgggcgctggtgcaaatgcagcattaaatgcctttgactatattatcagaaactaa

SEQ ID NO: 716 - DNA, 1047 bp, Staphylococcus aureus
atggccgtattttyaaaagagaaaaagagaggatgtatcgttgtgayagaaacatttaaagcrtttgtaattgataaagatgagagyggtaaagtgacaccaactttcaaacaattatcgmctactgatttwcctaaaggagatgtgctgattaaagtacattactctggtataaattataaagatgctttagcgactcaaraycataatgcagtcgtaaaatcgtatcctatgattccaggaatagatttagctggwacaattgttgaatccgaagcaccaggctttgaaaaaggagaacaagtaattgtaacgagttatgacctaggtgtyagccattatggcggttttagtgaatatgcgcgtgtaaaatcagaatggattrtcaagcttcctgatactttaacattagaagaatcaatgatatatggcacagctggttatactgccggtttagcaattgaaagacttgaaaaagttggaatgaatattgaagatggtcctgtactcgttcgcggtgcttcaggtggtgtcggtactttagcagtactcatgcttaatgaacttggttataaagttatcgcaagtacaggtaaacaagatgttagcratcaattacttgaacttggtgccaaagaagttatcgatcgacttcctgttgaagatgatcataaaaagccactcgcatcatcaacttggcaagcttgtgtagaccctgttggtggygaaggtattaattatgttacaaarcgtttaaatcatagtggrtcaattrcagttattggtatgactgccggyaatacttatactaattctgtattccctcacattttaagaggygtaaacattttaggaattgactcrgtatttactgctatgaaattaagacagcgcgtttggcgtcgtctcgcaaaagatttaawgcctgaaaatttacatgagatcaagcaagttattacatttgatgaacttccagaacaacttaacaaagtaattaawcatgaaaataaaggscgcattgttatcgatttcggtgtagataaatag

SEQ ID NO: 717 - DNA, 108 bp, Staphylococcus aureus
ttgatagaatatgacctaacaatcattttgataccaatactaaaagttgcatatccgttttttaaaaaagttgaaagaraaaagtggtaytttagtgggaaggaagtc

SEQ ID NO: 718 - DNA, 90 bp, Staphylococcus aureus
gtgacaaaaaagcgaagatatgacacaactgaatttgrtttagcacatagtatgacagctaaaataactttacatcaagygctatacaaa

SEQ ID NO: 719 - DNA, 537 bp, Staphylococcus aureus
atgayacttttagacattaaacaaggrcaaggttatattgctaaaatagaatcaaatagctttgttgacggtgaaggagtaagatgcagtgtttatgtatcaggatgtccatttaattgtgttggatgttayaacaaagcctcacaaaagttcagatatggcgagaaatacactgatraaatattagcagaaatattagatgattgcgatcatgattatatatctgggctaagtctattaggtggcgaaccattttgtaatttggatattacattaaatcttgtcaaagcatttcgagcacgttttggaaatamaaagacaatttgggtatggactggatttttatatgaatatttagcaaatgattgtrcagaacgtcgagagttattatcatacattgacgttttagtagatggkctatttatacaacacttattcaaacctgatttaccatataaaggttctttaaatcaacgcattatagatgtacaacaatcactctcgcatgcgcgtatgattgaatatatwgttagttga

SEQ ID NO: 720 - DNA, 624 bp, Staphylococcus aureus
ttgaaagaagataggcgaattagaaagacaaagwcctccattaaacaagcgttcactaaattactacaagaaaaagatttagaaaagattaccattcgcgacataacaacacgcgctgatatcaatagagggacattttacttacattacgaggataaatatatgttactcgcagatatggaagatgagtatatttcagaactaacgacatatactcaatttgatttgttacgcggttcttcaatwgaagacattgcgaatacttttgtaaataatatactcaaaaatattttccarcatattcatgataatttagagttttatcatactattttacaattggaacgcacgagtcaattagaattgaaaatcaacgaacatatyaaaaataatatgcaacgttayattagtatcaatcattcyatcggaggcrttccagagatgtatttttacagttacgtttccggagcaacaatttcaattattaaatactgggtaakggacaaacagcccatttcagttgatgaattrgctaaacatgtgcataatattrtttttaatggyccattaaraataatggcaraaaaccgtttgcataaatcaaaccttgattcactaacttaa

SEQ ID NO: 721 - DNA, 1851 bp, Staphylococcus aureus
atgaatcaaatcgaagaagcattaacgggtttgatttctaaagatcctgctattgttaacgaaaatgcyaacaaagatagtgatacattttcaacaatgagagatttaacagcaggtatcgtttctaaatcttacgcattaaatyatttattaccaaagcaygttgcagatgcacatcaaagaggggacatacattttcacgacttagattatcatccattccaaccrttaacwaactgttgtttaatagatgctaaaaatatgctacataatggatttgaaataggcaacgcgaatgtaacttcaccaaaatcaatacaaactgcatcagcgcagcttgtacaaattatagccaatgtttcyagcagtcaatatggtggctgtacggttgaccgcgttgacgaattacttagtacatatgcacgacataatgaagaacaacatagraatatcgcaaagcaatttgtcaaagaatctgaaattgatcgttatgttgatcaacaagtcactaaagacatcaatgatgcgattgaaagtytagaatatgaaattaataccttatatacatctaatggacagacaccttttgtaacattaggattcggcttaggtacagatcatttaagtcgcaaaattcaacaagctatcttaaatactcgtatcaaaggcttaggaaaagaccgcacgacagcgattttcccraaacttgtattttcaattaaaaaaggaaccaactttagtccgcaagatccgaactatgacattaaacaaytagcattaaagtgttcaacgaaacgtatgtatccagatattttaaattatgacaaactcgtagaaatattaggtgatttcaaagcgccaatgggttgtcgttcatttttaccaagttggaaagatgcggaaggtcattttgaaaataatggtcgttgtaatcttggtgttgttacacttaatttacctagaatggcattagaatctgccggtaatatgacgaaattctgggaaatcttttatgaacgtatcgatgtgttacatgatgcattactttatcgtataaatcgtttgaaagatgctgtaccgaataacgcaccrattttatataaaagtggcgcwtttaactataaattaaaagaaacagatgatgttgctgagttatttaaaaataaacgtgcaacgatttcaatgggctatatagggttgtatgaaacagctactgttttctatggtccaractgggaaacatctcaagaagcaaaagcatttacgcttgaaattcttaaagaaatgaaacgttatcaaacgaaatggacagaattatatgacatttggttcagtatttacagtacgccgagtgaatcgctaacggatcgtttttgtcgtttagaccaagagagatttggagatattaaagacattacagataaaggatattaycaaaactctttccattatgatgtacgtaaagatgttacaccttttgaaaagttagattttgaaaaagattatccttattatrcgagtggtggtttcattcactattgtgagtatccgaaaytgcaacacaatttgaaagcactagaagcrgtatgggactactcttatgacaaagttggttacttaggtacaaatattccgattgatcattgttatgaatgtgattacgatggagattttgaagcwactgaaaaaggatttaaatgcccgaactgtggcaatgataatcctaaaacagttgatgtcgttaaacgaacatgtggttacytaggcaatccagttcaacgtccagtaattaaaggccgtcataaagaaatttgcgcacgagtaaaacatatgaaagcgcctaaagaatga

SEQ ID NO: 722 - DNA, 945 bp, Staphylococcus aureus
atgattacttcattcagacattctgaagatatagataaacatattataaaaacaccattagatcatacagcgtcatggattaatgtagtagaaccagaccgagaagaaattgaaaatcttatggaacaatataatatacctgaagactttatacgtgaccctttggactcagaagaaagttcccgtattgaatatgacgaagatactggttactcattaatcattattgatttacctatcgtcaattcaactaatcgtagcgttctatcttttgtaacgattccattaggcattattattggcaacggtattatcgtaacagtttgtgacgctgaaaatgaatttttagaaaatttacctaagcgtgatattaatttaaaatttcacagcagatttgcattagaaattttaactactattgccgaccattataatcgtaacttacgattacttaataaaagtagaattcgtattgagaaagaactaaaaaataacattactaacaaacaacttttcaaattaatggaagttgaaaaaagtttagtatactttttagctgccttaaaaggtaacgatacaattattaaaaarttattccgtttacctgcaattaaacgttttgaagaagatgaagaattactagaagatttaatcattgaaaataaccaagccatcgaaacaacagaattacatcaacgtatcttagaaagtatcacaacatcatacgcttccttattatctaatgatatgaatacgattatgaagacattaacacttttcacggtactattaacgttaccaacrctcgtatttagtttcttcggtatgaatgtgccgttgccaattgatgaccatagttatatatcttggattattgtggtaggtatttcattaattcttgtcgtaattgttagtattttcttatggcgwaaacagaaattataa

SEQ ID NO: 723 - DNA, 1371 bp, Staphylococcus aureus
atgaatagtgataatatgtggttaacagtaatggggctcattattattatttcaattgtaggtttactcattgccaaaaagataaatccagttgtwggtatgacaatcataccttgcttaggkgcaatgattttaggatatagtgtgacagatttggttggattttttgctaaagggttagatcaagtcatcaacgttgttattatgtttatctttgcyattattttctttggcatcatgaacgatagtggtttattcaagccgcttgtcaaacgcttaatawtaatgacacgaggcaatgtcrtyattgtctgtgcaatgacagctttaattggcacaatagcccaattagatggkgccggtgcggtaacatttttgctttctattcctgcmttattacctttatataaagcgttaaatatgaataaatatttattgattytactattagcattaagcgcggcgattatgaacatggtaccttggggaggtccratggcdcgkgtagctgcwgtkttaaaagcyaaaagtgtcaatgaattatggtwtggattaatwcctattcaaataataggwttcattcttrttatgttrtttgcggtwtatcttggatttaaagaacaraarcgtatyaaaaaagcaatagagagaaatgaattaccgcaaacacaagatatagatgtacataaattagttgaagtatatgaacgagatcaagatgtaaggtttcctgtaaaaggacgtgcamgaacaaaaycatggataaaatgggtgaatacagctttaactttagctgttattctakcgatgttaataaatattgcgccacctgaatttgcattcatgataggtgtytcrttggcrctygttattaattttaaatcagtggatgaacaaatggarcgattaagagcgcatgcgccgaatgcattaatgatggctgcagtgattattgcagcaggtatgtttttaggtgtactaaatgaaaccggtatgcttaaagcgattgcgacsaatttaatcaaagtgattcctgcagaagtaggaccatacttgcatattattgtaggtttacttggcgtaccattagatttaytaactagcacagacgcttattattttgctgtgttaccgatygtcgaacaaacagcagggcaatttggtgtaccrtctgtatcaacwgcttattcaatggtyatagggaatattataggtacatttgtcagyccrttttcaccagccttatggttggcaattggtttagcagaggcaaacatgggcacgtatattaagtatgcattcttttggatttggggattcgcyatcgttatgttagtaattgcaatgttgatgggmattgtgacgatttaa

SEQ ID NO: 724 - DNA, 384 bp, Staphylococcus aureus
atgaaagaacgtggcyatatcgaacagctttggcgtgargaaaaataycatgtattgttacacagtcaacagtcttaccaaatgataaggaatgctttaaaaamgratttatcacttcatcaagtycaacaaatgattgatgwtgctttgttaattgaaccgagtataggaagtgtatgtaatgcttttgatcatatgtggggatatttwaaaaaatgtgcgaatgaagaagaaagamaacaatcaaaactacttaaagctgattttattaatggtaaaatcgacacccaaamtkwakwasrttttttagcagwwctygctamyaaatrtgrtgktmwatawttactacaaagtcgtgttttaaacacaaaaagaaagagatag

SEQ ID NO: 725 - DNA, 112 bp, Staphylococcus aureus
atgggyggctttgtgaatagtctaataatgaaggatttaagcgataatgatatgcgttttaaatatgaatattacaatagagaaaaagatacgtagaacaaacttaataaaa

SEQ ID NO: 726 - DNA, 2106 bp, Staphylococcus aureus
atgacatgccaacttaaaatacatcatacattatcgacaataccmagtcgtaatatyaataatattatggtgctattttcacttacaagtaaactcaatattacgattaatggtgaaaccaaagacgtaagtaattatattatcttaattaaycatggtgatatttataatattaaccacggcgaaaatataatcgaattaatgatacccgttttttatttttatcaacaagatgatgatttctttaatggttatttagatcgtcatttattacaatcaagtaattatattaagtcattaattgccgatttaatcagtacaccaacaagwtcttctttaatgggraaaaatataggtcaaagtattatagacactttacttaaagaagcttttataagaatagatcatgaatatttaccaaatattgctttaagcaatccggtgttyatagactgtgtaaaytatattcatgacaatattgatgcgcacttgtctttaaaagatatagcgatgcattgcaacatctctgaatcatattgttctaatctttttgttcgatatttragtatgaattttaaagattattttacaagtattaaacttgttaacgccatcaatttattactttctacaaaacattctattacaactgtttctgaattggccggttttaacagtcatacaaattttgcaaatcaatttaagaattacttgcattttagtcctaaacagttccgttcactcgtttccaagattactgaaccaccacaaatacacttccaacaagataacgtatcacaattcactgagttaatttcaacaattgatttaacagctcarctggctacaaatacaacagatattcatatagatgattttaatccgaaagatcgaagtcagcgtgccaaagtatttgttcgatttagtaatttcaatgaactatttcaatttattttcaatgaatattacgatattaactttgagcacytaccaaaacctgtcgttttcattgacgatattcacgatattgagattagccaaacgaattacaacctgttaaatagatgttttgaaaagcttttcgaaaaaaatataggtttagcaatcgctattaaatcaacacaacaattcgaaacgatgaagcarttaatactmacatttttacaaggcaatcaagactataagacaagcaagaaattagttaaatttatgctcgtattttgctctaaytctatgacagcagaagaaattcatttatgtcatcttaaaattaaaaacaaaaataaagaaattaaatatagtgtgacagtcgatggctttttagaaacttattcaaccgtggaacaagtttatgatgtcatgcagcgtcttaaattccattattactttattgatattgaaaattcaaaaactgcaacacatcttatcactaaaaaccaacactatcatcaaactgacactcattttgaacagtataagaaatttattttagattcaggtatatcatcaacacaatttgtatataataacctgtctgtaagyggatttaaatatactaatgatggtaagaatccaattcaattatctgacatagtgtatcacttaatygcattattrcgatatggcggtggcattagctatcaattattagatgaccattcaaattatatttccttgtacaacaaatatggtagycccctaccattaatgcatttatataaaatgtttagaccttttgttaatgaagayattgaaattacaaataattatgtattgagtcgtaaagataataactaccatttcttattattcaataaaattaatgaycgatatatgtcagacgtaaaacaagayttcattttccataatgaattacctcaagactctttgatgattattaaaacattgaatcatgaacatggttcaattcaacatttgcttccaayaagcgatcaacttgtytatatagaaaaagaaattytagatgaattagacaaaacgaattaccctaaaacggagcttgcagttcaagaagaaactggtcgtacatttgaactcaagttaaatcacgacgaggttaaatatatttgctttaaaccaagctaa

SEQ ID NO: 727 - DNA, 609 bp, Staphylococcus aureus
atgartatgccattratgatagatttaacaaataaraaygtsgtyatagtwggtggrggyvymgttgcaagtcgtcgggcacaaacattaartcaatacgttgaacayatrayggtyatcagtccgacaatcactgaaaaacttcaaaatatggtagataamggtgtcgtcatatggaargraaaagartttgaaccaagcgatattgtagacgcgtatctagttattgcagcaaccaatgagccacgtgtcaatgaagcggtaaaamaagccttacctgagcatgccctttttaataatgttggagatgcatcaaatggcaatgttgtatttccaagtgcactacaccgmgacaagctaactatyagtgtatcwacwgatggygcragtcctaagttgacaaaatcrattatggcagagcttgaggcgttatatccaccatcatayagttcgtatatcgactttttatatacttgccgacagaaaataaarktactwgatatracatayarcgaaaagcarcarttrytrtcacaaatwgtgwcrmaagaatwtwtaaaysatgacaaacaagctcaatttttagcgtggttggatrwaarayaataa

SEQ ID NO: 728 - DNA, 1881 bp, Staphylococcus aureus
ttgaaattaaatacatctaatagtccatttacagaaaaacaagtcacagagattaacaatctgctgcaaacattaacagagagccaacaacagtggcttagtggttttttactagctaatagtaacgatacgacaagtgatagtaatcaacaacaattagagacagaagtgtggcaacaatcacaaatatcagaagaacaagmaacttcaacaacgtatatgttacaaaataaagagccacatatcgaagctaatcagcggcatgtyacagtgctatatggttctgaatcaggtaatgccatgcgtttagctgaaattttttcagaacgwttaagtgatatyggacatcaagttgttttgatgtcaatggatgaatatgatacgacaaacatcgcrcagttagaagatttatttattattacgtctactcatggtgaaggagaaccgcctgataatgcatgggatttctttgaatttttagaagacgataacgcacctaatttaaatcatgtgagatattcagtactagctttaggtgatcaaacatatgaatttttctgtcaagcyggtaaagatgtagatgytttactagaaaatctaggcgctgagcgtatatgtaagcgtgtagattgtgatattgattatgaagaagacgcagaaaagtggatggcagacatcattaatatkattgatacyacatcagaaggtattcaaagtgaatcggtgataagtgaatcaattaagtctgccaaagaaaagaaatattctaaatyaaatccataccaagcagaagtwttagcgaatatcaatttaaatggtaccgattcaaataaagaaacacgacatatagaatttttacttgatgattttagtgaatcatatgaaccaggagattgtatagtagcattaccgcaaaacgaccctgaattggttgaaaaactaatatycatgttaggttgggatccgcaatctccggtgccaattaatgatcrtggtgatacagttcctattgytgaagcactaacatcacattttgaatttactaaattaacattgccattattgaaaaatgcagatatctattttgacaatgaagaattatctgaacgtattcaagatgagtcatgggcgcrtgaatatgttataaatcgggactttatagatttaataacagattttccaactatagaattacaacctgagaatatgtatcaaatccttagaaaattaccaccaagagagtattcgatttctagtagttttatggcaacgccagatgaagtgcatattaccgttggtacggttcgttatcaagcacatggacgtgagagaaaaggtgtatgctcggttcattttgctgagcgwattaaaccaggcgatatagtaccaatttatttgaagaaaaatccgaacttcaaatttccgatgaagcaagatataccggtwattatgattggwccaggtactggwattgctccttttagagcatatttacaagaacgtgaagaacttggtatgactggraaaacatggttgttctttggygatcaacaccgtagttctgactttttatatgaagaagaaatagaagaatggcttgaaaatggaaacttaacacgcgtagatttagcattttcaagagaccaagaacacaaagaatatgtacagcatcgtataatggaagaaagtraacgtttcaatgaatggattgagcarggcgcagcaatctatatttgtggygatgaaaaatgtatggcgaaagatgtccatcaagccattaaakatgtattggtaaaagaacgtcatatttctcaagaagaagcdgagwyrwtattgcgwcaaatgaaacarcracaacgytatcaacgygatgtttattar

SEQ ID NO: 729 - DNA, 498 bp, Staphylococcus aureus
atgaataatagaaatgtgtatgatatcgaagtaagtgattataaaggcttaacttataaattagaagcatttagaggtaaagtgattttagttgttaatactgcaacagaatgtatatatagcgaacaattgaaaaaactagagactttrtttcaaaaatataaggatcgtgggtttgtagtgttgagttttccgaataataattttgacaatcgacaaccaggttctaatgaagaaatcttgaaaattagtcgtgagaaatttggtgtwacatttccagtgytagctaaaatatctgtgaacgggaacgatgaacatccgttatttacgcatttaaagaatgaacaaccaggaatctttgggtccccaataaaatggaatttcacaaaatttataatcgatcgacaaggmaatgttgtaaatcgattcttgccaatggaagatccattggatatatcgrcaaatatagaaatattattgcaagaatcttcatcttaa

SEQ ID NO: 730 - DNA, 231 bp, Staphylococcus aureus
atgaaaacagcttatccaagggttcccttccccctcattgtaaaggcgacagatggcgacgtggaagcaattaatcagattgttaaacattatcgagggtatacctcaaaacgttcattacgtcgcatgacagacgaatatggaaattctcatatggttattgatgaaaccctacgtggcagaatggaaacgaaactcatctctaagattttatcgttcgaaattaaatag

SEQ ID NO: 731 - DNA, 483 bp, Staphylococcus aureus
atgaagggagataaagaagcacatgccactccctttcacgacagaaagggggtgaaaagcatgaaaccatcttcttttcaagaaaccatagaaaatcagtttgactatatctgcaaacaagttattgaagatgaacgaaaagattacttcaaacatctagacagactatcagcaaaagaagtctcgttttctgatatagataactaccttgtcaactctttttctactgttgatacgtacgtcactgatttccaactatttaaattatttggattaagaatcaatgttgaaagtgatttattaagtgaagccctgcgtcatctttcagagaaaaaacggaacattattttacttcattactttatggatatgagtgatgtggagattgcggagttactaaatttgaatcgttcgactgtttatcgtcatcgaataagtggactagccatgattaaagaattcatgaaggagtgtaaagaatga

SEQ ID NO: 732 - DNA, 438 bp, Staphylococcus aureus
ttgattgttctttttctatttttacggaaaggacgtgaagacatgaaaaaaataagaagttacaccagtatttggtcagtagaaaaagtgatttatgcgattaatgatttacaactccctttcccaattacctttacgcaaatgacatggtttatcgtttctttgtttgtcgtcatactctttggcagtttaccaccactttctctgattgacggagcactactcaaatacttagggattcccattgttctcactgggttcatgtgccaaaagacctttgacggaaagaaaccctatggatttctaaagtctatcattacctatgctctacgccctaaagtaacctacgctggcaaacaaatacgattaaaaaaagaaacaatgaatgaatcgattacgattgtaaggagtgaacaactagatggcatatccgattaa

SEQ ID NO: 733 - DNA, 1719 bp, Staphylococcus aureus
ttgggaaagcctctttttaaaaaaggagattcaatgaataattcaatattttatacctatttaaaatttaatcttagatattttatccgtagaaaatttgaaattgtaaaaaggtcgcgacttaatgttactacaaaaatactgtttttaattaaattgattttttcgtcactattattatttatttcaactattatgttagctgactatttcagtgattatattgattttatagaatattatttctatgcgagtatgtttatttacattgtatttataccattaatacctagaactaaattattgatcaatccaatggataaacagctgttatatagatctagtttgagagaagttgacatttttaacttgatatatgcttcagacgttttaaaaaagtttgttggatattttaatttgttgatagttggtatggctattagtttatatcatattagtccttttatatttaacctcaaggttttttgtgcactaatatacttttcaacaatctcttatgtaattcaaattatttttataaatattaaagtcataagcacaaaaaaattattttcttatcactattgtgtttttaattttatgatgggaagcattgtttctgttattggatttgtcgtctcatttcttttagtaaatttattaataaagccctttttagttttttcgacatatgtaataaaaagtaagaaaacttttgaatggtatagttattttcaggatataaagaacgaagtcattattattaatgaaaaagttatgcaattattagattatatatcacctcacactatttttatgagattaaactttgtgaatatatcatttgtgattattacaatagctttatttatagcgttatattattttaataaaatagggttttggtatagaaaagaagatatctatctatcttcaacaaatattaatttttcgttgccaatttcaataaaagctataacaacaatacagctaaaacactggataagtaacaaagaagaagttaatttacataaacctttcttctatattagttattcaatatggttctttttagggtgtttaatctatttttcacagatggcatataatcagttagctaatgcagttatttttattttgatattaaacactataactcgtgatagtttttctgcggggacggatttttttactaaatcattacgttttgattcagatagaaaaagtatcggtttgtataggatgtcaaacactgattttaaacaaatttacgattctaaattatctctaattcgctttattggttttaaagaaacaatacttgctattattttattagcaatatttttaaatcaagacatatatttatatataattggatttgaaataataatcatcaatacagtaataattcctaatttatcattattaccttcgtatttatctccacatttcaatcatcaacattacagtgaattagagtcttttgaagaacaaatttttcttgaagatactgtttttgataaagttaagaattttttatcgtcatcatattttttaattctatttgtaggttacttatctcaacgtaattatattgacataatgatttttataattattttcaacattttagccttaatacttgtttcgttgtttattaggttttctaaacaaaaaataacaaagtcttggagaaagagggatttatatttatag

SEQ ID NO: 734 - DNA, 444 bp, Staphylococcus aureus
ttgggatgcttggtttattacttattaaatattgatttaggtaaaatgatagttgctcaagatttaaatttacaagagattttctttcataatttaatttatttcttctctgcaatatttggttttctgacacttggtctgttaaatataggtatgttactcataaattctgggatgttaggcttttttatagcacatggaatctatagcaatcaattaaaatctattctattagtattagcgccacacgctatatttgagattttagcacttttaattgcttcaacattctcattaggttttttatcatacctttatcaaagaatggtaaagaaaaataaaataaaaaataagatgttccataattttgtaacaacaataataactgttattgtattaacaataatcgcatcattattagaagtttatgtaaccataaattaa

SEQ ID NO: 735 - DNA, 447 bp, Staphylococcus aureus
atgtatgtagaaaacagctatcttagcaarcagttgtgttttttattttatgtttcttcaaaagaaataattaaaaaatacacaaactatcttaaggawtatgatttaacctatactggttacattgttttaatggcgattgaaaatgatgaaaaacttaacatcaaaaaattaggtgaacgtgtrttcttagattctggaacactgacaccattactaaagaaattagaaaagaaagattacgttgttcgaacacgtgaagagaaagatgaaagaaacctacaaatttctctaacagaacaaggtaaagcaataaaaagycctcttgctgaaatttctgttaargtmtttaatgaattcaacatttcagaacgagaagcatcagayatwrttaataatttgcggaattttgtttckaaaaatttygacwattccgacaraaartaa

SEQ ID NO: 736 - DNA, 222 bp, Staphylococcus aureus
atgaattttgggcagaatttgtacaactggttcttggataatgcacagtcattggtattgttagcgattgttgtcattggactgtttttaggttttaaacgagaattttcaaaactcattggcttcttgattattgctctaatcgccgtcggacttgtgttcaatgcagctggcgtgaaagatgtgttattaaacttatttaaccgaatcattggtgcttaa

SEQ ID NO: 737 - DNA, 774 bp, Staphylococcus aureus
atgacaaacacaccattgattttgaaagaaattccgaaggatgaagccatttcttttattcggcaataccattattcaaagatactccctagattgtgtaaatactttctagggattttttcagaagaaaaattattaggcgttgtggaattaggctggggtacgcaacccctacaaaccatacgcaaactctttcccgacagttcccttcaaaccacagattatttagaaattggaaagatgtgttttcttccagaaatgaatcaaaccaattattttggcagtcaagctctttcagctctaattaagtggttgaaagaacatacggactgtcattttttatatacactggcagatggaattgagggaaaatgtggctatgtctatcaagcgtccaacttcttttactgcgggtatttcaagacaagtgtctatcgtgataagcagtcatgggaaaagatacaccctcgaagtgctcgccttttattagaggaaaatgctcgctttgaacaggtagagaaaaagcattggctttcccaggcattttgcgaatacaaagggattgagaaaatcaatggacgcatgtttcgctatctctatccgttgacaaaagaagcgaaaaaactgttaggacacactctctatcgacgtcattattatccgaaagaaaaaaatttacgctttgaaaagcgaatcgcttatcagaaatatgaagccatttctcaaccaacttttgataaacaggctcgtatctacaatacacaattattttga

SEQ ID NO: 738 - DNA, 2001 bp, Staphylococcus aureus
atgaagttaagattgttatggcacatagtrcgacgtcaatttattacgcagcgacttgtaatcattccattcattttagcggtaagtgtactattcatgattgaatatacgcttgtrtcaattgggttaaatagctacataaaacagaagaatgacttcctagtaccatttattatcatagctaatttttttatggcgcttttaacttttatttttattttctatgcaaatcactttatgatgtcacaaagacgaaaagagtttagcatttttatgacattgggcatgaccaagaaaagtatgcgtttaattgtagtratggaaactatcttacaatttrtrataatttcagtcrttagtattgccggcggatacttacttggtgcgatatttttcttgtttatacagaaaataatgggcagtgaagttgckacgttaaggtattatccatttgaywytgtagcgatgtttattactttgattatcattgctgtattaatgggcatgctacttatattcaacttgttyagtattaattttcaacgrccgataacttatcaacatcgttccgattcyagtgtcatatcacgatggttgcgttacgttttaattgttataggaagcgcagcactatatttaggytaytttattgcattacaacaagatacgacgtttggtgcyttttttaaaatatggattgtcataggattagttattatcggtacttatgcattttttgtaggtataagtgaaataattattagtatattgcagcaggtatcaaaagtttactatcatccacggtatttttttgtggtagttgggatgcgtgtacgtcttaaaatgaatgcagtcagtcttgcaacaatcactttgctgtgtacatttttgattgtaacgctcacaatgacaytaacaacctatcgygatatgaatcataccattaygaarttgattacsaatgattatgatttgtcatttarcgacaattctaagtcacaaatagaacgtcaacaaacrattgagmatattaaacgtgatatacagggttcggttaatgcaaaagacttcaaagtatatgaaacgacattatttagagcttctttagaaaagaatcgtgcttattacaagttaaaacaggctagtgatgatattccaatagacttcattggtaatgaaggckcgatattttcaagacaatcagtaatgatyacagcwyttactgyrcaagattataatcgatatcaccaaaacaaattacacttagacaatcaaagtataggtatgattacgaatgtacctatttttaaaaagcagtctaaggtcggtcttaataatgaagtctttaaagtgaaacaacttgaygcacatgcgttaaatttgatgatgattcaagatagtatggttttaattgttaaagataacaatcaattacaaaaagtaaaaggattttatgcacatgaacaaaagaaktcgacaatatcgataaactttaatgtatytggaaagacgaaattaacaacatcacaaatwcaaaagctwtcgaaaaartacgatgcrtcaataaattctaaatcagaaatgctaatggtttgggatcgtytgacaggtggactaatatttgtaggtggcgtrgtatcaattgtacttgtcattggaatatttctaatgatgtaytataarcaagtytcagaagcctatgcaaatcagcacaattatgacattatgaaaaaacttggtttagataatggragaatakcaaagataacacgaaatcaaatgactttcttgttcgcaataccaataacagtagcactgattcayacattaatttctagyaacattgtwtatacgttactaaatatgmtaggkattaataaccatcatatatttttaacawgttacgtactagctgtcattataatttcgtttctatatatggcgatgtacaaaataacttcctayatttatgctaaagttattcatcaacaacgyaattaa

SEQ ID NO: 739 - DNA, 1191 bp, Staphylococcus aureus
atgaacgattttactacagaaattctaaagactctagcgaacaaaggcgatttgaatgaattattccgtgtccatttggagaaagcagtcaatacgcttctcaaaacggagttaacggctttcctagattacgaaaagtatgatcgcattggttttaacacgggtaattctcgtaacggctcctatgaccgtacggtcaagaccgagtatggggaacttcatctccagattccgcgcgaccgcaatggtgagttcaagcaacagactgttcctgcttatagacggacgaatgacacgttagaggagaccgtcattcacctcttccgaaaaggtattaccatgtcggaaatcgcagacttgattgagaaaatgtatgggcattactacacgccccaaaccatgtccaatataacaaaatcatttacagaagaggtaacggcgtttaatgggcgggagcttcatgaccgttatgctgctatttatatggacgcaacgtatattccgttaaagcggaaaaccgtcgccaaggaagctattcatatcgcagttggcattcgcccggacggatcaaaggaagtattgagctatgcgattgcaccgactgaatccatcacgatttgggaggaaattttattggaccttcaagagcgcggtttgaaaaatgtcctcctgttcatcacggatggcttaaaggggatggtaggagcgattagtcggttctatcccaaagctcgttttcaacattgttgtgtacacgtttcccgtaatatcagtcataaagtgcgtgtcgatgatcgtaaggaagtctgtgatgattttaaaatggtgtatcaagcctcatctaaagaggtggcgttggaagcacgtggtacttttgcggaaaaatggaaaaccagctatccaaaagtggttgaatcgattctttcgaacgatcacttgctcactttctatgatttccccttggccatacgcaagagtatttattctacgaacttgattgaatcctttaataaacaaatcaagaaatacagccaccgcaaggaacagttccaaaatgaagagtcgatggaacgtttcttagtctcgtcttttgatacttacaaccaaaaattcctaggtcgcagtcataaaggtttccaacaggccgaaggcgagctcgaacaaatgctaagccaactgattgagaattag

SEQ ID NO: 740 - DNA, 1113 bp, Staphylococcus aureus
atgaaaatatgtgaaaaatgttttaataatactgaaatcgtagaaatcattgcaaatgataatagcaaatttgacaattgtgatattgataacaatcatcttggtgttaaaatatttgatacgactaaggacatagataaattagaacttattagagattatttaagaccagcattagaattatatgatattagtataaatttaccagatacttttagcccaaaagaaggtaaaaagattgaaatagcattaaaagacgactggagtatatttaatgttgaggaagctcaaataagttgtattttaaatgaactttttaaagatgatgaaaatttagatagacgagtgttggaagatttagtaggcgctaaaatcataaacgataaaaaatatacaaataaaaatctaattgtagcaaataatgactgggatggattttgtgagagcttgaagtataaaaatagatttcataawaatatgatcaatttagagaatttagcgttctttctcgatatcactactaattactatagtattgaggaatttagagaaagatttgaaccattatatagatctagaatagttaagttcattacagagaaaagtgaactaatgtcaccaccaaagggatttgcaacggcaggaagattgaattctaaatggataagcgtattataccttagtacaaaagaacaggtcagtatagaagaagttaaacctaagcataatgacattatttatataggtaaggttaagttacaaaaaaacgtgacaaaagagaaattgaaaattgcgaatttaactaatttaactagtaatgcaatcaaagctggcgatgatggatttagaaagtattttgtaaattaccaaacattaaaaaagattcataaaggaataacaaatccaagcgatgaacaaggaatagattatttgccatttcaatatttagctgattatattcgaagccttaaatatgacgggataatgtatgagagcatattacaagatggtacttttaactttgtgttttttgatcaaagtttatttgaatgtgttaattatgaaagaaaaagagtaagtgacgttaaatatacattgactaagctaagttga

SEQ ID NO: 741 - DNA, 570 bp, Staphylococcus aureus
atgtcattaattaacaaagaaatcttaccatttacagcgcaagctttcgatccaaaaaaagatcaatttaaagaagttacacaagaagatttaaaaggttcttggagcgtagtatgcttctatcctgctgacttctcattcgtttgtccaactgaattagaagacttacaaaaccaatatgaagaattacaaaaattaggcgtaaatgtattctcagtatcaactgatactcacttcgtacacaaagcatggcatgaccattcagatgcaattagcaaaatcacttacactatgattggtgacccatcacaaacaatcactcgtaattttgatgtattagatgaagctactggtttagctcaacgtggtacattcattatcgacccagacggtgttgtacaagcatctgaaattaacgctgacggaattggccgtgacgctagtacattagctcacaaaatcaaagcagctcaatatgttcgyaaaaaccctggcgaagtatgcccagctaaatgggaagaaggcgctaaaacattgcaacctggtttagatttagtaggtaaaatctaa

SEQ ID NO: 742 - DNA, 756 bp, Staphylococcus aureus
atgttgctagaagtgaaacatgtaaaaaaggtttatggtaaaggtttgaatgctacgacagcacttaatcaaatgaatttatcagttggagctggtgaatttgttgcaattatgggtgagtctgggtcagggaagtctacactactaaatttaattgcttcttttgatggaytaactgaaggtgacattattgtggatggcgcacatttaaataatatgaaaaataaaagtaaagcaytgtatcgtcaacaaatggtaggttttgtttttcaagattttaatcttttaccaacaatgacgaataaagaaaatataatgatgccattaattttagctggtgctaaacgaaaagatatagaacaaagggtacatcagttgrcagtacaattacatttagagggattcttaaacaartatccttctgaaatctcdgggggtcagaagcaacgyattgccattgcacgtgcattagttactaarccgacgattttactagccgatgaacctacaggtgcactkgattcaaaaacrtcaaargcattgatgawgttatttcaagagattcatcaattggaacagacaattttaatggtaactcattcaaatatcgatgcgtcttatgcagagcgagtmatttttattaaagatgggcgtctatatcatgaaatatatcgtggygaagaaagtcaattagyttttcaacarcgaataacagatagcttagcacttgtgaatggaggaagtgtcaatatatga

SEQ ID NO: 743 - DNA, 915 bp, Staphylococcus aureus
atgtataaaatcaatattattagatcagattccgtctataakaatatactcaagrcaccawtaaacgaccgtgattcaattttcactaaagaaatattagtaccttttaaaaagaaatttgaggtrcaacakatkcctattyataatgatgmcaarcaracaatgagtgcrattcaatttttagatgcmtttcaaawktctcccaaagawytrskyrwrwctgaccaaatgtcaatacaatacctgaataatgatttctggagtaattgcgaaaaatatttaaaagttgctatagatcaatttkcaaattatagtatctcatytcaagtttctaactatcatttcacagtattacttggagatmgccaaaaaccacttatgtatctaaataaaaatcgcggtggtgatggtggcataccaggttatattatgatttatttagtgccgagtacaagtacaattaattctatgaaaagcttaattgcacatgaagtaaatcataatatgcgctatcaatatattgattgggatggcggaagtttgattgaattgattatygcagaaggattagctgaaaactatgtagaatcattgtatggtaaagcgcatattggaccgtgggtaacaaatactaattgragtcgtgataacgtaaaaattaaaaatactatttataatcatttacatttaaagcatatatttgaatcgatgccttwtctctatggtgatgatattaataaamttcaaggtaggyctatcgttggcytatctcatgctgccgggtatgcatgtggctatcacttggtraaatactttttacaaaaaacaaacatacctattgaagttgcyacaacacttccagcacaaaaaataataaatgaggtgamtgawttttggcatacacatacactttaa

SEQ ID NO: 744 - DNA, 123 bp, Staphylococcus aureus
ctggaacttacaagtctagttcgaacacacactgatgtgagtggttttctttattttaaacatgaacaatcagataagttactagcattagcaaatattattaaatcaaagggcttcgattca

SEQ ID NO: 745 - DNA, 132 bp, Staphylococcus aureus
ttgaatgatatgcattcgtcaattgttgctgttcatccattcattacaaactcccttttgcttttatataaaaaggttgccaaagagcaactaattactgcaacaatagcgaccatgatttgtgattatttt

SEQ ID NO: 746 - DNA, 111 bp, Staphylococcus aureus
atgtataaaaattatcttccacaaacttcaacaaaagcccaaataaattacagcaatttatcaaatattgcttactttgattttatgaaacaacttaattctaacacatac

SEQ ID NO: 747 - DNA, 888 bp, Staphylococcus aureus
atgacctttcttaaaagtattactcaggaaatagcaatagtcatagttatttttgctttrtttggcttaatgttttacctgtatcatttgccattagaagcatatttactagcacttggcgttattttattattattactcatattcataggtattaaatatttaagttttgtaaaaactataagccaacaacaacaaattgaaaayttagaaamtgcgttgtatcagcttaaaaatgaacaaattgaatataaaaatgatgtagagagctactttttaacatgggtacatcaaatgaaaacacccattactgcagcacaactgttacttgaaagagatgagcctaatgttgtkaatcgtgttcgtcaagaggttattcaaattgataactatacaagtttagcacttagttatttaaagttattaaatgaaacttctgatatttctgtcactaaaatttcgattaayaatatcattcgcccaattattatgaaatattcaatacagtttattgatcaaaaaacaaaaatccattatgaaccttgtcatcacgaagtattaactgacgttagatggacctctttamtgatagaacaattaataaataatgcacttaagtatgcgagaggtaaagatatatggattgaatttgatgagcaatycaatcaattayacgtaaaagataatggtatcggtattagtgaagcggacttgcctaaaatatttgataagggctattcaggttataatggccagcgbcaaagtaactcaagtgggattggyttatttatcgtaaaacaaatttcaacwcacacaaaccatcctgtttcagtcgtatctaaacaaaatgagggtacaacatttacgattcaatttccagatgaataa

SEQ ID NO: 748 - DNA, 1251 bp, Staphylococcus aureus
atgaactttgtaacgttgacttcggatgagttcaatgcgtttacaacaaagcatttttcacattacacacaatcagctattcattacaatcatagagttgatttaaaaggcgatgtgcatcttgtaggggttaaagatgacaatggtcaagtgattgcaggatgcttattgacagaagcacgcacacttaaatttttcaaatatttttatacwcatcgcgggccagtgatggattatacaaatcaatcattagtagcatttttctttaaagcattaacgtcatatttaaagaaacamaattgtttatatgtccttgtagatccatatttaattgaaaatttacgcaatgcagacggtgaaattgttaartcttatgayaaccgagcatttgttagaacaatggayamattaggytataarcaycaaggyttyccwgtmggttatgattcaatgagycaaatccgttggytrtcwgtrttagatttaaargataaracwgaagaccarytwttaaaagaaatggattatcaaacgagacgtaatattaaaaaaacatatgatattggtgtcaaaactaaaacgttaacgattgatgaaacgcaaacytttttcgacttattccatatggcygargaaaagcayggtttcaaattccgtgagttaccatactttgaagaaatgcaaaagttatacgatgaccacgccatgttaaagttggcgtatattgatttaaacgagtatttaaaaacgttacaattaaagcaacaacaattaacagctgaactctcaggtgttgaagargcattggaagaaagtcctaattcaaagaaaaataaaacgaaacgcacacagctagaacaacagctraatagcaataagcgtaaaatcgayaatacaatagaacaaattgaacaagatggtgcagtsttaaacttagcttctgctttrtttatctacaatgarcatgaagtttattacttatctagtggttcaaaycctaaatataatgcttatatgggtgcctaccatttgcagtgggaaatgattaagtttgctaaagcgcatcatattgatcgctataatttttatggyattacyggtgaytwttcagagtcakcagaagaytatggmgtmcaacaattcaaaaaaggwtttaacgcacaygtagaagartatatyggygaytttattaarccwatcaaaccwwtactwtayaarktacaaacrtacttaaawcataaacgycgttaa

SEQ ID NO: 749 - DNA, 666 bp, Staphylococcus aureus
atgaaaatattaattgttgaagatgattttgttatagcagaragtttagcatctgaacttaaaaaatggaattacggtgttattgtcgttgaacaatttgatgatatactgtctatctttaaccaamatcaacctcagcttgtattgctagatattaatttgccaacgttaaatggttttcattggtgtcaagaaatccgaaaaacatctaatgtgccaattatatttattagttcccgtattgataatatggaccaaattatggcaatacaaatggggggagatgattttatcgaaaarccatttaacttgtcattaacgattgccaaaattcaagcattattgagacgaacttatgacttgtcagtagctaatgattcattgacggttaaaggttgtacattaatattagatgaagcaaaagtcgtgtatcaagaacaaarcatacagctatctttgactgaattacaaatattaaagttattatttcaaaatgaagataaatatgtaagtagaactgctttaattgaaaaatgttgggaatcagaaaacttcatagatgataacacattagctgttaacatgacgcgcctgcgtaaaaaattaaatactattggcgttaatgattttatyattacaaagaaaaatgtcggatataaagtatag

SEQ ID NO: 750 - DNA, 93 bp, Staphylococcus aureus
atggtgtatagtttcccattatttaagacatctggcaataagaatttaactagtaaactgaatgcggtcgcatttaaagcaacgacacagaca

SEQ ID NO: 751 - DNA, 201 bp, Staphylococcus aureus
atgatactagtaatgttatctccattattaatcatattctttatagtgttgtctattttagargagcgtaaacgtacgaagaaaaagcaactcgagaaagaaaaagcaaatacactaaatcaaaatacaaatgacacggaaagttcaaatcaagagccgtcattgcarcagrmtaaagaacaaaaagataacaaaggrtaa

SEQ ID NO: 752 - DNA, 1311 bp, Staphylococcus aureus
atgaaaaataaatatatctcgaagttgctagttggggcagcaacaattackttagctacaatgatttcaaatggggaagcaaaagcgagtgaaaacacgcaacaaacttcaactaagcaccaaacaactcaaaacaactacgtaacagatcaacaaaaagctttttatcaagtattacatctaaaaggtatcacagaagaacaacgtaaccaatacatcaaaacattacgcgaacacccagaacgtgcacaagaagtattctctgaatcacttaaagacagcaagaacccagaccgacgtgttgcacaacaaaacgctttttacaatgttcttaaaaatgataacttaactgaacaagaaaaaaataattacattgcacaaattaaagaaaaccctgatagaagccaacaagtttgggtagaatcagtacaatcttctaaagctaaagaacgtcaaaatattgaaaatgcggataaagcaattaaagatttccaagataacaaagcaccacacgataaatcagcagcatatgaagctaactcaaaattacctaaagatttacgygataaaaayaaccgctttgtagaaaaagtttcaattgaaaaagcaatcgttcgtcatgatgagcgtgtgaaatcagcaaatgatgcaatctcaaaattaaatgwaaaagattcaattgaaaacagacgtttagcacaacgtgaagttaacaaagcacctatggatgtaaaagagcatttacagaaacaattagacgcattagtwgctcaaaaagatgctgaaaagaaagtggcgccaaaagttgaggctcctcaaattcaatcaccacaaattgaaaaacctaaagyagaatcaccaaaagttgaagtccctcaaatycaatcaccaaaagttgaggttcctcaatctaaattattaggttactaccaatcattaaaagattcatttaactatggttacaagtatttaacagatacttataaaagctataaagaaaaatatgatacagcaaagtactactataatacgtactataaatacaaaggtgcgattgatcaaacwgtattaacwktactwggyrrtggttctaaatcttayatccaaccattgaaagttgatgataaaaayggctayttagctaaatcatatgcacaagtaagaaactatgtaactgagtcaatcaatactggtaaagtattatatactttctaccaaaacccaacattagtaaaaacagctattaaagctcaagaaactgcatcatcaatcaaaaatacawtaastrrwttatwwtcattctggaaataa

SEQ ID NO: 753 - DNA, 1287 bp, Staphylococcus aureus
atacacatgaaaaataaatatatctcgaagttgctagttggggcagcaacaattactttagctacaatgatttcaaatggggaagcaaaagcgagtgaaaacacgcaacaaacttcaactaagcaccaaacaactcaaaacaactacgtaacagatcaacaaaaagctttttatcaagtattacatctaaaaggtatcacagaagaacaacgtaaccaatacatcaaaacattacgcgaacacccagaacgtgcacaagaagtattctctgaatcacttaaagacagcaagaacccagaccgacgtgttgcacaacaaaacgctttttacaatgttcttaaaaatgataacttaactgaacaagaaaaaaataattacattgcacaaattaaagaaaaccctgatagaagccaacaagtttgggtagaatcagtacaatcttctaaagctaaagaacgtcaaaatattgaaaatgcggataaagcaattaaagatttccaagataacaaagcaccacacgataaatcagcagcatatgaagctaactcaaaattacctaaagatttacgcgataaaaataaccgctttgtagaaaaagtttcaattgaaaaagcaatcgttcgtcatgatgagcgtgtgaaatcagcaaatgatgcaatctcaaaattaaatgaaaaagattcaattgaaaacagacgtttagcacaacgtgaagttaacaaagcacctatggatgtaaaagagcatttacagaaacaattagacgcattagtagctcaaaaagatgctgaaaagaaagtggcgccaaaagttgaggctcctcaaattcaatcaccacaaattgaaaaacctaaagcagaatcaccaaaagttgaagtccctcaatctaaattattaggttactaccaatcattaaaagattcatttaactatggttacaagtatttaacagatacttataaaagctataaagaaaaatatgatacagcaaagtactactataatacgtactataaatacaaaggtgcgattgatcaaacagtattaacagtactaggtagtggttctaaatcttacatccaaccattgaaagttgatgataaaaacggctacttagctaaatcatatgcacaagtaagaaactatgtaactgagtcaatcaatactggtaaagtattatatactttctaccaaaacccaacattagtaaaaacagctattaaagctcaagaaactgcatcatcaatcaaaaatacattaagtaatttattatcattctggaaataa

SEQ ID NO: 754 - DNA, 1314 bp, Staphylococcus aureus
atgaaaaataaatatatctcgaagttgctagttggggcagcaacaattactttagctacaatgatttcaaatggggaagcaaaagcgagtgaaaacacgcaacaaacttcaactaagcaccaaacaactcaaaacaactacgtaacagatcaacaaaaagctttttatcaagtattacatctaaaaggtatcacagaagaacaacgtaaccaatacatcaaaacattacgcgaacacccagaacgtgcacaagaagtattctctgaatcacttaaagacagcaagaacccagaccgacgtgttgcacaacaaaacgctttttacaatgttcttaaaaatgataacttaactgaacaagaaaaaaataattacattgcacaaattaaagaaaaccctgatagaagccaacaagtttgggtagaatcagtacaatcttctaaagctaaagaacgtcaaaatattgaaaatgcggataaagcaattaaagatttccaagataacaaagcaccacacgataaatcagcagcatatgaagctaactcaaaattacctaaagatttacgtgataaaaataaccgctttgtagaaaaagtttcaattgaaaaagcaatcgttcgtcatgatgagcgtgtgaaatcagcaaatgatgcaatctcaaaattaaatgaaaaagattcaattgaaaacagacgtttagcacaacgtgaagttaataaagcacctatggatgtacaaaagcatttacagaaacaattagacgcattagtagctcaaaaagatgctgaaaagaaagtggcgccaaaagttgaggctcctcaaattcaatcaccacaaattgaaaaacctaaagcagaatcaccaaaagttgaagtccctcaaattcaatcaccaaaagttgaggttcctcaatctaaattattaggttactaccaatcattaaaagattcatttaactatggttacaagtatttaacagatacttataaaagctataaagaaaaatatgatacagcaaagtactactataataaatattaccaatataaaggtttgattgataaaacagttttaacaactatcggtagtggctatggttcatacattaaacctcttgaagtaagcaaagaaagcgggaacttagctaaatcatatgcacaagtaagaaactatgtaactgagtcaatcaacactggtaaagtgttatacgcattctaccaaaaaccagaattagtaaaaacagctattaaagctcaagaaacagcaacaactttcaaaaacgctttaacaggcatattcaaatcattctggaaataa

SEQ ID NO: 755 - DNA, 930 bp, Staphylococcus aureus
atgattaaaaataaaatattaacagcaactttagcagttggtttaatmgcccctttagccaatccatttatagaaatttctaaagcagaaaataagatwgaagatatcggycaaggtgcagaaatcatcaaaagaacacaagacattactagcaaacgattagctataactcaaaacattcaatttgattttgtaaaagataaaaaatataacaaagatgccctagttgttaagatgcaaggcttcatyagctctagaacaacatattcagacttaaaaaaatatccatatattaaaagaatgatatggccatttcaatataatatcagtttgaaaacgaaagactctaatgttgatttaatyaattatcttcctaaaaataaaattgattcagcagatgttagtcagaaattaggctataatatcggcggaaacttccaatcagcgccatcaatcggaggcagtggctcattcaactactctaaaacaattagttataatcaaaaaaactatgttactgaagtagaaagtcagaactctaaaggtgktaaatggggagtkaaagcaaattcattygttacaccgaatggtcaagtatctgcatatgatcaatacttatttgcacaagacccaactggtccagcagcamgagactatttcgtcccagataatcaaytacctcctttaattcaaagtggctttaatccatcatttattacaacattgtcacacgaaaraggtaaaggtgataaaagcgagtttgaaatcacttacggcagaaacatggatrctacatatgcwtacgtgacaagacmtcgtttagccgttgatagaaaacatgatgcttttaaaaaccgaaacgttacagttaaatatgaagtgaactggaaaacacatgaagtaaaaattaaaagcatcacacctaagtaa

SEQ ID NO: 756 - DNA, 456 bp, Staphylococcus aureus
atgtcgaccaataaaaacgattatgagcatatgttgttttattttgcatataaaacstttattactaccgctgatgaaattatagagaagtatggtatgagycgtcagcatcatcgttttttgttttttatcaataaattacctggtattactattaaatcattactagaaatattagaaatttctaaacaaggatcacatgcaacacttcaaaaattaaaagagcaaggtctcattattgaaaaagttttagagactgatcgacgtgtcaaaaaattatattcgacggataaaggcgatcaactcattgctgaattgaacaaggcgcaagatgaattattgcaaaatatatatcaacaagtcggttcggattggtatgatgtgatggaagcattggctaaagggcgacctggctttgattttattaagcatttgaaagatgaaaaagaaagctag

SEQ ID NO: 757 - DNA, 123 bp, Staphylococcus aureus
ttgaatcagcctcataacattaaattattttatcgtacattaaatttaataataacaactgatttttataagaataaagtatcgaaccatagtagatacacaaataatacaaatgaaacaatt

SEQ ID NO: 758 - DNA, 762 bp, Staphylococcus aureus
atggcttatatttcattaaactatcattcaccaacaattggtatgcatcaaaatttgacagtcattttaccggaagatcaaagcttctttaatarcgatayaactgytaaaccattaaaaactttaatgttgttacatggattatcaagtgatgaaacgacatatatgagatatacaagcatagaaaggtatgcgaatgaacacaaattagctgtgattatgcccaatgtggatcatagcgcatatgctaacatggcatatggtcatagctattatgattatattttggaagtrtatgattatgttcatcaaatatttccactttccaaaaarcgtgatgacaattttatagcaggtcactctatgggaggatatggcacaattaaatttgcattaacacaaggggataaatttgccaaagctgtaccattatctgctgtgtttgaagcgcaaaatttaatggatctagagtggaatgatttttcaaaagaggccataattggcaatctttcaagtgttaaaggaactgaacatgatccgtattayttgctagacaaagctgtagctgaagataaacaaattccaaaattgctcattatgtgtggtaaacaagactttttatatcaagacaayttagattttatcgattatttatcacgyawaaatgttccttatcaatttgaagatggaccaggagatcatgattatgcatattgggaycaagcgattaagcgtgctataacatggatggtgaatgattaa

SEQ ID NO: 759 - DNA, 948 bp, Staphylococcus aureus
atgcttaaaaataaaatattarcyacaactttatctgtragcttacttgcccctcttgccaatccgttattagaaaatgcyaaagctgcyaaygatactgaagasatcggtaaaggaarcgatrtagaaattatcaaaaggacagaagataaaacaagtaataaatggggcgtgactcaaaatatycaattygrytttgtraaggatamaaaatataacaaagwtgctytgatmttaaagatgcaaggattcattagctctmgaacaacatattayaactmtaaaaawacwaatcatrttaaakctatgcgwtggccattccaatataatattggtttraaaacaaatgataaatatgtttctttaatyaattatttacckaaaaataaaattgaatctacaaacgtragtcagayattaggatacaatatyggtggtaatttccaatcagccccatcactyggtggtaatggatcatttaactattctaaatcgattagctatacacaacaaaattatgtaagtgaagtagaacaacaaaactcaaaaagtgttttatggggcgtcaaagcgaattcattcgccactgaatcaggtcaaaaatcagcmtttgatagcgatttatttgtaggctacaaacctcatagtaaagatcctagagattatttcgttccagacagygagttaccwcctcttgtacaaagtggatttaacccttcatttatcgcmacagtatctcaygaaaaaggttcaagcgayacragcgaatttgaaatyacttayggaagaaayatggatgtcactcatgccattaaaagatcaacrcattatggcaacagttatttagayggwcayagagtccataatgcattyrwaaatagaaactayactgtkaaataygargtcaattggaagactcaygaaatcaargtgaaaggacagaattga

SEQ ID NO: 760 - DNA, 2634 bp, Staphylococcus aureus
ttgaaaaaaagaattgattatttgtcgaataagcagaataagtattcgattagacgttttacagtaggtaccacatcagtaatagtaggggcaactatactatttgggataggcaatcatcaagcacaagcttcagaacaatcgaacgatacaacgcaatcttcgaaaaataatgcaagtgcagattccgaaaaaaacaatatgatagaaacacctcaattaaatacaacggctaatgatacatctgatattagtgcaaacacaaacagtgcgaatgtagatagcacaacaaaaccaatgtctacacaaacgagcaataccactacaacagagccagcttcaacaaatgaaacacctcaaccgacggcaattaaaaatcaagcaactgctgcaaaaatgcaagatcaaactgttcctcaagaagcaaattctcaagtagataataaaacaacgaatgatgctaatagcatagcaacaaacagtgagcttaaaaattctcaaacattagatttaccacaatcatcaccacaaacgatttccaatgcgcaaggaactagtaaaccaagtgttagaacgagagctgtacgtagtttagctgttgctgaaccggtagtaaatgctgctgatgctaaaggtacaaatgtaaatgataaagttacggcaagtaatttcaagttagaaaagactacatttgaccctaatcaaagtggtaacacatttatggcggcaaattttacagtgacagataaagtgaaatcaggggattattttacagcgaagttaccagatagtttaactggtaatggagacgtggattattctaattcaaataatacgatgccaattgcagacattaaaagtacgaatggcgatgttgtagctaaagcaacatatgatatcttgactaagacgtatacatttgtctttacagattatgtaaataataaagaaaatattaacggacaattttcattacctttatttacagaccgagcaaaggcacctaaatcaggaacatatgatgcgaatattaatattgcggatgaaatgtttaataataaaattacttataactatagttcgccaattgcaggaattgataaaccaaatggcgcgaacatttcttctcaaattattggtgtagatacagcttcaggtcaaaacacatacaagcaaacagtatttgttaaccctaagcaacgagttttaggtaatacgtgggtgtatattaaaggctaccaagataaaatcgaagaaagtagcggtaaagtaagtgctacagatacaaaactgagaatttttgaagtgaatgatacatctaaattatcagatagctactatgcagatccaaatgactctaaccttaaagaagtaacagaccaatttaaaaatagaatctattatgagcatccaaatgtagctagtattaaatttggtgatattactaaaacatatgtagtattagtagaagggcattacgacaatacaggtaagaacttaaaaactcaggttattcaagaaaatgttgatcctgtaacaaatagagactacagtattttcggttggaataatgagaatgttgtacgttatggtggtggaagtgctgatggtgattcagcagtaaatccgaaagacccaactccagggccgccggttgacccagaaccaagtccagacccagaaccagaaccaacgccagatccagaaccaagtccagacccagaaccggaaccaagcccagacccggatccggattcggattcagacagtgactcaggctcagacagcgactcaggttcagatagcgactcagaatcagatagcgattcggattcagacagtgattcagattcagacagcgactcagaatcagatagcgaytcagaatcagatagygastcagattcagayagygaytcrgaytcagayagygattcagamtcagatagcgattcrgaytcagayagygattcagaytcagacagcgaytcagawtcagayagcgactcagawtcagayagygastcagaytcagayagygactcrgactcagacagygaytcagaytcagatagcgattcagactcagayagcgaytcagactcagacagcgaytcagaytcagayagcgactcagawtcagayagcgaytcagactcagayagcgactcagaytcagayagcgaytcrgaytcagayagcgattcagaytcagacagcgactcagactcrgayagcgaytcagaytcagatagcgattcrgaytcagacagygaytcagattcagayagcgaytcrgactcrgayagcgaytcagaytcagacagcgaytcagactcrgatagcgaytcagaytcrgayagcgactcrgaytcrgatagcgactcrgaytcagatagtgactccgattcaagagttacaccaccaaataatgaacagaaagcaccatcaaatcctaaaggtgaagtaaaccattctaataaggtatcaaaacaacacaaaactgatgctttaccagaaacaggagataagagcgaaaacacaaatgcaactttatttggtgcaatgatggcattattaggatcattactattgtttagaaaacgcaagcaagatcataaagaaaaagcgtaa

SEQ ID NO: 761 - DNA, 2742 bp, Staphylococcus aureus
ttgaaaaaaagaattgattatttgtcgaataagcagaataagtattcgattagacgttttacagtaggtaccacatcagtaatagtaggggcaactatactatttgggataggcaatcatcaagcacaagcttcagaacaatcgaacgatacaacgcaatcttcgaaaaataatgcaagtgcagattccgaaaaaaacaatatgatagaaacacctcaattaaatacaacggctaatgatacatctgatattagtgcaaacacaaacagtgcgaatgtagatagcacaacaaaaccaatgtctacacaaacgagcaataccactacaacagagccagcttcaacaaatgaaacacctcaaccgacggcaattaaaaatcaagcaactgctgcaaaaatgcaagatcaaactgttcctcaagaagsaaattctcaagtagataataaaacaacgaatgatgctaatagcatagcaacaaacagtgagcttaaaaattctcaaacattagatttaccacaatcatcaccacaaacgatttccaatgcgcaaggaactagtaaaccaagtgttagaacgagagctgtacgtagtttagctgttgctgaaccggtagtaaatgctgctgatgctaaaggtacaaatgtaaatgataaagttacggcaagtaatttcaagttagaaaagactacatttgaccctaatcaaagtggtaacacatttatggcggcaaattttacagtgacagataaagtgaaatcaggggattattttacagcgaagttaccagatagtttaactggtaatggagacgtggattattctaattcaaataatacgatgccaattgcagacattaaaagtacgaatggcgatgttgtagctaaagcaacatatgatatcttgactaagacgtatacatttgtctttacagattatgtaaataataaagaaaatattaacggacaattttcattacctttatttacagaccgagcaaaggcacctaaatcaggaacatatgatgcgaatattaatattgcggatgaaatgtttaataataaaattacttataactatagttcgccaattgcaggaattgataaaccaaatggcgcgaacatttcttctcaaattattggtgtagatacagcttcaggtcaaaacacatacaagcaaacagtatttgttaaccctaagcaacgagttttaggtaatacgtgggtgtatattaaaggctaccaagataaaatcgaagaaagtagcggtaaagtaagtgctacagatacaaaactgagaatttttgaagtgaatgatacatctaaattatcagatagctactatgcagatccaaatgactctaaccttaaagaagtaacagaccaatttaaaaatagaatctattatgagcatccaaatgtagctagtattaaatttggtgatattactaaaacatatgtagtattagtagaagggcattacgacaatacaggtaagaacttaaaaactcaggttattcaagaaaatgttgatcctgtaacaaatagagactacagtattttcggttggaataatgagaatgttgtacgttatggtggtggaagtgctgatggtgattcagcagtaaatccgaaagacccaactccagggccgccggttgacccagaaccaagtccagacccagaaccagaaccaacgccagatccagaaccaagtccagacccagaaccggaaccaagcccagacccggatccggattcggattcagacagtgactcaggctcagacagcgactcaggttcagatagcgactcagaatcagatagcgattcggattcagacagtgattcagattcagacagcgactcagaatcagatagcgattcagaatcagatagcgactcagattcagatagcgattcagattcagatagcgattcagattcagatagcgattcggattcagacagtgattcagattcagacagcgactcagaatcagatagcgactcagaatcagatagtgagtcagattcagacagtgactcggactcagacagtgattcagactcagatagcgattcagactcagatagcgattcagattcagacagcgactcagattcagacagcgactcagactcagatagcgactcagactcagacagcgactcagattcagatagcgattcagactcagacagcgactcagactcagacagcgactcagactcagatagcgactcagattcagatagcgattcagactcagacagcgactcagattcagatagcgattcggactcagacagcgattcagattcagacagcgactcagactcggatagcgattcagattcagatagcgattcggattcagacagtgattcagattcagacagcgactcagactcggatagcgactcagactcagacagcgattcagactcagatagcgactcagactcggatagcgactcggattcagatagcgactcagactcagatagtgactccgattcaagagttacaccaccaaataatgaacagaaagcaccatcaaatcctaaaggtgaagtaaaccattctaataaggtatcaaaacaacacaaaactgatgctttaccagaaacaggagataagagcgaaaacacaaatgcaactttatttggtgcaatgatggcattattaggatcattactattgtttagaaaacgcaagcaagatcataaagaaaaagcgtaa

SEQ ID NO: 762 - DNA, 2718 bp, Staphylococcus aureus
ttgaaaaaaagaattgattatttgtcgaataagcagaataagtattcgattagacgttttacagtaggtaccacatcagtaatagtaggggcaactatactatttgggataggcaatcatcaagcacaagcttcagaacaatcgaacgatacaacgcaatcttcgaaaaataatgcaagtgcagattccgaaaaaaacaatatgatagaaacacctcaattaaatacaacggctaatgatacatctgatattagtgcaaacacaaacagtgcgaatgtagatagcacagcaaaaccaatgtctacacaaacgagcaataccactacaacagagccagcttcaacaaatgaaacacctcaactgacggcaattaaagatcaagcaactgctgcaaaaatgcaagatcaaactgttcctcaagaagcaaattctcaagtagataataaaacaacgaatgatgctaatagcatagcgacaaacagtgagcttaaaaatcctcaaacattagatttaccacaatcatcaccacaaacaatttccaatgcgcaaggaactagtaaaccaagtgttagaacgagagctgtacgtagtcttgcagttgctgaacctgtagtaaatgctgctgatgctaaaggtacaaatgtaaatgataaagttacggcaaaagattttcaattagaaaagactacatttgaccctaaccaaagtggtaatacttttatggcggcaaactttacagtgactggacaagtgaaatcaggggattattttacagcgaagttaccagatagtgtaactggtaatggagacgtggattactctaattcgaataatacgatgccaattgcagatatagtaaacgataaaaatgaagttgtagcaaaagcgacatatgatattttgactaagacatatacatttgtctttacagattatgtaaatgataagcaaaatattaatgggaaattttcattaccactatttacagacagagcaaaggcacctaaatcaggaacatatgatgcaaatattaatattgcggatgaaatgtttaataataaaattacttataactatagttcgccaattgcaggaattgataagccaaatggcgcgaacatttcttctcaaattattggtgtagatacagcttcaggtcaaaatacatacaagcaaacggtatttgttaaccctaagcaacgagttttaggtaatacgtgggtgtatattaaaggttaccaagataaaatcgaagaaagtagcggtaaagtaagtgctacagatacaaaactgagaatttttgaagtgaatgatacatctaaattatcagatagctactatgcagacccaaatgactctaatcttaaagaagtaactgatcaatttaaggataaaatcacttataaataccaaaatgtagcaagtattaattttggtgatataaataaaacgtatgtcgttttagtcgaaggtcattatgataaaacaggtaaaaacttgaaaacgcaagtcattcaagaaaatgttgacccagcgacaggtaaagactacagtattttcggttggaataatgagaatgttgtacgttatggtggtggaagtgctgatggtgattcagcagtaaatccgaaagacccaactccagggccaccggttgacccagaaccaagtccagacccagaaccggaaccaagtccagacccggatccggaaccaacgccagatccagaaccaagcccagacccggatccggattcggattcagacagcgactcaggttcagatagcgattcggattcagacagcgattcagactcagacagcgactcaggttcagatagcgattcggattcagacagcgactcagaatcagacagtgagtcagattcagatagcgattcagaatcagatagcgactcagattcagatagtgagtcagattcagacagtgactcggactcagatagcgattcagactcagacagcgattcagactcagacagcgactcagattcagatagcgactcagactcagacagcgattcagaatcagatagcgactcagattcagatagtgagtcagattcagatagtgactcggactcagatagcgattcagactcagacagcgattcagactcagacagcgactcagactcagatagcgactcagattcagatagtgagtcagattcagacagtgactcagactcagatagcgattcagactcagacagcgattcagattcagacagcgattcagactcagacagcgactcagactcagacagcgactcagaatcagatagcgattcagactcagacagcgattcagattcagatagcgactcagactcagacagcgattcagatagcgactcagactcagacagcgactcagaatcagatagcgattcagactcagacagcgattcagattcagacagcgactcagactcggatagcgactcggattcagatagtgactccgattcaagagttacaccaccaaataatgaacagaaagcaccatcaaatcctaaaggtgaagtaaaccattctaataaggtatcaaaacaacacaaaactgatgctttaccagaaacaggagataagagcgaaaacacaaatgcaactttatttggtgcaatgatggcattattaggatcattactattgtttagaaaacgcaagcaagatcataaagaaaaagcgtaa

SEQ ID NO: 763 - DNA, 2622 bp, Staphylococcus aureus
ttgaaaaaaagaattgattatttgtcgaataagcagaataagtattcgattagacgttttacagtaggtaccacatcagtaatagtaggggcaactatactatttgggataggcaatcatcaagcacaagcttcagaacaatcgaacgatacaacgcaatcttcgaaaaataatgcaagtgcagattccgaaaaaaacaatacgatagaaacacctcaattaaatacaacggctaatgatacatctgatattagtgcaaacacaaacagtgcgaatgtagatagcacagcaaaaacaatgtctacacaaacgagcaataccactacaacagagccagcttcaacaaatgaaacacctcaaccgacggcaattaaagatcaagcaactgctgcaaaaatgcaagatcaaactgttcctcaagaagcaaattctcaagtagataataaaacaacgaatgatgctaataacatagcaacaaacagtgagcttaaaaatcctcaaacattagatttaccacaatcatcaccacaaacgatttccaatgcgcaaggaactagtaaaccaagtgttagaacgagagctgtacgtagtcttgcagttgctgaacctgtagtaaatgctgctgatgctaaaggtacaaatgtaaatgataaagttacggcaagtgatttcaagttagaaaagactgcatttgaccctaaccaaagtggtaacacatttatggcggcaaattttaaagtgactggacaagtgaaatcaggggattattttacagcgaagttaccagatagtgtaactggtaatggagacgtggattactctaattcaaataatacgatgccaattgcagacattaaaagtacgaatggcgatgttgtagctaaagcaacatatgatatcttgactaagacgtatacatttgtctttacagattatgtaaatgataaagaaaatattaacggacaattttcattacctttatttacagaccgagcaaaggcacctaaatcaggaacatatgatgcaaatattaatattgcggatgaaatgtttgataataaaattacttataactatagttcgccaattgcaggaattgataagccaaatggcgcgaacatttcttctcaaattattggtgtagatacagcttcaggtcaaaacacatacaagcaaacggtatttgttaaccctaagcaacgagttttaggtaatacgtgggtgtatattaaaggttaccaagataaaatcgaagaaagtagcggtaaagtaagtgctacagatacaaaactgagaatttttgaagtgaatgatacatctaaattatcagatagctactatgcagacccaaatgactctaaccttaaagaagtgactggtgagtttaaagataaaatttcatacaaatacgataacgtagcaagtattaattttggtgatataaataaaacgtatgttgtattagtggaaggtcactatgataatactggtaaaaacttgaaaacacaggttattcaagaaaatattgacccagcgacaggtaaagactacagtattttcggttggaataatgagaatgttgtacgttatggaggcggaagtgctgatggtgattcagcagtaaatccagttgatccaacaccgggaccaccagttgacccagagccagaaccggagccaacgccggatccagagccaagtccagagccagaaccggaaccaacgccagatccagagccaagtccagaaccagatccggattcggattcagatagtgactcaggctcagacagcgactcaggttcagatagcgattcggattcagatagtgactcagactcagatagtgactcaaactcagacagtgagtcagattcagacagtgactcggactcagatagtgactcagattcagatagcgattcagattcagacagcgattcggactcagacagtgagtcagattcagatagcgattcggactcagacagtgactcggactcagatagtgactcggactcagatagtgactcaaactcagatagtgactcagattcagacagcgattcggattcagatagcgattcagattcagacagcgattcagaatcagacagcgattcggattcagacagtgactcggattcagatagcgactcggattcagacagcgattcggactcagacagtgactccgattcagatagcgattcagaatcagacagtgagtcagattcagatagcgattcagaatcagacagtgactcagacccagacagtgagtcagattcagacagcgattcagactcagacagcgattcagactcagacagtgagtcagattcagacagtgagtcagattcagacagcgattcggactcagatagcgactccgattcaagagttacaccaccaaataatgaacaaaaagcaccatcaaatcctaaaggtgaagtaaaccattctaataaggcatcaaaacaacaccaaactgatgctttaccagaaacaggagataagagcgaaaacacaaatgcaactttatttgatgcaatggtggcattattaggatcattactattgtttagaaaacgcaagcaagatcataaagaaaaagcgtaa

SEQ ID NO: 764 - DNA, 978 bp, Staphylococcus aureus
atgaamatgaataaattagtcaaatcatccgttgctacrtctatggcattattattactttctrrtactgcwaatgctgaaggyaaaatmacaccagtyagcgtmaaaaaagtmgatgayaaagttactttatacaaaacwacagcyacagcagattcwgataarttyaaaatttcacagattttaacattyaatttcatcaaagataaaagttatgataaagatactttagtrcttaaagctrcwggkaatattaactcaggytwtgwraraccwaatcctaawgactaygacttttcaaaawtatattggggwgcwaaatacaatgtrtctatmagytcacaatctaatgattcrgtwaaygyhgtwgaytatgcaccwaaaaatcaaaatgaagartttcaagttcaaaayactttaggctatacatttggtggtgacatyagtatctctaatggtttatctggyggacttaayggaaayacwgctttttctgaaacaattaattataaacaagaaagttacagaacaacattaagtcgcaacacaaattataaaaatgtyggytggggwgtwgaagcacataaaattatgaataatggttggggaccttatggamgagatagcttccacccaacatatggtaatgaactcttcttagctggcagacaaagcagtgcatacgctggccaaaacttcatagcgcaacaccaaatgccattattatctagaagtaacttcaatccagaatttttaagcgtactatcacacagacaagatsgcgctaaaaaatctaaaattacagtaacttatcaacgtgaaatggatttataccaaattygttggaatggcttctactgggcaggcgcraattataaaaactttaaaactagaacatttaaatcaacatatgaaattgattgggaaaatcacaaagtgaaattgttagatacaaaagaaactgaaaacaataaatar

SEQ ID NO: 765 - DNA, 705 bp, Staphylococcus aureus
atgacagaaaactttattttgggtagaaataataaattagaacatgaactaaaggcattagcagattacattaatatmccatatagtatattacaaccatatcaaagtgaatgttttgtcagacattatacgaaaggccaagttatttatttttcgccacaagaaagtagcaatatttactttttaattgaaggtaayattattagagaacattacaatcaaaatggagatgtatatcgttattttaataaagagcaagtattatttccaatcagtaacttatttcatccgaaagaggttaacgaattgtgyacagcattaaccgattgtacagttcttggattgcctagagaattgatggcytttttgtgcaaagctaatgatgatatatttttgacactttttgcattaataaatgataatgagcagcaacacatgaactataacatggcattaacaagtaaatttgctaaagatcgaattatyaaattgwtwtgycatctatgtcagacagtaggrtacgatcaagatgaattttatgaaatcaaacagtttttaactattcaactcatgagtgatatggctgggatttcccgggaaacagctggtcatattattcatgaacttaaagatgaaaaacttgttgttaaagatcataaaaattggttagtaagcaaacatttattcaatgatgtatgtgtttaa

SEQ ID NO: 766 - DNA, 1143 bp, Staphylococcus aureus
atgcaattacaaaaaattgtcatcgctcctgactcatttaaggaaagtatgaccgcacagcaagttggcaatattataaaacaggcwtttactaatgtttatgggaawacccttcattatgatatcattccgatggctgatggtggtgaaggyaccacagatgctttaatgcatgcaacaggtgcyactaagtatacagtcatcgttaatgaccctttaatgcgacctattgaagcatgttatgcacgcgcagacgaacaacaaattgcaattattgaaatggcrgcagcgtcaggtttggatttattagaaaaagaggaacgtaatcctttatacacatcatcatatggtaccggtgaactaattaaagatgcattaaatcatggtgctaagaccattattttagggattggtggcagtgcaacaaatgatggtggtacaggtatgctaagtgcactrggcgtwmagtttactgatgtaaacggggacttattacaaatgaatggtgmtaatcttgctcacattgcacaaatcgatataaccaatctagattcgcgattaaaagargtgacctttaaagtggcctgygatgtttcaaatcctttattgggtgaaaatggtgctacctatatttatggtcctcaaaaaggcgctgatgcaaagatgataccaaagttggatttcgcaatgtcgcattatcatgataagataaaaatgtgcacaggaaagtcmgttaatcaaataccaggttctggtgcagctggcggtatgggcgcagcattattagcgttttgtgagacaactttaacaaaaggtattgatgtcgtctttgacattacagattttcatcaaagaattaaagatgcagacctcgttattactggagaaggacgcatggattatcagaccatctttggtaaaacacccgtaggcgttgcgttagctgcaaaacaatatcatattcctgtcatcgcgatttgtggcagtctaggcgaaaattatcaacatgtttacgatttcggtattgatagtgcctattctataatctcttcacctagcactttagaagatgtcctacaaaatagcgaacaaaatttattaaacactgcaactgacattgctcgtattctgaaattrcaataa

SEQ ID NO: 767 - DNA, 942 bp, Staphylococcus aureus
atgaaagagaaaattgtcattgcattaggcggtaatgcgatacagacaamagaagcaacagctgaagcacaacaaacagctattagaygtgcgatgcaaaaccttaaacctttatttgattcaccagcgcgtattgtsatttcacatggtaatggyccacaaattggargtttattaatccaacaagctaaatcgaacagtgacacaacgccggcaatgccattggatacwtgtggtgcratgtcacarggtatgataggctattggttggaaactgaaatcaatcgcattttaactgaaatgaatagtgatagaacygtaggcacaatcgtwacacgtgtggaagtagataaaratgatycamgattyratamcccaacyaaaccaattggtcctttttayrcgaaagaagaagttgaagaattacaaaaagaacagccagrctcagtctttaaagaagatgcaggacktggttatagaaaagtwgttgcgtcaccactacctcaatctatactagaacaccagttaattcgaactttagcagacggwaaaaatattgtcattgcatgcggkggtggcggtattccagttataaaaaaagaaaatacctatgaaggtgttgaagcggttatagataaagattttgctagtgagaaattagcaacgctgattgaagcagataccttaatgattcttacgaatgtagaaaatgtatttattaactttaatgaacctaatcaacaacaaatcgatgatattgatgtagcaacactgaaaaaatacgcggcacaaggtaagtttgyggaaggatcgatgttgccaaaaatagaagctgcgatacgatttgttgaaagtggggaaaacaaaaaagttatcattaccaatttagagcaggcatacgaagctttgattggtaataaaggtacacacattcacatgtag

SEQ ID NO: 768 - DNA, 933 bp, Staphylococcus aureus
atggaagagaataaaactttaaaagaatacttgcgtaattttttagaaggttacaaatatgtagttgaaaacagatacatttatcagtttagtagtaatccggaagccttcccattcatgagaaaagacgattacaagatttcgatattttatctaaatcaatctttttttgaagaaccttgcatcgttgttatctcaaatgacagtaaattaaaagaaatatataattttcgtaatactgatatcaaacatttgtctaaacactttacttcatacatatatgattctaaaaagtatgtagaagaacaatccggattattagattttaataactacatttattacacgtctatttactacggaaaatatatcgggactgtaataatacaaaacaatttagatttattttttaattatggcaaacgattagctaacgatcattacaatacattgatatcgaagtcgaaagagaaattgataaacaaagcacatgatgaaatacaaccgttcaaccacttagatttaaatagcatgaaaaagattgttgatgatataactttttcttatcaaatagaacaaggattacaagcttataaaagggagttgtatttgccagctgcagcaacctttgctgttgctatagagacgtttttaatcaaattaaaaaaagtgaataaaatcaaacataaagacaccgattcaactatgtacaccaaattattaggagaattaactaaagagggtaaagtgaattatagaaccaaaaaacgggtagaaattgcttatagtatgagaaatataatcaaccattcacaagccggtgcagtagccaaaggtgattgcgacttccttttaaacacactaaaggacatcgttgatgaaaacgaaagaatattaaccgaatacagtaaatcaattaataagacggaataa

SEQ ID NO: 769 - DNA, 210 bp, Staphylococcus aureus
atgaaagcttgtttatatctttctaatgataaatttgttgaaatcgataatttagaaaaagtgataaagtcaggtcatcgcggaactgttgaaatatcaaaagaaaaaattaaaagttccttgttcactaatggctcatatacttttgttggagacaaaatagtagctatcgcttcagctaaaatcgaattcatagaatttatcgattaa

SEQ ID NO: 770 - DNA, 1389 bp, Staphylococcus aureus
atgaatgcttttcttacactgattaatattattgtattggtgattttcatcgtaatattgcacatgatggctcgyaaacatatatcttttgcgaaacgtgtgtttacagctttaggkatyggyatwgtattyggygtgttaytrcatcttrtytatggmacacattcgaatgttatwacatcaacaagtgactggttcaacattgtcggacaaggttacgttgcattgttgcaaatgattgtkatgcctttaattttcatttctattgtmgctgcattcactaaaattcaaatcggagaaaartttgctaaaattggtagtctcatttttatctttttaatyggcactgtcaccattgctgcrattgtyggtgttgtktatgccttgrtgtttggtttagaygcatcaacaattaaycttggtaacgctgaacaagcrcgtggaagcgaaattgctaaacaagcgaaagatttaacagcacatacgttaccacaacaaattttggaattattgcctaaaaatccattcttagatttcactggacaacgtgcaacttccacgattgctgtygtgatatttgcttcgtttataggatttgcttatttacgcgtagcacgcaaacaacctgatcatggtgaattgcttaagcgtgcgattgacgctatctattcactagtaatggcgattgtgacgttcgtcttacgtttaacgccatacggtgtattagcaattatggccaacacrttatcgacaagtgactttggcgccatttggactttaggaaaattcttaatcgcatcgtacgctgcattaattacgatgtatatcattcacttaattattttaagcctgttaggyattagcccwattcgctatrttaaaaagactttggaagtattaatctttgcattcacatcacgctcaagcgcgggtrccttaccaytgaatgtacaaacacaaacaagacgtctaggcgtgccrgarggtattgccaatttcgctgcgacatttggattgtcgattggacaaaatggttgtgcwggcatttaycctgccatgcttgcaattatggtcgcacccgtcgctaatgtagaaattgatttacaatttattgtaacgttaatcgctgtcgtgattattagttcattcggcgttgctggcgtcggtggcggggctacatttgcatccatattggtgttgtcaacgttaaacttgccagtcgctttagccggcgtgctcatctccgttgaaccattgattgacatgggtagaacagcattaaacgtgaacgattcaatgctagctggtacaggtaccgccaagttaacwaaacattgggayaaagatactttcgawtcaaatgataatgctgcattaacttcacactaa

SEQ ID NO: 771 - DNA, 1308 bp, Staphylococcus aureus
ttgtatcacaaggcattttacaagtttgtattatcggtattaagcttgccawtatttttatatgcagtgataaagtttttcttttctgctaagagraaaaatttttacgctaataattctgaaatttcagaaatygaacrrgcgttacatcaaaaatataaatatttatcgcagcaaaagtcatccacacaaatacataaagaagcattaaaaatattcaagrcacaaagttctaatacgarttcaaagaatattgaacaagcacatttttcaacatactttgaaaatktattatttcataagttcatcatkatcaaagtratattggcsttrccgatgttcatcttattgactwtttatttacagccattagttagatatatttttgarmgaattgtcatggctgtgattgtcatcattggtgttattgtcagtgtgtttascattctgtatttttcaccgcttgatgcggcttatagcatactgggacaaaatgcaacaaaggcacagatacatcaattcaatgtattacatcatcttaacgaaccttattttattcaattgtgggataccatcaagggtgtttttacctttgacttaggtacgacttacaaagggaatgakgttgtgactaaagcagttggcgaaagaattccaattacaataattgtcgcagtattagcgctaatkgtggcattaattattgcaataccaattggtattatcagtgcgatgaagcgaaatagttggcttgatatcacgttaatgataattgcattaattggtttrtctattccaagtttctggcaagggytattattcattttagcgttctcattgaaattggatattttgccaccatcttatatgccagaacatccaatatcgttgattttacctgtacttgtcattggaacaagtattgctgcttctatcacgcgtatgacaaggtcttctgtacttgaagtaatgcgcagcgattatgttttaactgcttatgcaaaaggattatcgacgacacaagtkgttattaaacatattttgaaaaatgccattattccaattgtaacgytagttggtcttctagtggcagagttactaggcggttcagcagtgacggarcaagtatttaacattaatggtatcggkcgttatatcgtccaaaaacaactaatacctgatatyccagcagtcatgggtggggtcgtatatatatcaattgtaatatctttagcaaacttaattattgatatattttatgctttaatcgatccaaaattacgtagtgaaatyaacgaaaggaagtga

SEQ ID NO: 772 - DNA, 660 bp, Staphylococcus aureus
atgaaaagaactgataaataccgtgattcatatcaatacgacaatcaaaaycaaaatcatcgtcgtcaatctgaagacgcatcgtatagacaacaatatgctaaaggygatcctgaagaacacccrgaacgatactataayggtagagattatcgaagagaacaaattcttgaagaagaaaacgagaaatcccgccgttcaaaaaaatggttatatatcattattgcyattctcttaattattgtcgctatttttgtcacacgcgccttacttaacaatgatagcgataaagttagtaatgaccctaaagtctctcaaaattataaaaaacaagttgaaaatcaagacggccaaattaaccagcaagtmgataatgctaaagaaaatattaaaaacaaccaaaaaactgatgacattattaaaaatttacaaaatcaaatcgayaacttgaagcagcaagaacaaaacaaagctgattctaagctaactcaattttatcaagaccaaatcaacaaattgacagaggcaaataatgcacttaaaaacaatgcaagccaaggtaaaattgaaagcatgttaaatgatattaatacaaaattcgacagtattaaatctaaattagaaagcttatttaaagatgamaatggtggcgctaattaa

SEQ ID NO: 773 - DNA, 1431 bp, Staphylococcus aureus
atgaacgaatcaggagataacaaactcagtaaatcttctttaattggactagttataggatccatgattggtggcggtgcgttcaatataatgtctgatatgggyggtaaagccggtggattagccattattattggttggattattacagctataggaatgatttcattagcgttcgtatttcaaaatttaaccaatgaacggccggagctagacggtggtatttatagttatgctcaagcaggatttggcgattttgtaggmtttatcagtgcttggggatattggttctcagcrtttttaggcaatgttgcctatgcaacactattgatgtcagcagtwggtaactttttcccgatttttaaaggaggcaacacattaccaagtrttattgtcgcctcgttactactctggggtgtscatttcytrattttaaaaggygttgaaacagcagcmtttatcaatagtattgttactgttgcaaagttaatmccgattttacttgtaatcatatgcatgataattgcattcaattttgacacttttaaaacaggctttttcrgtatgacgtcagagggtgtattgccatttagttgggcgagcacaatgagccaagttaaaagtacgatgctagtgacagtttgggtgtttatcggtatcgarggtgcagtaattttttctagyagagctaaaaataaaaaagatgtaggtagtgccacggttataggacttatatcagttttaattatctatttcttattaactgtattagctcaaggcgtgattttgcaaaatcatatttckcaattagattcgccaagtatggcacaggtgcttgcawctattgtaggtggttggggatctacacttgtaaatattggtttaattatttcggtactaggtgcatggttaggatggacaytgcttgctggtgaattacctttcattgttgcaaaagatggattatttccaaartggtttgctaaagaaaataaaaatggagcacctgtaaatgcactgcttattaccaatatattagtacaattatttttaataagtatgctatttacacagagtgcgtatcaatttgcattttcactagcatcaagtgctattttatacccttacatgttcagtgcattttaccaagttaaatacactttagagcatcgacagcaagcaactactaarcaatggacgattggyatcatagcctcaatttatgctatatggcttatatatgcagcaggtatcaattacttattaytgacgatgttactttatattccagctcttcttgtttatwcaatcgttcaaaagaataatcagacacgtttgattaaatcagactatattctttttatgattattatcgtacttgcagttatcggrttaattaagttattgatgggaacgataaatgttttttaa

SEQ ID NO: 774 - DNA, 1212 bp, Staphylococcus aureus
atgcaatcwwcgaaaaccaaaacgaagcatttttcatttttattgctaatyacgttaggygtcatgaccgcttttggcccwctaactatagatatgtacgtaccatcattacctaaagtgcaaggtgattttggttctactacatcagaaattcaattaacattatcattcacaatgattggtcttgcactaggccaatttatctttggacctttatccgatgcttttggtcgcaaacgkattgctgtatccattttratcattttcattttggyatcaggtttgtctatgtttgttgatcaattgccattattcttaactttacgatttattcaaggtttracwggtggtggcgtcatcgtkattgcmaaagcctctgctggtgataaatttagtggcaacgcactcgctaaatttttagcatctttaatggtagtwaatggcatcatcactattcttgcaccattagcyggtggattagctttatccgtagcaacatggcgttctattttyacaattttaacwattgtggcactcatcattttaattggcgtcgcttctcaattacctaaaacayctaaagawgaattaaagcaggtgaattttagtagcgtcattaaagaytttggaagtcttttgaaaaaaccagcatttattattccaatgctattacaaggtttaacttatgtaatgctwtttagttattcatctgcatcgccatttattactcaaaaattgtataatatgacaccccaacaatttagtatcatgtttgctgttaacggtgtaggtttaatcattgtcagtcaagtcgttgctttattagtagaaaaattacatcgycacatattattaatcattttaactattatacaagtggtrggtgttgctttaattatcctgacacttacattccatttaccactttgggtcttactcatcgcattcttcttaaatgtgtgtcctgtgacgtcaattggaccrcttggtttcacaatggctatggaagaacgaacaggtggcagtggtaacgcatcaagtttacttggcttattccaatttatcttaggtggcgctgttgcaccattagttggcttaaaaggcgaatttaatacatcaccatatatgattattatcttcattacagccattctattagtcagtctacaaatcatttactttaaaatgattaaaaagcaacatgtcgcataa

SEQ ID NO: 775 - DNA, 1011 bp, Staphylococcus aureus
atgacagaaattcaaaaaccgtatgatttaaaaggcagatcattattaaaagaaagtgattttaccaaagcagaattcgaaggacttattgattttgcaattacattaaaagagtataagaaaaayggtatyaagcatcactacttatctggaaaaaatattgcactactattcgaaaagaattcgacgagaacgcgtgcwgcgtttacagttgcgtctattgatttaggtgcgcatccagaatttttaggraaaaatgatattcaattaggcaaaaaagaatctgtagaggatactgcgaaagtattaggtagaatgttcgatggtattgaattccgtggtttttcacaacaagctgttgaagatttagcgaagttctctggtgtrccggtgtggaatggattaacagacgattggcatcctacacaaatgttagctgattttatgacaataaaagagaattttggatatctrgaaggaataaacttaacttacgttggagatggacgtaataatattgcgcattcattaatggtagcaggtgctatgttaggtgttaatgtaagaatttgtacacctaaatcattaaatccaaaagakgcatatgttgatattgcaaaagaaaaagcgagtcaatatggtggttcartcatgattacggataatattgcagaagcagttgaaaatacagatgctatatatacagatgtttgggtatcgatgggtgaagaaagtgaatttgaacaacgtattaatttattaaaagactatcaagtgaatcaacagwtgtttgatttaacaggtaaagattcaacgatattcttacattgtttaccagcattccatgatacaaatacactttatggacaagaaatttatgaaaaatatggattagctgaaatggaagttacagaccaaatctttagaagtgaacattcaaaagtgtttgatcaagctgaaaatagaatgcatacaattaaggcagtaatggcagcaacattggggagttaa

SEQ ID NO: 776 - DNA, 258 bp, Staphylococcus aureus
ttgttttcatgtaatttaagaaatggatttgtttttagtgggttatttttaattctgttcttaaatggtttgaattttgcggttgcaaatatgatagcagcttcttttgacaaagtaatagaacctttttcttctggtaccatgatattcactccttgtacaattggatttaaatcttataaaataattttactatacaaaataggttgtgtaaatagtttcttattgttaccaaataatatgtttggaagcgttatg

SEQ ID NO: 777 - DNA, 1236 bp, Staphylococcus aureus
atgacagatggtccaattaaagtaaatagcgaaattggagctttaaaaactgtgttacttaagcgtcctggaaaagaattagaaaatttagtrcctgattatttagatggattactatttgatgatattccatatttagaagtagctcaaaaagagcatgaccattttgcrcaggtgctaagagaagagggtgttgaagtactttaccttgagaagttagcagctgaaagtattgaaaatcctcaagtaagaagtgaatttattgatgatgtattagcagagtctaaaaaaacaatattaggtcatgaagaagaaattaagrcattatttgcgacactttctaatcaagaacttgtagataaaataatgtcaggrgtacgtaaggaagaaattaatccgaaatgtacacatctagtagagtayatggatgataagtatccattctatttagatccaatgccaaacctttattttactagagatccacaagcctcaataggacacggtataacaatcaatcggatgttctggagagcacgacgacgagaatcaatatttattcaatatattgtaaagcatcatcctagatttaaagatgcgaatattccaatctggttagatcgagattgcccattcaatattgaaggcggcgatgaacttgttttatctaaagawgtcttggctataggcgtttcagaacgtacatctgcacaagctattgaaaagttagcgcgacgtatttttgaaaatccgcaggcgacgtttaaaaaagtagtagcaattgaaattccaactagtmgaacwtttatgcacttagatacagtatttacaatgatagattatgacaaatttacaatrcattcagccattttaaaggcagaaggcaatatgaatatatttattattgaatatgatgacgtaaataaagatattkccatcaaacaatctagtcatttaaaagatactttagaagacgtwctaggtatagatgatatccaattcattccaacaggaaatggtgatgtcattgatggtgctagagagcaatggaatgatggctcaaatacattatgtataagaccaggygttgtagtgacttacgatagaaactatgtatcgaatgatttattgagacaaaaaggyatwaaagtcattgaaatatctggtagcgagytggtacgtggacgtgggggycctagatgtatgagtcaaccaytattcagagargacatttaa

SEQ ID NO: 778 - DNA, 570 bp, Staphylococcus aureus
atgatgttgcaatacaayaaccaacatatccctgctacagaaattatgagacattggccgacacatccgaacaatccacataaaggttatgttggacatcacttattcattaagcttggcaattatcatcaaacratatttccagawgcatatgtaccatttttacaaaaatacaatcctaatatcgtagacggcactggtaaatcsttagaagatcttaaaggtattatcgatcaaggtcaacctgtgttaatataccatactaatcttggytctaaaccattactacgtgttttccgctttgataacaagccagcgaaacaagtttcaaatattcacgtaacgttactcattgggtacgatgattactattactattatatcgatccactttggagtcatattcgtcgtggcctagttttacctgccatcattccaaatcgcaaacaaattattaaaattcgtaaagagaaaatggaatacagctttaattcaccaggaagaaartgcatttatgtgcaaccacattcatatacaattgaaaatcarmaacaaaataaacacacgtaa

SEQ ID NO: 779 - DNA, 1410 bp, Staphylococcus aureus
atggcaagaaaattgcatagagagttgaataacagacacatccaattratagcaattgggggcgcaattggaactgggttattcctaggatcaggtcaaacaatatcyttaactggtccatcactgttattcacatacatgattattggggttgtactattcgcttttatgcgcgcattaggcgaattgttgttgagcaatacaagatttaattcatttgttgatattgcaaatgaatatttaggcccttttggtggctttgtcattggctggacttactggytatgttggattgtatcaagtatgtcagacctaactgcgatgggacaatactttgcattttggtatccacaagtcccaaattggattaccgtgctatttattgttttaatcttgattagcttcaacttattaggtgccagattatttggtgaactggagttttggttctckattattaaagttgtyacaattattgcgatggttatcgttggtcttgtattaatctttttctcatttaaaacacattatggacatgcatcattcacaaacttaatcagtcacggyggcatgttccctggwggracatttggtttcytaatgtcattccaaattgctgtatattcattcattggtattgaacttataggtgtaactgctggygaaacgaaagatcctgaaaaracyttaccgaaagcaattaataatgtacctatccgtattttattattctatatcggtggtctattagtaattatgtcagtcataccttggaatgatatcgatccaaatagtagccctttcgttaaactctttacattaatcggygtrccatttgcagcaggygtcgttaactttgtcgtgctaactgccgcggcctctgctacaaatagtggwatctattcgaatagtcgtatcttattcggactgtcacaacaagggttaggtcctaaagttttaaataaaacgaatagtcatggcgtgccttatttatcaatgttagtttcatcaattgcattacttatagcagccttgttaaactacattttycctaatgcaattcaactattcatatacgttacaacgttatcaactgtgttgtttttagttgtttgggcaatgattattgtcgcttatctaatgtatttgaaaaagcatcctgaggcacataaaaacagtaaatttaagttgattggtggyaagcctattgcttacattattytagckttcttcttctttgtattcattttattattctttagtgacgaaacaagagcagctatttatatttcrccrttctggtttatatttttatttttcttttataaaaaatacaaaacgaatgctgaaaarctcgcrtatgaacaacgacaaaatgacagcggtcatttcagatatgacaatcaataa

SEQ ID NO: 780 - DNA, 450 bp, Staphylococcus aureus
atgaagaaaagtaaacgattagaaattgtttctacaatagttaaaaagcataagatttataaaaaagaacaaatcatttcatatattgaagaatattttggtgtaagatatagtgcaacaacaattgctaaagacttgaargaactwaatatatatcgtgtccctatcgattgtgaracatggatttataaagctattaataatcaaacagaacaagagatgagagaaaagtttaracaytattgtgaacatgaagtwctwagytcratyatcaatggykcatayattatmgtyaaaacctcaccwggtttcgcycaaggcatwaactaytttatcgatcarytaaatatwgaagaratattaggtacggtgagtggaaatgacactacattaatcttaactgcmtcaaatgatatggcagaatacgtatatgcaaaattatttaaatag

SEQ ID NO: 781 - DNA, 2079 bp, Staphylococcus aureus
atggcactattagaagyatttttaatttttatttttgctgtgattattagttcggttatcaataatcgattyccrcaaattcctactgcctttattcaaattgcattaggtgtcgttattttcattattccaatacaagttgatttccaattcaattctgaagtrtttatgtttgccgttatcgcgccactactttttgtrgaaggtacccacgtctctcgaacaaaattattagaatatcgyaaacctatactattaatgtcaatggcactagtgtttgcaactgtagtcggtgttggctattttatacattggatttggcctgccttaccaatgccagccgcttttgcaatagcagcaattttatgtcctacwgatgcagtagcagtatctgctattacacgcggaaaattattacctaaaggttctatgacgattttagaaggtgaatctttactcaatgatgcwgcaggtatcatttcwttyaaaatygctgttacwgcattagtaactggtaccttttcattattccaagctrttgaacaatttatcatttcaacaatactaggtgtacttattggtgcaattattggattcgttgtcgttagaatacgtatagacttaaccgctaataaaggtttaaaagataacaataccttaacttttattcaattattaactccttttgtcgtatactttttagcagaagaagttcatgcttcaggtatcattgcagttgtaatcgcaggtctaatccatggtttagaacgcgaccgtttaattagagcacaaacggaactacaaatgaattaccatcaaatttggaacacatttagttatgccttaaatggttttgtatttgttgtattaggttttatgattcctactgtagtcatagatattttccaaacagagcctgacaacttttcatttttaatagtgatcactatattaatcgctattgcaatttatgcatgtcgatttgtttgggtttatttctggtacaaagatttttatttcccgaaaaatatacaatcttatctagacgargaacatgattcacatgaaacaccaccttctcgwgtgcgttacgcatttattatgacsatgtgtggtattcacggtacmatttcactttcaatggcacttacattrccrtttatyattacamaaggrcaagcwttygaataccgtaatgatytattgtttattgcatctttcatggtattaattagtttaatyttagcgcaaattgttttacctttaattacaccatctgccgaagatactacttttaaaggtatgacttatcaatctgccaaaattttcattgttcaaaaagtgatmcagcattttaaaaacgaaagtaaaaaagacaaaaacgatacaaattatcgcccagtattaaaccaatactatggagaattgttatttttattaaattcagaacctrataatcaaaatacaaaagaactcaaacgtttagaagatattgcaaaagtaatcgaaacatctacacttgagcgtttaatygataaaggtaaggcaacrtaycaggatattaataattaccgcaatattgtcgaattaacagagacacaccgtactgcatcatttgttgaaaaatttgcaaacttcttcaagatgttatggcttagacttaaagcgatgaagcactacaaagccttaaayaaagaatctaagaagcaagaatttgaaaattcattcaaagatgttcaaaaaattatgcgtattgtgaatcacaatattattttacgcttaaaagaagaacaaaatagtacaaatgtacttgaggttagcttagtcattaatcattactatgatatgagtcgctcattaaagtggcgtgcacaacgtcgaaaagaacgtcaagaaaacagcaatcaaatcataccgcaagctatgttccataaccacaaattggaagcattgtacttacaacgtcaycttttagatgaattaattcgcaaaaataaaatcaacaatatcgttgcagctcaaattcgagaaaatatcaattacaacgaaattgtcttgtctttacagtccaaasattaa

SEQ ID NO: 782 - DNA, 1497 bp, Staphylococcus aureus
atgactactaaaaaactgtattttctatccatttctattatcattwtagtcgccatttcaattgctatayatataacattaaatagcaatacgaagacacggttaaccaatgattcgcaacaacaaatagatamaattatcgagcatgatttacaaaagggacacattcctggagcatcaattttaatagtaaaaaatggcaaagtttttttaaataaaggttatggttatcaagatgttgataaaaaagtcaaagcttctcccacaacaaagtatgaaattgcttctaatackaaagctttcacaggtcttgcaattttaaaattagctcaagaaggtcgattaaacttaaatgatgmcgtatccaaacatgtgcctcattttaaaatgaactataatggtcaaaatgaaactattacgattaagcaacttttggctcaaacaagtggtatacctagtgatattacaagcgaagaykcygtracaaryaaaaataatcgtttaaatgatgtaacccrtgcaattatgggtgatgaattacatcataagcccggagaagaatttgaatactcaaatatgaactatgatttattaggtttaattatccaaaaygtyacraagcaatcmtatacrmaatatatwacaraytcatggctyaarccwytkcawatgamacayacrwcattyaaacaaacmaatwacaaatcaaaacatgatgctattggctaygaattacaaggttcgacacctgtcgtctctaaacctgaatttaacctttgggatacaccatcagcatatatgatgacatcaactgaagatttggaacattggataaaattccaacttaatccacctgataaatacaaatcattagttcaacaatcacataaaaatttatcwtcaacaattggtgaacctaatgccaatgcatatgcttcsggctggtttaccaataatgatgaacatttagtgtttcattcaggaacgctmgataacttttcatcatttattttactaaatccaaaacaaaattatggaattgttgtrcttgcaaatctaaattcggaatatgtacccaaattagttgagcatcttaatacacaaattgtaaatcacaagcgatattcgacggttgcgtctatrctcaatcaatataaagaycaatttaatattgttaccgttttgatgacaacacttattttattagcatttatattctcagcttatcgtgcttggcaaatgcgccatggtcaaattcttttgcgtagatcaaaacggattgctgtattgagttggytawcwttatgtwtatgtatcgctwtagcgctcatattatatgcattaccatatctcattctcggtagcaataattggtcttttgtactgacttggctaccaatagaaattaaattagcactaatcacaacattaattgcattattcagtacattaattgtaattctgttattccttcatacaaagataacgaagacataa

SEQ ID NO: 783 - DNA, 1506 bp, Staphylococcus aureus
atgtttatgactactaaaaaactgtattttctatccatttctattatcattttagtcgccatttcaattgctatatatataacattaaatagcaatacgaagacacggttaaccaatgattcgcaacaacaaatagatacaattatcgaacatgatttacaaaagggacatattcctggagcatcaattttaatagtaaaaaatggcaaagtttttttaaataaaggttatggttatcaagatgttgataaaaaagtcaaagcttctcccacaacaaagtatgaaattgcttctaatacgaaagctttcacaggtcttgcaattttaaaattagctcaagaaggtcgattaaacttaaatgatgacgtatccaaacatgtgcctcattttaaaatgaactataatggtcaaaatgaaactattacgattaagcaacttttggctcaaacaagtggtatacctagtgatattacaagcgaagactccgtaacaaataaaaataatcgtttaaatgatgtaacccgtgcaattatgggtgatgaattacatcataagcccggagaagaatttgaatactcaaatatgaactatgatttattaggtttaattatccaaaacgttacgaagcaatcctatacaaaatatattacaaattcatggctcaagcctttgcatatgacacatacatcattcaaacaaaacaataacaaatcaaaacatgatgctattggctacgaattacaaggttcgacacctgtcgtctctaaacctgaatttaacctttgggatacaccatcagcatatatgatgacatcaactgaagatttggaacattggataaaattccaacttaatccacctgataaatacaaatcattagttcaacaatcacataaaaatttatcatcaacaattggtgaacctaatgccaatgcatatgcttccggctggtttactaataatgatgaacatttagtgtttcattcaggaacgctcgataacttttcatcatttattttactaaatccaaaacaaaattatggaattgttgtgcttgcaaatctaaattcggaatatgtacccaaattagttgagcatcttaacacacaaattgtaaatcacaagcgatattcgacagttgcgtctatgctcaatcaatataaagatcaatttaatattgttaccgttttgatgacaacacttattttattagcatttatattctcagcttatcgtgcttggcaaatgcgtcacgggaaaatcatcctgcgcaaatcaaaacttaccacatttttaagttggctaactttatgtttatgtatcgctatagcactcatattatatgcattaccatatctcattctcggtagcaataactggtcttttgtactgacttggctgccaatagaaattaaattaacgttaactacagcatttattgcattattcagtatgttaattacacttctgttaatattacatacaacgacaattaagaaaccataa

SEQ ID NO: 784 - DNA, 2982 bp, Staphylococcus aureus
atgaagaacgcatttaaattatttaaaatggatctgaagaaagtagctaagacgccagctgtgtggattatcttagcaggcttagctattttgccatcgttctacgcttggtttaacttatgggcaatgtgggatccatatggcaacacgggacacatcaaggtcgcagtcgttaatgaagataaaggcgacayaatcagagggaaaaaagttaatgtcggtaatacgatggttaayacactcaagaaaaataaaagttttgattggcagtttgtaagtagagagaaagctgatcatgagataaaaatgggtaaatattttgcaggtatttacatcccatctaagtttacacatgaaattacmgggacactacgtaagcagcctcaaaaagcagatgtagaatttaaggtgaatcagaagattaacgctgttgcgtctaagctaacagatactggttcgtcagttgtcgttgaaaaagcgaatgaacaatttaataaaacagtaactcgagcattattagaagaagctaacaaagcaggtttaactattgaagaaaatgtgccgacaattaayaagataaaaaatgcggtatattcrgcagataaagctttacctaagattaatgactttgcgaataaaattgtrtatttgaataaccaccaagcggatttagataaatatgcsaatgattttagaaaactaggaaattataaaggtgatattttagatgctcagaaaaaattaaacgaagtcaatggtgctattccgcaacttaatgaaaaggctaagttgatattagctttaaataattatatgccgaaaattgaaaaagcgttaaattttgcagctgatgacgtgccagcgcagttccctaaaattaatcaaggacttaacattgcgagtcaaggkattgatcaagctaatggacagttaaatgatgccaaaggcttcgtcacacaagttagaagtagagtcggtgattatcaagawgcaattcgacgcgcgcaagatttraatcgaagaaaccagcaacagattcctcaaaatagcgcggcgaacaacgaaacatcaaatagtkcacctgcagctggtaatggtgtarcatcaacgccaccaagtgcaccaartggcratactrcaccaaataataatgttacgcaaaataccgcaccaaatagtaataatgcrcctgtatcgactacaccacaaagtacaagcgggaaaaaagatggtcaaagttttgyagatataacaacaacacaagtcagcacagctaacgagaacacacaaaayattacagataaagatgttaaatcaatggaagcggcattaacgggctctttattatcattatcaaataatttagatacccaagcgaaagccgcacaaaaagatagtcaggcattacgtaatatttcgtatggsattttagcatcggacaagccwtctgattttagagagtctttagataatgttaagtccggtttagaatacacaackcaatataatcaacaatttatcgatacattaaaagagattgagaagaatgaaaatgttgatttatcaaaagaaattgataaggtaaarrcagctaataatcgaattaatgaatcattaaggttagttaatcaattaagyaatgcattaaagaatggtagttcaggaactgctgaagctactaaattactagatcaactktcaaaactagattcatcattatcatcatttagagattatgttaaaaaagatcttaacagctctttagtatcaatatcacaacgtattatggatgaattgaacaaagggcaaackgcattrtcyaatgttcagtctaarytaaatacaattgatcaagtcatyaacagtggwcaakctattttaaaaaatggtaaaacacgtatygatcgyttacaaacagtattaccaagtattgaacaacaatacattagtgctrttaaaaatgctcaagcaaacttcycgaaagtgaaaagtgatgtagckaaagcwgctaactttgtrcgyaaygayttaccacagttrgarcarcgwttaacyaatgcgacwgcaagtgtgaataaaaatttaccaacgttattaaatggttatgatcaagcggtaggattactaaataaaaatcagccacaagcgaaaaaggctttatcagatttagctgattttkcwcaaaataaattgccwgatgttgaaaaagatytgaaaaaagcgaataarattttcaagaarttagacaaagaygatgcagtcgayaaattaatcgacacacttaagaatgatttgaaaaagcaagcgggtattattgcaaatcctattaataagaagactgttgatgttttcccagttaaggattatggwtcaggkatgacaccattctatactgcaytrtcrgtatgggtaggygcactcttratggtaagyytattaackgttgataataaacataagagyytagagycagtsttaacgacamgacaagtrttcttaggtaargcaggattctttataatgcttggtatgttgcaagcactcattgtatcggttggagatttgttaatcctaaaagcaggagttgagtcacctgtattattygtacttataacgattttctgttcgattattttcaactcaatcgtatatacgtgcgtatcattacttggtaayccaggtaaagcmattgcaatcgtattgcttgtattacaaattgcaggtggtggrggwacattcccaattcaaackacrccacaatttttccaaaacatttcgccatacttaccatttacgtatgcaattgattcattacgtgaaacagtaggcggtattgttccggaaatcytaattacaaaattaattatattaacgttatttggyataggattcttcgttgtaggtttaattttaaaacctgtaacagatccattgatgaagcgcgtatctgaaaaagttgaccaaagtaacgttacagaataa

SEQ ID NO: 785 - DNA, 1638 bp, Staphylococcus aureus
atgawtaaagacaagcaattgcacaacgamaaaatcaatctatcccaattagtcttattagggttaggctctttaataggatctggttggctatttggtgcgtgggaagcatcatcaatagctggaccagyagcaatcatatcatgggttcttggattcctagtcattggaaccattgcctataactacattgaaatcggcacaatgtttcctcaatcaggtggcatgagtaactatgcccagtatacacatggctcattattaggctttattgctgcttgggcgaattgggtgtctttggtgacaataatacctatcgaagctgtgtcagctgttcaatatatgagttcttggccgtggcattgggcgaaaccaatgarayatttaatggaaaatggctctattagcacatacggattgctagctgtatatctcatcattgttattttttcwttattaaactattggtccgtaaaacttttaacatcatttacgagtttaatttctgtatttaaattaggcgtacccatgttaaccatcatcatgttratgytatcaggattcgacacttcaaattacggmcattcrgcaagcacatttatgccttacggaagtgcaccgatttttgctgcaacaacagcatcagggattattttttcattcaattcattccagacaattattaatatgggttcagaaattaaaaatcctgaaaaaaatatcgcaagaggcatcgctatytcactgtcaatcagtgcagtgttgtacatcattttacaaagtacgtttatcacttctatgcctcaatcaatgttacaacatagtggatggaatggcatcaacttcaattcaccatttgcwgatttagctatcttattaggaattaattggctcgcaattttactatayattgaagcttttgtatcaccattcggtactggcgtstcatttgtcgccgttacaggtcgagttttacsagcaatggagaaaaatggacatatccctaaatttcttgggaaratgaaygaaaaatatcatatyccacgtgtagcaatcatctttaatgccatcattagtatgattatggttacrttatttagagattggggtacgctagcagcagttatttctactgcaactttagtagcctatttaactggcccaacgacagtgattgcattaagaaaaatgggaccaacaatgactcgtccatttagagcaaaaattttaaaagtaatggcaccattatcatttgtattagcttcattagctatatattgggcaatgtggccaacaacggctgaagtwattttaatcattatacttggmttaccaatctacttcttctatgaataycgtatgaattggcgtaatacaaagaaacaaattggtggtagcttatggattattgtatatttaatcgtgctatcaatactgtcatttataggaagcaaagaatttaaaggcttaaatatgattcactatccatttgactttatcgttattattrttgtggcrcttatmttctattacatcggtacaacgagttcatttgaaagcgtctatttccgtcgcgcaacacgaatcaatacraagatgcgygagtcactaaataatgaatcaaagtcatctyattaa

SEQ ID NO: 786 - DNA, 561 bp, Staphylococcus aureus
atgtctcgaaaaacggcgctattagttttggatatgcaagaaggtatagcgagtagtgtacctagaataaaraatattattaaagcgaatcagagagcaattgaagcagcaagacaacatcgaataccagtcattttcatacgtttagtgttagataagcattttaatgatgtctcctcgagtaataaagtgttttcaacaattaaagctcaaggatatgcgattactgaagcagatgcatctacacgaatacttgaagayttagcaccactagaagatgagccgattatttctaagcgacgctttagcgcatttacaggtagttacttggaagtttatttacgtgcaaatgatattaatcatttagtattaacgggtgtctctacragtggagctgtattgagcacggcattagaaagtgtagataaagactattatattactgttttagaagatgctgttggtgatagatcagatgataaacatgactttattattgaacaaattttatcacgctcatgtgacattgaatccgtagagtcatggaaaagtagtttatag

SEQ ID NO: 787 - DNA, 1353 bp, Staphylococcus aureus
atgaagattaatactacaggtggtcaaattcatggtattacacaagatggtttagatatcttcttaggcattccttatgcagaaccaccagttcatgayaatcgctttaaacattctacgttaaaaacacaatggtcagagccaattgatgcaactgaaatacaacccatcccaccgcaaccagacaacaaattagaagattttttctcctcacaatctrcaacttttactgaacatgaagactgtttatatytaaatatttggaaacaacataatgatcagwcgaagaaacctgtcatcatttatttttatggtggtagttttgaaaatggtcatggtamagccgaactctatcaaccggcacatttagtacaaaataacgacattatcgttattacatgcaattatcgtttaggcgcattaggatatttagactggtcatattttaataaagrttttcattccaataatggmctttcagatcaaatcaatgtcataaaatgggtgcatcaatttattgaatccttyggtggcgacgctaataacattactttaatgggtcagtctgcaggcagtatgagcatttkgactttacttaaaatacctgacattgagccatacttccataaagtcgttytrctaagtggcgcactacgattagacacccttragagtgcacgcaataaagcacaayatttccaaaaawtgatgckcgattatttagatacagatgatgttacrtcattatcgacaratgatattcttatgctgatggcgaagctaaaacaatctcgaggaccttctaaagggcttgatttaatatatgcgcctattaaaacagattatatacaaaatrattatccaacaacgaaaccaatttttgcatgttatacaaaagatgaaggcgatatttatattactagtgaacaraaaaaattatcgccgcaacgctttatcgacattatggaattaaatgatattcctttaaaatacgaagatgttcagackgcgaagcaacaatctttagcgattacacattgttatttcaaacagccgatgaagcaatttttacaacawctyaatatacaagattcaaacgcacaactatggcttgctgaatttgcatggcatgatacttctagygcacactatcgcagtgcttaccatattctagatatggtrttttggttcggaaacttacaaatattagcagcacatcaatatccaacaactgctcaccttaaatttttaagtcgacaaatgcaaaatgatttagctaattttgctaaaagcggtaaaatgccttggccgatgtatcataatgaacgtcgctattatcgcacatatcaataa

SEQ ID NO: 788 - DNA, 1908 bp, Staphylococcus aureus
atggctaaatatcgagggraaccgtttcaattatatgtaaagttatcgtgttcgacaatgatggcgwcaagtatcattttaacgaatatcttgccgtacgatgcccaagctgcatctgaaaaggatactgaaattwcaaaagagatattatctaagcaagatttattagacaaagttgacaargcaattcgtcaaattgagcaattaaaacagttatcggcttcatctaaagmacattataaagcacaactaaatgaagcgaaaacagcatcgcaaatagatgaaatcataaaacgagctaatgagttggatagcaaagamaataaaagttctcacactgaaatgaacggtcaaagtgatatagacagtaaattagatcaattgcttaaagatttaaatgaggtttcttcaaatgttgataggggtcaacaaagtggcgaggacgatcttaatgcaatgaaaaatgatatgtcacaaacggctacaacaaaayatggagaaaaagatgataaaaatgatgaagcaatggtaaataaggcgttagaagacctagaccatttgaatcagcaaatacacaaatcgaaagatgcatygaaakatrcatcgraagatccrgcagtgtctacaacagatartaatcatgaagtagctaaaacgccaaataatgatggttctggacatgttgtgttaaataaattyctttcaaatgaagagaatcaaagccatagtaatcractcactgataaattacaaggaagcgataaaattaatcatgctatgattgaaaaattrgcyaaaagtaatgcctcaacgcaacattacacatatcataaactgaatacrttacaatctttagatcaacgtattgcaaatacgcaacttcctaaaaatcaaaaatcagacttaatgagcgaagtaaataagacgaaagagcgtataaaaagtcaacgaaatattattttggaagaacttgcacgtactgatgataaaaagyatgctacacaamgcattttagaaagtatatttaataaagacgaggcagwtaaaattctaaaagatatacgtgttgatggtaaaacrgatcaacaaattgcagatcaaattactcgtcatattgatcaaytatctctgacaacgagtgatgatttattaacgtcattgattgatcaatcacaagataagtcgctattgatttctcaaatyttacaaacgaaattaggaaaagctgaagcagataaattggctaaagattggacgaataaaggattatcaaatcgccaaatcgttgaccaattgaagaaacattttgcatcaactggcgacacgtcttcagatgatatattaaaagcaattttgaataatgcsaaagataaaaarcaagcaattgaaacgattttagcaacacgtatagaaagacaaaaggcaaaattactggcagatttaattactaaaatagaaacagatcaaaataaaatttttaatttagttaaatcggcattgaatggtaaagcggatgatttattgaatttacaaaagagactcaatcaaacgaaaaaagatatagaytatrttttatcaccaatagtaaatcgtccaagtttactagatcgattgaataaaaatgggaaaacracrgatttaaataagttagcaaatttaatgaatcaaggatcaratttattagacagtattccagatatacccacaccaaagccagaaaagacgttaacacttggtaaaggkaatggattgttaagtggattattaaatgctgatggtaatgtatctttgcctaaagcgggggaaacgataaaagaacattggttgccgatatctgtaattgttggtgcaatgggtgtactaatgatttggttatcacgacgcaataagttgaaaaataaagcataa

SEQ ID NO: 789 - DNA, 456 bp, Staphylococcus aureus
ttgaaaaaattatgttcattaattgtagtagcattartttgtrtcattgcattatcagcttgtggtaaagaacaaaccaaaacatatgaaggtgatgttagtggtaaacatgtactaacttctatcacatataaagatgataargttttaaaacagtctacaatcaacacaattaaatatgacgatctaggtatggataaagacgaagccaaaaagttattcgccaaatctgaaagtattttcaaagaccttaaaggcgtaaaatacaaagtagactataaagataaaaaagcaattgaacacttagacatagattacacagaagttgacatgaaaaaattaaataaacgtcttggtgtttcractaaagaaaataaagatattagttttgaaaaacttgaaaagcaattaaagcacagaggyttaaaagaaaaagataaaatggacgacaaatag

SEQ ID NO: 790 - DNA, 1359 bp, Staphylococcus aureus
atgattaaattatttgattactttaacrrtcattcacgaaagttatatgagtcttttaaagccagtaagttggargaagatttaacaattgtactcaatgacaatggytttttaccggacgatgttatatcaccgtatcaattttttgcagataatcataatacagaaaatatgaaaccacgattttttaatcaggttactgtaccagctttttgggaaattaaaggtaacaacaattcggctacaattaatgatatgggacgtctacgaggyaaaatattttatcaaagtggagagcgccctagaattgttagtcgtgtcgaatggtttgatgaccaacaacgtgtccgatttgtcgattattattctaagaatggtattaaatttgcacaaactgtttacgatttaaatcgtaaagcgatcttgaagaaatatatgacagcagaaggtaaagaagtgatttatgaaaattttgtaacatctgatgtcatattggattggcaaggraagtcttactttttcccttcaaagctcgcattcgyattattttttatcaagcaacttgaaattacggaacatcatttcgttattaactcactagccctaccattttcagtgttatataatttgccatcaaawggtagtgatgttttggtatggcaagaacastgyratggtaatgtcccgggaaatatgcaattgatgtgtaaaggtgatatgaaacgacattgtaatattattattccagataaaaacgaatatgaaacgatgctcaatatagcagacgcaaaggttmaatctcgtattttacaaggcggatatctatataaytatcgtagtcgtaatagatatactaaagaaattgtaatattaactaactcggatcaacttcgtaacatcaaggtattggttgaaactttaccagattttaaktttcacatcgctgctattacagagatgtctgataagctaatgcaacttgatcaatatgctaatgtgcayttatacccatctattaatatwgayagggtaaatgaactataccagttatgtgatatttatcttgatatyaatgagggtaatgaaattttaaatgcggtggaacaagcgtttgactatgagttgttgattttaggttatcgtcaaacmgcacaccatgctaaagtaacaytatcagagcacttatttgagcataatgatgagataacaatggaaagtaaagaccaattaatacaaatgttagaragtttgaaagatcaacaacagtttcragatgctttattagcacaaaaagcacatgcacacgaaatctcgcgtgaacaattcgagcaagtttttaaacaggcgytcgaaagctaa

SEQ ID NO: 791 - DNA, 1329 bp, Staphylococcus aureus
atgttttttaaacaattttatgataaacatttatctcaagcatcttatttaatcggttgtcaaaaaactggagaagccatgattattgatcctattcgtgacttatcttcatatattcgagttgctgatgaagaaggtttaaccattactcatgcagctgaaacacatatacatgcagattttgcttcaggaattagagatgttgctataaagttaaatgctaatatttatgtatcgggtgaaagtgatgacacattaggttataaaaatatgcctaaccacactcattttgttcaacataatgacgatatttatgtaggaaatataaaattaaaagtgcttcatacaccgggtcacacgccagaaagtataagttttttacttactgacgaaggtgctggagcacaagttccaatgggactattcagtggtgattttatttttgtaggagatatcggtagacctgatttactagaaaaagcggttaaagtagaaggatcatctgaaataggcgctaaacaaatgtttaaatcgattgaaagtattaaagacttgccagattacattcaaatttggcctggccatggcgctggtagtccttgtggtaaatctttaggtgctattccaacatctactcttggctatgaaaaacaaacgaactgggctttttctgaaaataacgaagctacctttatcgataaactcatttctgaccaacctgcaccaccacatcattttgcacaaatgaaaaaaattaatcaattcggtatgaatttatatcaaccttatacggtttatccagctacaaatacaaacagattaacttttgatctccgcagtaaggaggcttatcatggtggacatattgaaggtacaatcaatattccatatgataaaaatttcatcaatcaaattggctggtatctaaactatgatcaagaaattaacttgattggagactatcaccttgtttcaaaagcaacacacaccttacaactcattggatacgatgatattgctggatatcaattaccgcaatctaagattcaaacacgttccattcatagtgaagacattacaggtaacgaatcacatatattagatgtacgtaatgataatgaatggaataatggccacttatctcaagcggttcatgtaccacacggcaaacttttagaaacagatttacctttcaataaaaacgatgttatttatgtacactgtcagtctggcattagaagttcgatagctattggtattttagaacacaaaggttatcacaacattattaatgtaaatgaaggttataaagatatacaactttcttaa

SEQ ID NO: 792 - DNA, 1164 bp, Staphylococcus aureus
atggyamaacttamwwcaaagatagcttccttaaaaytattcgcaagttaygcyatwgcaacttatattttagttatrttaacgagtgcattaaatctttttaaaggttatgtggccgatacgttctatattgctgaaacattgctaatcrttttaaccatcattttaattatyatyttaacaacggaacaaacatggaagcatcatgacytatggcgacgtatcgtcgaagtgttgttattgttgatgrcattaacaggsaacgtatttacattattaatgtttgtaagtattagacgttaccaacgtacatcgcaaatacatagttataayggstgggaatcgtttatacgaaaaactactagacatcgtattgcgattatcgggttacttattttagtctayatgctgacattatcaattgtgtcacaatttacatttgatacgacattggctactaaaaatcagttcaaygcactgttacatggaccgagtctagcctatccgtttggtactgatgatttcggtagagacttatttacacgcgtagttgtmggaacgaagctgacattttcaatttcaattatttcagtagttattgcagttrtttttggtgtgttactaggcactatcgcaggttattttaatcatattgataatttaataatgcgaattttagatgtagtgtttgcaattccatcattattgttagcggtggcaattattgcatcrtttggagcaagtattccaaatttaattattgctttaagtatcggtaatataccatcatttgcacggacaatgcgtgccagtgttttagaaattaaacgcatggaatatgtagatgcagcacgtatcactggtgaaaacacttggaatatcatatggcgttatattttrccgaatgcgattgcgcctatgattgtacgtttttcattaaatataggtgtggttgtattaacaacaagtagtttaagtttcctaggacttggtgttrcacctgatgtagctgaatggggcaacattttacgtaccggtagtaactacttggaaacgcacagtaatttagctattgtacctggtrtttgtattatgttcgtcgttttagcatttaattttataggtgatgcagtgcgtgatgcrctagatccaagaattcattaa

SEQ ID NO: 793 - DNA, 957 bp, Staphylococcus aureus
atgttaactaaagaatttgcacaacgcgtagaactaagtgagaagcaagtmcgtaaaattgttcaacatttagaagaacgtggttaccaactaagcaagactgaatatcgtggtcgtgaagcaactgatttcaaagaagaagatatcgagcttttcaaagacatwgccgacaaagtaaaacaaacaaatagttatgatctagcgtttgatgaattagaaaaagaaaaagacttcctgcaagtcattgtcaaaaacgatgacaaaaacttacctactaatcaaaatgtygctcaaytagtagaagatttrcgyctagaaatccagaaaatgcgcgaagaacgtcacctacttggtcaaatgatgaatcaagtacatcagcaacaacaagaattaaaagaacttcaaaatcaacttacawctaaaatcgattcaaatagcgaatccttaaaagcyatccaaacatcacaagaggctatccaagaagcrcaagcmtctcaagcwaaagyattrgctgaatcawcaaataaagttgaaaakaatrctgytactgawgawaargctgamagtaaagattcgaaggttgctggagtgaatacrtcaacagacgctaagacggatactaaagcagamaatgcaggcgatggcactrctactaaagtagataaagaggatcaaatttctgcaactgaagcaattgaaaaagccagcgttgagcagyctaaaaatgrmaawgcagctgagacttcaaataaagaagctacartagatgcagamgcgcaacatgatgctgaacaacaagtagcagaagcccatgcagaagcttctaaacaagctacttcgaacgattcattggaagcgaaagcagaaaatgacagcacagcttcacagtcwgaaatgtcagaaccaaaacctcaagaagagaaaaaaggtttcttcgcacgtttattcaacytgtar

SEQ ID NO: 794 - DNA, 750 bp, Staphylococcus aureus
atgtcaaatacaaataaacattacatagaagaagaatacgctacygaacaatckcgttttttcaaacgtgatattggatttatyttcctttayatatttttggttaacatcttgccratcattatcgtytttttaacttttgggttagtagctgtattcactcaacaagcyccrtggggtttctcttttcctatttcaatgaacattagctatttactcgcagttattatttcactagctatttttcgtckgatgcatgaagatgcrtttrttccratgatacgtwygcaaatcrttgcyagyrcyaaatataaatggcatattcttatatcatttacaytaagtrtcgtactctttttacttttaaatyatttcrmtattttcgcactaaatgtagatkcctttactgtctttgacatttacccgctcattaragrdtatgrttccatcagtttaatagywatrttktsgttaaccattatattaaatactttgatttgycaacttattttccgtcatattttaattcaagaattaagcagattaatmcctttaaagattacaatagtattrtccrttatycttgaaacwctgtwctaytatccatacattaatacatggtgggaattcattccagcattgatactagcwrgtagtgcgacttacttatatttaaartcawaccgtaattttatggtgagctatttytatcaattagcagttatactcgttttgcatattttcatgtaa

SEQ ID NO: 795 - DNA, 1509 bp, Staphylococcus aureus
atgacaatatataatataaactttggtataggctgggcgagtagcggtgttgaatatgcacaagcttaccgtgctaaattattgagacgyacaaatcaagacactaaatttgtgtttttagattttatacagtcagagaacatacagacattaacgcaaaacattgggtttraagatcaagaagttatttggttgtatcagtattttagtgatatttctwtagcaccaacaacgtacacgttagatgacattgaacgtgagcttggtcatgahattagttttagagaaagaaatggtaagatagtccgyctatattttaatgggaaatcatcatttgtaacatgttatctrcaaaatgaacaaaaagayrttgtggatcgtgcagaatttgtaattaatagtatgttagtacgtaaagatttttatagttatacrcgyatattttctgagtattatgcaccagctgataataaagcgaaattatatatgcgacaattytataatsaaratggytccatcrcttataacgaatatattgatggagacagctctatatatgtgtttgaagatgcggtgttgtataacaaaacsgaatttattgcatactttttacaacgattgaatttaacccgagacgatattgtcatattagaccgcgcttctgatattggtcaggctgttttgcagcataaaggtgatagtaaagttggtgttgtgattcatgctgatcattatagtaataatatgatgagygagcagcatatactatggaacaattattatgaatatcaattttcaaaagctaaatacattgatttctttattacagcracagatattcaaaatcatatggtttgtcgacaatttgagcaatatcaaggttatcgyccacgtgtytatactattcckgtgggaagcattgatgcrttatcatatccwamattatcaagaaagccataygcgatgattagtgcatctcgtttagcraatgagaaacatattgattggcttgtcaaagcrgttatcgtggctaaacgacaagtgccagaattaacatttgatatttatggagaaggtagygagaagacgcgactgcgtaaaattattgatacacaccgcgcrcaagattatattcgtttactaggkcatgttaaacttgatgaaatttatamtgattatgagttatttctttctgcatcaactagcgaaggttttggrttaacactaatggaagcggtaggctcaggactaggtatgattggattaaatgtgaattatggtaacccaacctttattcgagatggggaaaatggctacttggtaccttttgataccgaygaagatagtgtggatgatgttrtcgcaaaactagctcatgccattgtaatgtattttaacaatggwccccagrcaccacatkacatctcttatgaagtggcacagcaatttatgactcaagatattattttaaaatgggaaacattagttcaagaggtgctrcatgattaa

SEQ ID NO: 796 - DNA, 1542 bp, Staphylococcus aureus
ttgatgacatcaaaacatcaacaaaaggggtctatcgtcaatcgtttcttgaatagtgttgaaaaaatyggaaataaattgccagatcctagcgtyttattctttttaatgtgtgtgggcttagccattatgacrtggkttatctcattatttaatgtatctgttaagcatccaggtacgcatcaaaccatttatattaaaaatataattagccatgatggatttacratgataatgaatgatacgattaaaaatttctcagagttcccagcattaggcttagtactagcartgatgattggtatwggtgttgcagagaaaacaggatacttcgayaagttaatgatttctgttgtgaatcgcgcaccacgwttyttaattttaccgactattatattaattggkattttaggtagtacagccggcgatgctgckacaattatcttgccgccgctygcagcratgctttttattaaaattggctatcaycctatygctggwytaacgatggcatatgcttccgctgtwggwggmtttgcmgcaaatatagttgttggtatgcaagatgctttrgtctattcatttacagaaccrgcaacacgtatcgtttcagattctattaaaacaaaygttgctatgaactggtactttatcgcagygagtgtcgttgtattacttcctacgatattgctagttacaactaarctsattattcctagrttaggwmaatatgatgaymgtttaatgcatgatgaycatgaagaarcrtcttcacatattactgacaaagaagcwcatgctttaaaatgggcaaatatcagtttcatagtcacaattattttattaattattacagcyattcctgaacatagytttttaagaaatgctaaaacaggcagcttactagacgatgcgccattaattaacggtgtcggattaattattcttgtygtatttttagtacctggattagtttatgggattttaagcaaagaaattaaaaatacaaaagacttaggtaaaatgttyggcgatgctgtaggatcaatgggaacatttatcgttattgtgttttttgcagcacagctacttgcgtatttaaagtggagtaatttaggaattatcgctgctgttaaaggtgccaaattattagaacatcaaaacggyattgtattgatactaggtattattgtactgagtgcaatggtcaacatgttaatcggaagcgcatcggctaaatggggtattttaggaccgatattcgtaccaatgttaatccttatcggctttcaycccgcattyacrcaagtcatttaccgtgtaggmgattcaattaccaatccaattacaccgatgatgccgtacttacctttaytattaacttatgcacaaaaatacgataaacgcatgaaactcggagccttactttctagtttaatgccgtattcaatcgcgctaagyattgyrtggacagtatttgtcatyatttggttcytattaggtatccctgttggaccaggtggaccgatattcgttaaataa

SEQ ID NO: 797 - DNA, 2391 bp, Staphylococcus aureus
atgaaacataaactagatgttacgataaacgaattaagactaaagtcgattagaaaaatagtgaaacgcatcaatacatggrgcgatgaagttaaatcatattctgatgatgygttaaaacaaaagacamtagaatttaaagaacgtwtagcatcaggagttgatacactagayacattgttacctgaagcttatgcagtggcacgtgaagcgagctggagagtattaggtatgtatcctaaagaagttcagttaatcggagcgattgtattgcatgaaggtaacattgcggagatgcaaacaggcgaaggtaaaacattaacrgcaacgatgcctttatatttaaatgcwctttcgggaaaaggaacatatttaattacaacgaatgattatttagcgaagcgwgattttgaagagatgcaaccattatatgaatggttaggtttaactgcttcattaggttttgttgatattgtggattatgagtatcaaaaaggggaaaaacgtaatwtatatgaacatgatattatatatacaactaatggacgtctcggttttgattatttaattgataatttggcwgatagtgcggaagggaaatttttaccacaattaaattacggtattattgatgaagtggaytcaatcattttagatgctgckcaaacaccattagttatttcgggygcaccaagattacaatcaaatctatttcatattgtgaaagagtttgtagatacattgattgaagacgtgcattttaaaatgaagaagaccaaaaaagaaatatggctgttaaatcaaggtattgaagcggcacaatcatactttaatgttgaagatttatatagcgaacaagcgatggtcytagtgcgtaatattaatytagcactgcgcgcrcaatatttgtttgaatctaatgtcgattayttygtatataatggtgatattgttttaattgaccgtattacaggtcgtatgttaccgggaactaagttgcaagctggactycaccaagctattgaagcgaaagaaggtatggaggtttcaacagataaaagtgttatggcaacaattaccttycagaatttatttaaactttttgaatcattttcaggtatgacagctacaggaaaattaggcgaatcagagttctttgatttgtattcaaaaatagtcgtacaagyaccaactgataaagcgattcaacgtatcgatgaaccagataaagtgtttcgttcagttgatgagaaaaacatcgcratgattcatgatatagttgaacttcatgaaacggggcgaccggttttactcataacgagaactgctgaagcggctgaatacttttcraaagtattwttccaaatggatattcctaataatttactcattgcgcaaaatgttgcaaaagaagcgcagatgatagctgaagcagggcaaattggttccatgactgttgcgactagtatggcaggtcgaggcacagatattaaacttggtgaaggtgtcgaagcattaggtggattagctgttattattcatgaacatatggaaaatagccgtgtagacaggcaattacgtggtcgttctggtagacaaggggatccrggatcatcttgtatatatatttcactagatgattatttagttaagcgatggagcgatagtaatttagcggaaaataatcaattatattcattagatgcacaacgattatcgcaaagtartttgtttaatcgcaaagttaagcaaattgtagttaaagcgcagcgtatctcggaagaacaaggggttaaagctcgtgaaatggctaatgaatttgaaaaaagcattagtatacagcgagatcttgtatacgaggaacgcaatcgagttttagaaatagatgatgctgagaatcragattttaaagygttagctaaagatgtrtttgaaatgtttgtaaatgaggaaaaggtgctaacaaaatcgcgtgttgtcgagtatatttatcaaaatttaagtttccaatttaataaagatgtggcttgtgttaattttaaagataagcaagcwgtagtracatttttattagagcaatttgaaaagcaawtagctttgaatcgtaaaaacatgcaaagtgcatattattataatattttcgttcaaaaagtctttttraaagcaattgattcatgttggttagaacaagtcgactatttacaacaattaaaagcaarcgttaatcaacgacaaaatgggcaacgtaacgctatttttgaataccatagagttgcmttagattcatttgaagttatgacacgaaatatcaaaaaaagaatggtgaaaaatatttgtcaaagcatgattacatttgataaagarggtatgccagttatacattttccataa

SEQ ID NO: 798 - DNA, 960 bp, Staphylococcus aureus
atgctgaaaaacaaaacatttaaagttacttggaattatatttcacaaactacatttatgtatggctcwaaagtatcattttcaaatggtgaagtracttttataaaycctttgatgccctctggattaccgattcatgagtggttgatgttaaarcaattttcaaaatataaaagtgcrccaagtttaccaattttgcgtagaggacagcattataaattgcattttgattttgatgcaacgcctgctggttcagtgtattttatcatcattttttataataaaaatggcacaaaactaagtactgagattgtaaagtcaaatagtattacgattcaatatcctgatgaagcctatgcttataaaataaaaatgatgaatgcagcatcgacgagtctwrtatttagatgtttaacaatyacagagatgacgcatcaakatratttagartataaaagcatgcgggtracgaagatagrcgatraccaatatggaaatgatadratmaatgtcattattgcagaaccatctgacryctatccaactatttcgaatgattttttgaaayygtttggtcatgtttggctcgtygaacgttggatggamgacratatcraggraaatattaagcaactaaagratgatttgcaaagtcaagataccctaamggcwattaatttgattagttatgggtcaaagtcaaatgtttttgcaacttatgtcgctcagcatttrgrttgcaaagtrtatcgtacaagccatgaagatgatgatttaaaagratggyttamagaacatgtcccaggaaatmatgaactaaaagatacaaatgtcgagktttattttaaagaagagcaagacaamcatctaaattatatgtcacgtttaatgaatccagtacgatttttagattacttagatgtatcgaaactgaatggtggggaagtaaatgaaacataa

SEQ ID NO: 799 - DNA, 138 bp, Staphylococcus aureus
ttgaaaatgaaggattctaatatcatttcgtttatatatagcagacatgatagaattttatatgtaaatcttgtaggtaatcgttttaaaaataatataagyatgactaaagccacatccaatataggacgtggcttt

SEQ ID NO: 800 - DNA, 1569 bp, Staphylococcus aureus
atgccacgtaaatttagagttttgcaaattggaggagacgatttagaacctattttycaacacaaaaaaggtgtgagttgggattacttcgatattggattgtttgaatttgatagtggttatgtagaggctattgaagcgattgttgaagcagaaggrcgctttgattttatctatattcaagcaccatactcggagacattaacgaatttattacaaatgataagygaaccatacaatacgtatgttgatgaatcattttggtcwgttgaatatgaacaagacgaaaatgtccaaaaatacgttgttcaaccattacattaccggaayattgaagaacgtaataataaattagaggcagttagcttctcaggacagtatggagataargtttcycctaagttagcacttgtkcatccgaattttaaagkagatgtcgtwtaccaaggtaattcagagctcacrttgagtggagaatttrgraaagaatttaaacctatcgcatcttggcaaaataatctcgtttacgataaagataaagtcattcaaatatggccagaatttgatattgatggtgcggtcgagttgcaatatacatttagattgattcaractggcgctgatggtgcattaattgaacaaatcrtattractgatgatatgttagacagtcctttagagatacctrcgaaaccatttgatgcttatataagtgtaactgttaaggcgcgwggsaacggracggtacatttaggacctatacacaaacgatggtctagattagayatgggtcaatttttactyggtggtagtcgtttygtagatagtcaacgacaggaatttatttattatttccaccctggtgatatgaaaccrccactaaacgtatattttagtggttatcgaacagcggaaggtttcgaaggatattatatgatgaaacgtatgaatgcaccstttttactwatcggcgatcctcgtgttgaaggtggtagyttttatatcggttcatctgaatatgaacaaggtattatcaatgttattgamgagacattagaaaagctgaattttaaatcacatgaattaatattatctggtttatctatgggktcatttggtgccttgtattatggtgctcagttaaatcctcaggcaattattgttggtaaaccacttgttaatattggaacgattgctgaacatatgcgattacttagaccagaagagttcggtacagcattagacgtcctggtgtctaatgaaggtgatacatctcaagcgtcgatamaggcattaaatcaaaaattttggcaaacatttcaaaagaaatcattgtcacaaactgtttttgccatagcatatatgcaacatgatgattatgatccamatgcatttcaagagctaytacctgtattgacagcacaccaagcaagagtgatgaatcgcagtattcctgggcgacataatgatgattcacctaccattgcaagttggtttgttaatttttacaacattattttggaagacaagtttgggagagttcaacatgctgaaaaacaaaacatttaa

SEQ ID NO: 801 - DNA, 120 bp, Staphylococcus aureus
ttgagctacattatcaaattcacctttaaattttttgaaatggctacctatatttcacagctcactttagatatcgaacttgtttcttcagagttacttgttatattaccaggwtttatt

SEQ ID NO: 802 - DNA, 1554 bp, Staphylococcus aureus
atgaaatactttattccagcttggtacgatgaccaacgatggtggcaagacacgactgtgccgtattatcaactacaaaataagacggaatttgacgatatgattagtttratgggratgcaccttgaaaatgacttagattatcrwctgattgttctcaatcatgcaccaaatttaagaacatttttacatcgatatgacttatatgaracaaagtattsgtctgtgtttgatgaaattcaaggattcagycaccatgcgccacaagcgattaattatcatcacttaaaatggccggatgatgttgagtttgtgtacacrccgtatttattaaaatgtgtgacgagtgaacagacctatacaaatatttattttagtcaagaagggtattcaatttggtttgaagaatttgaaagagatcagttacaacggcgttatatttttgatgacagaggttatttatcagckatacgttattttgatgatcagggagaggcttcttaccaasaatatttaacgattaatggagattgtgtacttcatgaagatttgaaaaatggcagagtcactgtwtcaaaaagatatcaacatcactatcaacaaacagaatataacaatatggctcaactaattgaagaaaaatttcaagcaatgattgcacawcaaatacatgaagatgatcatgtgattgtggcttcagatgctaggcacaatcgacaaatagccaatcatattccrgcgaaatyrttaagttattcattttttaaaaatagaaatgaaactgtgtcrgatgaggaatatcaatctatcgtaaagaatgcccatttaattgttgatagtrtgcaactagaacgtgatttaattagtcatcaagagaagtatcagcgrgagaatacaatgattcgaatcacrccatttgaaacgagacaatcacctaatataagtagtcaattgatggaaacatttataggtgtatggatagayggtatgagtgacgytgatttgcaacaaatgatgcaacgacttgtggattatatcgcacargaagatwattaccgtttaattttattawcgcgccatcaaaatgayataccgatgtggcttcgtgaatgtattacgtcggtaaatgaggaataccaagctaaacagaatgcsgatgttaatgtttcagcattaatgacacctgaagatcaagatgacatcattgctgttaagacgatacatgctgaacatgatgttgtagaagcattgcggacgttgcgacttgtgatagatatgtcaaaagaacctgayttgtatttacaaattagtgcaattagcgctgggattccacaaattaatggtcaacaaacagattamgtctctgattatgacaatggccgtattataaatacagttgatgaattagatgatgcgttaaattattatttattttatttgaaaaattggaattatgcgtacgcctattctttaaaattaatagatgcatatgcttctaagaatattattaatcagctcgatgagttaatagaaggtgaaaatgatgccacgtaa

SEQ ID NO: 803 - DNA, 1809 bp, Staphylococcus aureus
atgcattttcatacacatctattatataatacttgtgaaaagtattgtcttggggctgtgtttttttacttttggggcgtatttctttataattcattacataaatgtaagggctttagttttcatgttttattaagtctaactgagattttgaaaggatgtttagcaacaatggataaagarttatggataraamgagctaatgatagtttagttaaacatttttatgagcarcaatctgacattgaacagcgagaaggttttgaaagtaaattaacrtttggtactgcgggtatacgcggaaaattcggtcttggtgaaggtcgacttaataagtttactattgaaaaattggcattaggtttagcgcgttatttaaatgcccaaacaaacartccaacaatagtcattcattatgatattagacatctttcaactgaattcgcccaaathattgctaatgtattagcaaaccatcaaataayagtttatttacctgatacatataaaacgacaccggaattatcgttcgcggtkcgcaatcttaatactactgcyggcattatgattacagcaagtcataatccgaaagactataacggcatyaaagtatatrgttctgatggygcgcaaytatcgacygatgcatctgagcttgyaagtcgttatatcgaagaagttggcgatccattacagattgatatacctatttcwaaacaaaatacatcttatatcaarcctttyccgaaatctgtaactgatgactatatgaaacacattcaaaatatgattggctatattcctaaatctgatttacaagttgtgttcactagtttrcatggtacaagtgttccrattgtacctgagttattamaatctttgaatttcaatcaattyaatcttgtagawgcacaatgtaaacctgatccgaatttyagytcagttcaaagtgctaatcctgaagatcatcgcgcttttgatcaagcagtcgaacttgcaaataaaagtcatgcagacttattaatatcaactgacccwgatgcrgatcgwcttggyattgctgaacgtgatgcacayggtcatatcacatattttaatggcaaccaaattggtgcgytgttacttaattatcgtattcaacaaacgtctcaattacgtcaycgcttaatgattcaatctattgtaagtagtgarttaacaaagtcattagcacgctataataatgttraatacaaagaggtrctkacgggctttaaatttattgctcaggaaataagacaactggaygatcatcaaaatatgattttcgcmtttgaagagagttacggttttctatcagagccttttgtacgtgataaagatgccgtacaaattgtgccactcattataaaatacgcttctgagttaaaattatatggcaaaacattgaaagatgaattagaacagatttatcaaactgttggtagacatgaggatacattattctcgcatacgctagawggwttwgaaggkaaraaraaaattgaatcaatwatgacmmawttccgttcaaatccaccgcaagagattcaaggactsaaagtgaaagcaattgaagattatttaactagcgaggtttatcakttggataaagatacaacgtcrcagattrattctyctaartcaaatgttattcgtgtcttatttgacgaaggatttatcgctttacgtccttctggtactgaacctaaaattaaattatatgtgtcgttaaaatgtcsgrattttgatgatgtagctcaaaaaattaatgcgatgatttttagctaa

SEQ ID NO: 804 - DNA, 1212 bp, Staphylococcus aureus
atgttaaaacttttacaacaataygaatataaaattatatataaacgtatrctwtacacatgttttatmttrtttatttatatattaggyacaaacatttccatcgtttcctataacgatatgcaagtaaaacatgagtcattttttaaaatagctatttctaatatgggtggagacgttaatactttaaacattttcactttaggattagktccgtggttaacatcaatgattatcttgatgctgatttcttatcggaatatggataaatacatgaaacaaacaagtcttgagaagcattataaagagcgyatcttaacattaattttaagtgtkattcaaagttattttgtgattcatgaatatgtttcgaaagaacgtgttcatcaagacaatatttacttaacaatmttgattttggttactggaacgatgttattagtttggttagctgacaaaaatagtcgytacggcatygcaggaccaatgccgattgtaatggttagyattattaaatcaatgatgcatcaaaaaatggaatatatagatgcaagtcatattgtgattgcgttgttaatcayycttgtgataatcacattgtttatcttattattyattgaattagtagaagtgagaataccatatatcgatttaatgaacgtttccgcaacaaatatgaratcttatttatcttggaaagttaaccctgcaggcagtattactttaatgatgagyatttcagcwtttgttttcttraaaagtggyattcattttattttatctatgtttaataaarrcrtwtcagatgayatgccaatgmtgacatttgatagtccartwggtatttcrgtrtatttagtgattcaaatgttattgggttattttttatcgagatttttaatcaatactaaacaaaaatccaaagatttcttaaagagtggcaattatttttcaggagttaaacctggtaaggatacagaacgttatttaaattatcaagcamgacgcgtatgttggtttggatyggcattagttacartcattattggtataccrctttatttcacattgtttgtaccgcatttatctactgaaatttatttctcagtacaactrattgtattagtttacatcagtattaatattgcagaaacaattcgtacatatttatattttgataaatataagccatttttaarccagtattggtaa

SEQ ID NO: 805 - DNA, 267 bp, Staphylococcus aureus
atgaaaggctctaaacaaatacttttgattatgggcattatatctcttattgttttatttatttttacactattcatcatggcrcaatatgcaaaacattatgaacaaaaatccgacagttccaacgcacatactttaaaytcatcatcagccataattgagcaacatactatgtcgaatttagcgtctctagatttatacgctcctgttcgtaacattacttctagtcgtgatattcatcccatttatttcatgacaaaagattaa

SEQ ID NO: 806 - DNA, 4056 bp, Staphylococcus aureus
atgagtaaaagacagaaagaatttcatgacagcttagcaaatgaaaagacaagagtaagactttataaatctggaaaaaattgggtaaaatccggaattaaagaaattgaaatgttcaaaattatgggactaccatttattagtcatagtttagtgagtcaagataatcaaagcattagtaaaaaaataacgggatacggactgaaaactacagcggttattggtggtgcattcacagtaaacatgttgcatgaccagcaagcttttgcggcttctgatgcacctttaacatctgaattaaacacgcaaagtgaaaccgtaggcaatcaaaactcaacgacaatcgaagcatcaacatcaacaaccgattctactagcgtaacgaaaaatagcagttcggaacaaacatcaaatagtgacacagtctcaagtgaaaagtctgaaaatgtcacttcgacaactaatagtacaagcaatcaacaagaaaaattgacatctacatctgaatcaacatccccaaagaatactacatcaagttctgatactaaatctgtaacatcaatttcaagtacagaccaacaaactaatacatcaacaaatcaaagtactgcatcaaatactacttcacaaagcacaacgccagcttcagccaatttaaacaaaactagtacaacgtcaaccagcacagcacctatcaaacttcgaactttcagtcgattagctatgtcaacttttgcatcagctgcaacgacaagtgcagtaaccgctaatacgattacggttaataaagataacctcaaacaatatatgacaacgtcaggtaatgctacttatgatcaaagtaccggtattgtgacgttaacgcaggatgcatacagccaaaaaggtgctattacattaggaacacgtattgactctaataaaagttttcatttttctggaaaagtaaatttaggtaataaatacgaaggtaatggaaatggtggagatggtatcggctttgccttttcacctggtgtattgggagaaacaggattaaatggtgcggcagtaggtatcggtggtttgagtaatgcgtttggcttcaaattggatacgtaccacaatacatctaaaccgaatgcagcagcaaaagcgaatgcagacccatctaatgtagctggtggtggtgcgtttggtgcctttgttacaacagatagttatggcgttgcgacaacgtacacatcaagttcagcagctgataatgctgcaaagttaaaagttcaacctacgaataacacgttccaagattttgatattaattataatggtgatacaaaagttatgactgtaacgtatgcaggtcaaacatggacacgtaatatttcagattggattgcaaaaagtggtacgaccaacttttcgttatcaatgacagcctcaacaggtggcgcgacaaatttacaacaagtacaatttggaacattcgaatatacagaatctgctgttacacaagtgagatacgttgatgtaacaacaggtaaagatattattcccccaaaaacatattcaggaaatgttgatcaagtcgtgacaatcgataatcagcaatctgcattgactgctaaaggatataactacacatctgtcgatagttcatatgcgtcaacttataatgatacaaataaaactgtaaaaatgacgaatgctggacaatcagtgacatattattttactgatgtaaaagcaccaactgtaactgtaggcaatcaaaccattgaagtgggtaaaacaatgaatcctattgtgttgactacaacggataatggtactgggactgtgacaaatacagttacaggattaccaagcggattaagttatgatagtgcaacgaattcaatcattggaacaccaacaaaaattggtcaatcaacagtgacagtagtatctactgaccaagcaaataacaaatcgacgacaacttttacaataaatgttgtggatacgacagcaccaacagtgacaccaataggagatcaatcatcagaagtgtattcaccaatatccccgattaaaattgctacgcaagataatagtgggaatgcagtaacaaatacagtcacaggattgccgtctggattaacattcgatagcacaaataatactattagtggtacaccaacaaacattggtacaagtactataacaatcgtttctacagatgcgagcggtaacaaaacgacgacaacttttaaatatgaagtaacaagaaatagcatgagtgattccgtatcaacatcaggaagtacacaacaatcccaaagtgtgtcaacaagtaaagctgactcacaaagtgcatcaacgagcacatcaggatcgattgtggtatctacttcagctagtacctcgaaatcgacaagtgtaagcctatctgattctgtgagtgcatctaagtcattaagcacatctgaaagtaatagtgtatcaagctcaacaagcacaagtttagtgaattcacaaagtgtatcatcaagcatgtcaggttcagttagtaaatcaacatcattaagcgattctatttcgaactctagcagtactgaaaaatccgaaagtctatcaacaagcacatctgattcattgcgcacatcaacatcgttaagtgattcagtaagcatgagtacatcaggaagcttgtctaagtcacaaagcttatcaacaagtacatctgattcggctagtacatcacaatcggtaagtgatagtacatcaaattcaattagtacatcagaatcattgagcgagtcagctagcacctcggactctatcagtatttcaaatagtatagccaactctcaaagtgcgtcaacaagcaaatcagattcacaaagtacatcaatatcattaagtacaagtgattcaaaatcgatgagtacatcagaatcattgagcgattcaacgagcacaagtgattcagtatctggatcactaagcatagcaacatcacaaagtgtctcaacaagctcatcagactcaatgagcacgtctgaaatgataagcgattctatgagtacaagtggatcattagctgcatcagacagtaaatcaatgtccgtaagtagttcgatgagcacgtctcagtcaggtagtacatcagaatcattaagtgattcgataagtacatcggattctgacagtaagtcattatcattgagtacaagtcaatcaggttcaacaagcacatcaacatcaacaagtagttcagtacgtacgtcggaatcacaaagtacgtctggttcaatgagtgcaagtcaattcgattcaacaagcatatcaacgtcgtttagtgattcaacaagtgatagcaaatcagcatcaactgcatcgagtgaatcaatatcacaaagtgtctcaacaagtacatctggctcaacaagtggttcaacatcaacaagcacatctgaatcgctaagtatgtctggttcagattcaacgagcgtatctgactcaacatcaatgagtgaatccgattcaacaagtgtttcaatgtcacaagacaaatccgattcaacatcaattagcgactcagaatcagtgtcaacaagcacatcaatgtcattgagcacatccgattcgacaagcacatccgaatcgctgagtacatctatgtctggttcacaaagcatttctgactcaacatcaacaagtatgtctaactcgacttcaatgagcaactcaacatcaacaagtatgtccggctcaacaagtacatctgaatctaactcaatgcatccgtcagactcaatgagtatgcatcatacacacagcacgagcacatctcgctcatcaagtgaagcaacaacgagcacgagtgaatctcagtctacattaagtgcaacatctgaagtgactaaacataatggcacgccagcacaaagtgaaaaaagattgccagatacaggtgactcaataaaacaaaatggattactaggtggcgttatgacattattagttggtttaggtttaatgaagagaaagaaaaagaaagatgaaaatgatcaagatgattctcaagcataa

SEQ ID NO: 807 - DNA, 309 bp, Staphylococcus aureus
atgaccgtcaacatcgtrtttwstatcgtrttctgyatmagtatggttatattaggcatttatgtcgcaataactaaagatttcacactaatytcttwtataaatcaaacgrccattgcagataaacacaagamccaaattgcatatatatttrcgctatgtatmagtttgagtgcagtatttttratgtctkcaattctawgcttygaatatgattttattgcattrkcattcttatttttaacgatagcattattacttatcgcattattctacgtttgcttttataaaatyacaaaatayccrtaa

SEQ ID NO: 808 - DNA, 744 bp, Staphylococcus aureus
gtggactatcaaactttcgaaaaggtcaataaattcataaatgtaraagcgtacatattttttctcactcaagagttaaagcaacaatataaattatcattaaaagaattgttgatattagcatatttttattacaaaaatgaacacagtatttcactaaaagaaatcattggtgacatactttacaaacaatctgatgttgtaaagaacattaagtcactatctaaaaaaggatttataaataagtctagaaacgaagcagatgaacgccgtatttttgtttcagttactccaatacaacgtaaaaagattgcttgtgttattaatgagttagataaaataattaaaggatttaataaggaaagagactacataaaatatcaatgggctccaaaatatagcaaagaattttttatactttttatgaacattatgtactcaaaagattttttaaaatatcgatttaatttaacatttcttgatttatctatcttatatgtaatatcatctcgaaaaaatgagatactaaatttaaaagatttgtttgaaagtattagatttatgtatcctcaaattgttaggtcagttaatagattaaataataaaggtatgctaatcaaagaacgatcccttgcagatgaaaggattgtgttaatcaaaataaataaaatacaatataacactattaaaagcatattcacagatacttccaagattctcaaaccaagaaaatttttcttttaa

SEQ ID NO: 809 - DNA, 693 bp, Staphylococcus aureus
atgaattattcgccraarcaaggtgtaagragtcatggyttaccrcacgayccatttaaaagtagtacagtaccwcgtccaataggktggatytctactgtatcgaaagatgggaaagataatttagcrccttatagtcagtatcaaaacttaacwtgggatccgcctatggttatgttcgcagcaaatcaatcygttcttggtgatcaygarcgtaaagatacagtraaaaatgcwgaagagacaggktggtttgtrtggaayatggcmacgtatgatttaagagaagcwgttaatttatcrtcgaargcaytrccaccwgaagaggatgaatttrawtwtgcaggtgtracraargaarmatgtatagaagcwccaggwtatcgwgtmaaagaatcgccagtwcattttgaatgtgagtacgttcaaacgattcgtattccracwggagaymcwgtatcwaccgtwgatattgttataggaagagttgcycargttcatattgacgataagktyattcttgataatggtaaattrgacattaagtcgattaaacctattgcyagrttaggatattaygattacacrgtwgtgaatgaratatttgaaatgaaagcaccwkcagcttctaaagaagagytwgcaggtttagaaggaagaaatttygataatcaatcagatramaagrdatar

SEQ ID NO: 810 - DNA, 612 bp, Staphylococcus aureus
atggaacaaattatcactgaatttattagycgttttgggtatgcagccatttttatattaattttattagaaaatgtwytacctatcgtaccatcggaaattattctracatttgctggycttatgtctgttaaatcacatttatcaattttaacyttatttattattgcaacyatcgcatcgtttataggrctgttaattttatattatatctgycgtttratttcagaagaacgtctatatcgytttattgatcgacacggtaagtggattaaattgaaaagtaaggatttaargcgagcaaatgattggtttaaaaagtatggcgtatgggctgtatttatctgtcgtttyatacctgtattacgtgtattgattaccattccagcyggtgtaaaccgcatgaatgttgtgacatttaccgttatttcattaataggtacwacaatytggaayttcggtttaattttactaggacgcackttgagcgatagctttggtatgttgatgactggtcttcatacatattcacgtattatgtatgttgtcatcattatcgcagtcatttactttgctatacgttacattggcaaacgtaagagagtaaaataa

SEQ ID NO: 811 - DNA, 612 bp, Staphylococcus aureus
atgyatacgtttgatgcacaatcattaactgctagagaaaactataaattattaattggttcaattattccacgacctatagcwtttgttacaacattaaatcaagatgcatcagtaaatgcagcaccatttagyttttttaatatwgttaataaycatccgccaatgrttgctattgcagttcaacgtgcaggaggtaagagaaaagatactgcmttraatatagaacggactggagactttgttgtgcatattacagacgaagataatgttcaagatattaatgagactgcagcgccgttagcatatggtgacagtgagttgagtcgtacagrattatcacttttaacatctacaacgattaagacgccaggaattaaagaygcgaaaatgagattcgaatgtaaactatcgcaaatgatattgcttggagatgtattagatggggctgayttaataataggygaaattgtaacttatcatattgatgacagtatttatgagggtrattttaaaatcaatccacacgcattacaggctgtttctcgtttagccggaaatgattatgctaaattagggggaatatttacratarakagaccwgaaaaataa

SEQ ID NO: 812 - DNA, 1776 bp, Staphylococcus aureus
gtgaagaaaatcattagtatcgcaattatagttttagcgttggtattaagtggttgtggtgtccctacgaaatcagaagtggctcaaaagtcatcgaaagttgaagtgaaaggcgagcgaccaacratacatttcctaggacaagcaagttatgaaaatgatatgaatatcgtyaaagatcaattggaaaatgcaggatttaacgtgaagatgaatatccaaccagattatggtagctatcgtacacaacgtcaagccggcaattatgatatccaaatygatgactggatgacagtrttyggtgacccgaactatgctatgacggcattatttagttctacaggatcaaatagtttattgaaagataaacatgtagaccagttgttaaataaagcttctactcaaaatgaagcagatgttaaacaaacatataagcaaattgaagatgaagttgtatttgataaagggtatatggcgcctttatatggatcaaaaaagaatttagtatatgacaataaagtgttagataaaaatagtgttggattgccaaattcacgtgcattaatatggcaacaatttgattacaacaatagtagagaacgagatacgcggccacttgtgatgacacaacaagayggtgaaattcctacattggatccaatacgttcaattgcgccgtcagtatattcaattaatatgaatatgtacacaaggttattattattagatgaaaatgaycayttaacaacgaaaggttcgttaagtcrtgattatgctgtgaataaggacaataaagcrttttatttcttrttaagagatgatgattattttgcgaaagtggtyaatggacaagcacgtaatactggagagcgtgtatcggctgaagatgttaagttttctttagatagagcacgtgataaaaagtctgtgcctaacaataatacttacaatatgcacaaacatataaatgacatcaagatattaaaagatgaggacatcgatcagttgcgtaaagagaargacaaggaygataawtcmatctatgataagttgattaaagcktataacgtcaaatcgttaacgacagatggtcaaaaagtaaataataaagacggtatttatcaaattgttaaaattacgacagatcaatcgatgcctcgagaggtaaattacttaacacactcttcggcaggcattttatctaaaaaatttgttaatcaagtaaatcaagaatatccaaaaggatatggggatagcagtacmattcctgcaaattcagatggraaaaatgcgctktatgcaagtggcgcatacattatgacacagaaaaatgcatatcaagcaacgtttcaacgtaatccaggattcaacgaaacagaaaaaggtagttatggaycasctaaaattaaaaatattacattgaagtttaatggtgayccgaataatgcattgtcagaacttagaaatcattcaattgatatgttggcagatgtgaatcaaaaacattttgatttaattaagtcggataaaaatttaagcattattcgcaaaaatggacgyaagtcagtctttttaatgctaaatattaaaaaaggtatatttaagacgcatccaaacttgagacaagcagtagttaatgcgatagatcaggatcaatttattaagttttatcgtggcgataaatttaaaattgcatcaccgattacaccacttgtcgatactggtaacgagcaacgtcaagatttagaaaaagtagaaaaagccatyaatcaataa

SEQ ID NO: 813 - DNA, 663 bp, Staphylococcus aureus
atggaatttaaaaccattcaatctrtcaaagatccacattacaacgaagcacttaaactttacgatactaagttaaatttatctttaactgaagataaacgtatcatcaaacgctcattagaaaacaacaaaacygaaaacgattatgtctttatcgtaggcttagaaaacgatgttgttgtcagtctagcaactgcacattatgaagccacaaccaattcwgcatttttaatttatttattygcaaaagacctacccaaccatgatgagttaatgacrcaaacattacatcaaattgaacatgaaytaaacttattatcaaaccttgttcattctagaagtattaactttttaatgatggaagtccctaaagaacctgcagatttaacacaagataayggvctyattattgaacaccgtagacagtttttatacgaacatcaatttgaaagacaaactgaaattgattacattcatccaactaatgatggtcacactaaaaaagtggacttatttttaaagaaaaatattaaactgacaaaggatatctacggtacaagtgttaaatcaaattatattttgaagtatgtatttgcmaatggtatcgcacgtgaaattatttatgmtttattagaagaaatggatttacgtaaaccattttaa

SEQ ID NO: 814 - DNA, 696 bp, Staphylococcus aureus
atggrtgttttaacaatagaacatttaacaaagaagataggyaayaaaacgattctcgamgatgtatcatttaagctgaaacgcggacaaatagttggtctygttggagcgaatggtgcaggtaaaacaactttaatgaaagttatattaggttactctagtttccaaagcggraattttaatgttattaacagcaargayrrmaaaagcaatatcggygcattgattgaaaatccaggaatatatccttttatgtctggatatgaaaacttgaagttattgaatgaatcaaaaaacactcaagatatcgataaaattgtctcacaacttcatatggatgaatacattcataaaaaagctaaaacgtattctcttggtatgaaacaaaaattaggaattgctatagcatttttaaatraacctcaattyattatcttagatgaaccaatgaayggcttagatccaaaagctgtgcgagatgtwcgtgaattgattgtccaaaarkcgcaagaaggtgtyactttcttaatttcgagtcatattttaagtgarttagttaaaatcacaaactctatccttattattaacaaaggtaaaattgttacagaaacatcggaagaagaacttaaacaatttaaagataatgatttagaaaatgtattactagamatcatagaaagggaggaycaagcataa

SEQ ID NO: 815 - DNA, 477 bp, Staphylococcus aureus
atggyagttgtttatgtagcaggaggrtgtytatggggtgttgaagcatttttyrcaacaatacctggaattatacatacagaagcaggaagagcaaatggaagaagytctaaattagacrgtccgtatgatggttatgctgaatgtgtcaaacttcatttygatgatcgtatgttaacaattacagacatyatgaattatttatttgaaatyattgatccwtacagtgtgaatcracaaggaaatgatattggasaaaagtatcgaacgggtttatatagttgtgtagatgaccacttaattgaagcgcgtcagttcattgaacgacgtaaagacagagatmaaattgcagtggaagtcttaccgctgtctaactacattaaaagtgctgaagaacatcagcaacatttagaaaaatatccagaagatatgcatatgtgtcatatttcaawagatttgctaaataaatacaagtga

SEQ ID NO: 816 - DNA, 141 bp, Staphylococcus aureus
atgcgttttttgattgatgtcgaaagttttgtaagtggattaggattagggtttttgcgaatatcaactattaaatatattactaatttatataaaaatataaagtttgataaagttatttatttgattataaaaataggg

SEQ ID NO: 817 - DNA, 501 bp, Staphylococcus aureus
atggtattaagaaaagtaatcatgcaggacttagatcaaattattgcacttgaaaatattggtttttcaccggaagaagctgcaacacsagaggcattgaaattgagaattgwacaaattcaagaaacttttattgtagctgaaaagaatgatgaagtrattggatayatcaacggtccwgtcataaaagagcgttacattagcgatgatttatttaaaaatgtcyccryaaataatagtgaaggtggytatattagtgtgttaggtcttgttgtagcaccaaattatcaaggtcagggtattgcaggtcgcttactaaactattttgaaamtcttgctaagaatcawcatcgacatggtgtaacgttaacatgtcgagaatcattaatttcwttttatgaaaaatatggktatcgtaatgaaggtgtatcagaatcatgtcatggcggtattaaatggtataaccttgttaaaaatataaaaaaggatgatgaggtgtaa

SEQ ID NO: 818 - DNA, 771 bp, Staphylococcus aureus
atgggaactttaattaaacaagaatgtttcaaattatttaaaaagaaatcaacttttatcgcacctattgtcttyattctactaatggttgctcaaggttatatygctacaaaatacaatraaatttttacrccacaggaatctttyacatctgcttataatggtttttcatggtttgcatttttattaattattcaagcaagtacaatcatttcaatggaatttcattacggtacgattaaaaatttactctatcgtgaatattcaagaacaactatgattgttagcaaaatcatcacattatttattatttctttaatttattttgttattacaattattgcttcaattgttattgggtctttattctttaatgatttaaatatatttgaaagtagcggtaatcaattatctttattgaatcaattattattagttagtttaggyacatttgttggygtttrgttagttttaagcttaacgttgctattatcatctgcaacwaattcaasssswgtagccattgctgtaggtattgttttttattttgcaagttctattttagcagttattcaaacggcacttttagaaaaaatagactggctaaagtggaatcctattaatatgatgaatattatgcttcaaacagttgaaaaaggctttagtaagtcgacraaattagaacttcatgaattgtttattggtaatattgcttatatttctattttcttaatacttgtagtatttattttcaagaagaaaaatatttag

SEQ ID NO: 819 - DNA, 1965 bp, Staphylococcus aureus
atgactcaaattactgaaaragaattaaaaaagaartatttrgatttaytatcycaamatttygatactccagaaaarcttgcractgaaattatyaatttagaatcwattttagaattrcctaaaggtacggarcatttcgtcagcgatttacatggtgaataygaagctttccaacacgtattacgcaacggttctgggaaygtgcgagcgaaaatyaatgatattttcaaagasagastttcaackaargarcttaaygayttractgcycttgtytactatccagaagacaaattrmaaytkattaaawgtgatttycaaarttryggwcaaytwaatgtytggtatatyacracratygaacayytmattsagytrattaaatattgttcttcaaaatatacgcgttcaaaactkcgwmrwgcmttgccrrarcaatacgtttwyatyrtwgargarytaytrtataararyaaygaatwtmaaaataaaaaatcwtaytacgaaacacttgtwaaccaagtrattgarcttaarcargcrgatgatttaattatwggrctygcktattcygtacaacgcttagtcgtcgatcatttacacgttgtcggygatatttatgatcgtggmccrcaaccagataaaatyatggayacrctgattaattatcattcyctrgatattcaatggggtaatcatgatgtgctktgggttggwgcstatgcwgggtcwaaagtatgyttagcwaayttactwcgwatttgtgcacgytatgayaatytagatatyrtygaagaygcwtayggyattaatttaagaccwytgctwacwttagcygaaaaatactatgaygcagataatcctgcttttaarcctaaaaaaagrcctgacaaacaygaacgtttaactcaacgygaagaaagtcarattactaaaattcatcaagcwattgcgatgattcaattcaarytrgaaataccrrttattaarcgwcgtccaaayttygaaatggamgaacgwcttgtrcttgaaaargttaattatgatacwaatgaaatwacagtwtayggwaawacatayccrttraaagayacatgyttccaaactrtyaaycgtrataayccagcararttactacctgaagaagaagaagtcatgaayaaactattattgtcattccarcaatctgaaaaattacgtcgtcatatgtctttcttgatgcgtaaaggytcdctttacttaccwtrtaatggyaatttactcattcatggttgtattccagttgatgaaaatggtgagatggaatcattygaaattgatggtcakacwtacagyggccaagarttattagatgtrtttgartatcatgtccgtaaatcatttgatgaaaaagaaaatactgatgacttatcsackgatttagtttggtatttatggactgggaaataytcktcaytatttggwaaacgygcsatgactacgtttgarcgataytttattgcagataaagcttctcataaagaagaaaaraatccrtactatcatytwcgtgaagatgtgaatatggttcgtaaaatgctcagtgatttyggattaaatscagatgaaggwcgcattattaatggtcacacaccagtgaaagaaatyaatggcgaagatcctatcaargctgatggaaagatgcttgtcattgatggyggyttttcaaaagcttatcagtcaacaactggcattgcaggctatacaytrttgtataattcattcggwatgcaactcgttgcacaycaacaatttaacgcwaaagaaaaaatwctttccgaaggtatcgaygaactktcwatwaarcgsrtygtwgayaaagaattacaacgtaaraaratycgyratacmaatawwggtaaagakcttcargctcaaatagatattttgaaaatgttaatgcatgatcgytacttagactaa

SEQ ID NO: 820 - DNA, 768 bp, Staphylococcus aureus
atgattgatattcataaccatatattagttgatatagatgatggtcctaaracaattgaaaagagtattgcactattaaagcaagctaaggatgaaggtgtaacaagtattgtagcgacacctcatcatttgcatccgagatatgataatacatttcaacaagtgcttgtgaaattggcggagttaagaacgcatccagaagttcaagcattggatattaaattatttcccgggcaagaaattagaattacagattcgattctgmaaggcttagataatggtagtattcaaggtattaatcgttcgaaatatttaytaattgaatttccaacgggcgaagtaccacattatacaaaacaattgttttttgaaatacaatcgagaggytacataccaatcattgcacatcctgaaagaaatagaagtatcgccaaaaatccrgaaatattatatgaaytkgttgcaaatggggcaytgagtcaattaacatcgagttctttagttggtggatttggwaaaaacattcaaaagttatcattacaatttatagaatgtaatttggctcattttgtagcttcagatgcacattcatgtgaccaaagaccatttttgatgcaagaattatttcacaatcataaattgaagaaatattcgaatgayattgaagcattacttcgaaatgccagttcagtaatcaatgataattttgtttatytagacagaccgactaagccaggaaaagtgaagtcgtttttgaaatggttttaa

SEQ ID NO: 821 - DNA, 1080 bp, Staphylococcus aureus
atgcgyatcttaaaagagtccattattgtggcatttgcctttgttggtgttgtcgttggtgccggctttgctactggtcaagaaattttccagtttttcacaagtcatggcgcrtatagcatttcaggcattattgtracaggactattgattactttaggtggaatgrttgtcatgcatacaggtcatcatctaaagtcyagaaatcattctgattcaattaactatttcttatayccctctattgcaagaggttttgatattattttracaatgtttatgttgtctttagctattattatgactgcaggtggygcgtcaaccattcatcaaagtttcaacttaccgtattggctgagcgcactcatattagtcgystttattttagcaacactgtttctaaaattcgatcgtttaattgctgtgcttggyggwgttachccatttttaattgcrattgtcattatgattgcggtctactatttcacaacragtcatyttgattttactgccgctaataatgatgctcagattcataagcagaaatcattatcacctggatggtggtttgatgcgattaactatgcaagcttgcaaattgctgctgccttcagcttcttatcagtgatgggtagyaaagttaartatcgtgactcaacgttatacgggggcttgattggcggtttaatyattacatttttactcatgatgattaayctaggtttaatttctcaattcgataaaattaaacacgtmgatytacctacattaaaattagcgacacaaatgtctccgtcaatyggtattattatgtctgtcattatgatacttgtcatctacaatactgttgttggattaatgtatgcatttgcgtcacgtttcagcgttccattyagcagacgttacttcatcattattattacaatggctgtcatcacttatattagtacatttatcggtttcatttcattaattggaaaagtattccctattatgggattgttcggtttcatcttactcatacctgtactctataaaggtttaattaagcgtattaccggcaaatctcatatcgattaa

SEQ ID NO: 822 - DNA, 693 bp, Staphylococcus aureus
atgacgaatacacgaagaagtacatcaagtttaattgtccatgaacaaccaaagtcacctattagcgagaaatttcgaggcataagatcaaatattatgtttgcaaatcctgacagtgcagttcaaagcattgtaatcacttcagaggcaccaggcgcaggtaagtctacaattgcagcaaatttagcagttgcatatgcrcaagcaggwtataaaacaytaatcgtagacggggatatgcgtaaacctacgcagcaytatatttttaatttgccaaayaatgaaggcctatcaagtttattgctaaattggtcaacttatcaagacagtattatctcaactgaaattsaagatttagacgtcytgacgtctggrccratyccrccraatccrtcagagttaatyacatcaagrgcatttgcraatttgtatgacacattattgatgaattataactttgtmattatcgatacgccaccagtgaacacagttacagatgcgcaattattttcaaagtttaccggcaatgttgtctacgtagttaattcggaaaataataataragatgaagttaaaaaaggaaaagaacttattgaagcaacaggtgctaaattattaggtgtagtcttaaatagaatgcmtaaagataaaagtgctagttactatgcatattatgggactgatgaatcatga

SEQ ID NO: 823 - DNA, 285 bp, Staphylococcus aureus
atgagtaaccttgaaatyaaacaaggcgagaacaaattctatattggtgatgatgaaaatmatgctttagctgaaatcacataccgttttgtggataataatgaaattaacattgatcatacaggcgtatctgatgaactyggtggtcaaggtgttggcaaaaaactasttaaagcagttgttgaacaygctcgmgaaaatmatttraaaatyattgcctcrtgttcatttgccaaacatatgttagaaaaagaagattcatatcaagatgtrtatcttggttaa

SEQ ID NO: 824 - DNA, 663 bp, Staphylococcus aureus
atgaaagaaaagtttgatttagtaaaactattaaatattctaaagaagaatattaaattattgcttattttaccggcaatatgtcttgtagtaagtrcggcattaaccttytttgttatgcctgacaaatatactgcttctactcaaataytagtraacatgaaaaagtcctcaagtgatttagctttccaaaatgttcaaagtagtttgcagtctgttaatacatatacggaaattatcaaaagtccwagaattctagataaagtatctagagartttgatggtcagtattcaacagctgagttgaattcrtttttaaaagtaaccaatcaaacaaactctcarattattactgtatcagttacmactgggaataaatctgaatctgacaaaattgttaataraatatctaaagtttttgcwcatgayatgcctaaaattatgagtgttgataatgttacratactttcctcagcacatgataatgcygtaaaagtatctccaatagtatctgtyaacttagtdatcagyatyattgttggtattgttttagcaatattgattattttcttaaaagaattattagataagcgtattaagacrgaagaagatgttgaatcgcaactaggattacctattttaggttcaatacaaaaattttaa

SEQ ID NO: 825 - DNA, 807 bp, Staphylococcus aureus
atggcatttcacgataaaacagcaacacaagtgacaaacattgwactgaacgtaagagacttagacttaatgacaacattttacaaaaacattttaggactatccgttaaaagttctgacgataayacaaccgtattatctgttgggactggtggccatactctaacgttacatttattagaagacggccgtcagacttccccacgwgaagcaggrctttttcatatagcayttttattaccaactactgaggatctagctaacttcttatatttcgtggcacaaaaaamtatgggcatyggcgctggtgatcatttagtaagtgaagctttatatttcaacgaccccgaaggtaatggtattgaagtctatcgcgatagaccttcatcttcatgggaatggcaaaatggcaaagtwaaaatggatactttagaagttgatagccaaacyttattaacacatcgtactgaygaaggttggcaagkaatgccagcaaaaggcatgattggacacttacatttaaaaacacatgayttrgacgcagcatatcaatgttacattgaacaattaggattccaacatgtgtctgattttccacgtgcgytatttatgtcaacgaatcattatcaccatcatattgckgctaayacttggcaatccaatcaagcaagacaaaacaatkcacaaagttatggattaacacatgttgatatttatcaacccgacgcctcaacacatacatttacggcaccagaagggtttgacatcacagttcattcaaatactgaccttgttccagaaaaataa

SEQ ID NO: 826 - DNA, 561 bp, Staphylococcus aureus
ttgaaggataagattattgataacgcaataaccttattttcagagaaggggtatgacggtacaacacttgatgatatagctaaaagtgtaaatataaaraaagcgagtttatattaccattttgactcgaaaaaaagtatttacgaacaaagtgttaaatgytgttttgattaccttaataatattattatgatgaatcaaaataaatcgaactattcaattgatgctttatatcaattcttatttgagtttattttcgacatcgaagaaaggtatattagaatgtaygttcaattatctaatacgcctgaggaattttctggaaatatttacggacaaatacaagatttaaatcaatcattaagtaaagagatagcaaaattctatgatgaatcaaarataaagatgacaaaagaagactttcagaatttaatattgctgtttcttgaaagttggtatttgaaagcatccttttcgcaaaaatttggagcagtggaagaaagtaaaagtcaattcaaagatgaagtgtattcgctactaaatatatttttgaagaaataa

SEQ ID NO: 827 - DNA, 948 bp, Staphylococcus aureus
atggcattaaattggggraaaaagaataatgtcgaagtaactacttctaaagagctattatcaagtgctacwgtcgatcaattaaaagattacgatggcgtaactacaatgcaatttggtaagttagaaratgacgtttatcctaaattagaatcttacggtattaaacaaattgcacaacgtactgctggatttgatatgtatgatttagatttagctaaaaaacacaayattgtgatatctaacgttccwagttattcacctgaaacaattgcagagtattctgtttctatcgccctacaattagtgcgtcgcttcccagatattgaacgccgtgtacaarcacatgattttacttggcaagcagaaatcatgtctaaaccagttaaaaatatgactgttgcaattatyggtacgggtcgtatcggtgctgctacwgctaaaatatatgcaggatttggtgctacaattacagcttatgaygcytatcctaataaagatttagactttttaacwtayaaagayagtgttaaagaagctattaaagatgcygatattatttctttacatgttccagcgaacaargaaagctatcatttattcgataaarcwatgtttgatcatgtgaaaaaaggtgcratyttagttaacgcagcacgtggtgcagtcatcaatacacctgatttaatcgmtgcagtgaacgatggtactttgttaggtgctgcgattgatacttatgaaaatgaagcwgcatacttcacaaatgactggactaayaaagacattgacgataaaacattattagagttaatcgaacatgaaagaattttagtaacaccacatattgctttcttctctgatgaagcagtacaaaaccttgttgaaggtggtttaaacgcagcattatctgtcattaacactrgtacatgtgaaacacgtttaaattaa

SEQ ID NO: 828 - DNA, 2043 bp, Staphylococcus aureus
atgaaaagtcaaaataagtatagtattcgtaaatttagtgtaggtgcatcttccattttaatagctacattactatttttaagtggtggacaagcacaagcagctgagaagcaagtgaatatgggaaattcacaggaggatacagttacagcacaatctattggggatcaacaaactagggaaaatgctaattatcaacgtgaaaacggtgttgacgaacagcaacatactgaaaatttaactaagaacttgcataatgataaaacaatatcagaagaaaatcatcgtaaaacagatgatttgaataaagatcaactaaaggatgataaaaawkcatcgcttaataataaaaatattcaacgtgatacaacaaaaaataacaatgctaatcctagsgatgtaaatcaagggttagaacaggctattaatgatggyaaacaaagtaaagtggcgtcacagcaacagtcaaaagaggyagataatagtcaagaytyaaacgctaataacaatctaccttcacaaagtykaayaaargwakcaccatcattaaataagtyagatcaaacaagtcaacgagaaattgttaatgagacagaaatagagaaagtacaaccrcaacaaaakaatcaagcgaatgataaaattactracyacaattttaacaatgaacaagaagtgaaacctcaaaaagacgaaaaaacactatcagtttcagatttaaaaaacaatcaaaaatcaccagtwgaaccaacaaargacaatgacaagaaaaatggattaaatttattaaaaagtagtgcagtagcmacgttaccraayaargggacaaaggaacttactgcaaaagcgaaagrtgatcaaacgaataaagttgccaaacaagggcagtataaaaatcargatcctatmgttttagtgcatggtttcaatgggtttacagatgatattaatccttcagtgttagctcattattggggcggtaataaaatgaacattcgccaagatttagaagaaaatggttacaaagcttatgaagcaagtataagtgcttttggaagtaactatgaccgcgcagttgaactttattattatatcaaaggcggtcgtgtagattatggtgcagcacatgcagcaaaatatggacatgaacgttatggaaaaacatacgaaggaatttacaaagactggaaaccaggacagaaggtacacctwgttggacatagtatgggyggtcaaacgatacgtcaactagaagaattactgcgtaatggtartcgtgaagaaatagagtatcaaaagaaacatrgtggcgaaatttctccactattcaaaggtaatmatgacaayatgatttcatcaattactactttaggaacrccacataatggwacrcaygcwtcagatttagctggtaatgaagctttagtgagacaaatygtatttgatatcggtaaaatgtttggtaataaaaattcaagagtagacttcgggttggctcaatggggtctaaaacagaagccaaatgaatcatatattgattatgtcaaacgcgttaaacaatctaatttatggaaatcaaaagataatggattttacgatctgacgcgtgagggtgcaacagatttaaatcgtaaaacgtcgttgaaccctaacattgtgtataaaacatacactggtgaagcaacgcacaaagcattaaatagcgatagacaaaaagcagacttaaatatgtttttcccatttgtgattactggtaacttaatcggtaaagcwactgaaaaagaatggcgagaaaacgatggtttagtatccgttatttcttctcaacatccatttaatcaagcttatacaaawgcgacrgataaaattcaaaaaggcatttggcaagtracgcctacaaaacatgattgggatcatgttgaytttgtmggacaagayagttctgatacagtgcgcacaagagaagaattacaagatttttggcatcatttagcagacgatttagtgaaaactgaaaagstgactgatactaagcaagcataa

SEQ ID NO: 829 - DNA, 390 bp, Staphylococcus aureus
ttgttaaaatcaaaatttgaaaacaatcgacaaacattcgataagatttataacatactaaacatcgaagcaataccgtctaacgtactactaaaaaacttgagtgatggtcaaaaacaaaagcttaaattattaagtttcttattggaagatcatgatttaatcatattagatgaagttacaaacgctttagacaagaaaacagttaatgaaatttatgaatttttaaatgattttattcaaagccatcaaactaaaactattatcaatattacacataatttatccgatttaagtgctttgccgggtaaatactttatttttaaagaccttcaaatagaagagtaccaatcaaaagaagaagtcataaatgattacattaatttataa

SEQ ID NO: 830 - DNA, 732 bp, Staphylococcus aureus
gtgtccactttgaaattagaatttaaaaaaagtatttccaataaaattatttacacgcttgktgtgctattcayattccttttcttacttgggtattttttaccaataggwatagacaaagttaaaartttaagctatrgycagtttttcttyagttcwtatacwgttgcmacksaattwggsttyttaytattttcatttgttattgcatattttattaataaagagtattcgaataaaaataymytrttttayaarytgattggcgataatatmtttaccttcttctataaaaargtagcagtkytattywttgaatgtttartktwyatwattytargyatcacwattatttcaatwatatattcggatttctcacattacttactattaataatcttattttcactcgttatcttacaatatatcttagttgttggaacgattagtatggtttcacctaayattttaatcagcttaggtatcagcattgtatattggattggttcagtcatcttagttgccattaataaaaatatatttggtatcgttgctccrtttgaggcgagcaayacgatgtatcgtgccgtagaaaaaatattgaataacgagtcaacatttatrtgtcctactgaaattataaatayagtatcattcttcgttcttctatttatagttaatactattgtcttattactaagtagaaagagatggttgaaaatcggtatgtag

SEQ ID NO: 831 - DNA, 213 bp, Staphylococcus aureus
gtggataatcacaatacgaaaycaaaaataattwtraaaagtraattgagcaactcaggaatagatgtcactgttaaagatgtygaaaagtatatgaatcgatataatgaagttatgawgggaaaaaatggcgaaaaagctaaaragttatgtttgtcgttactacctattaatatcatagttgtctttacattctttgtatttatactataa

SEQ ID NO: 832 - DNA, 2008 bp, Staphylococcus aureus
atggtcattaacttaaatgacaaacagacaaaaacatctaaagaagggttaatttccgtatcacatcctcttgcggctaaaattggtaaggatgtattagatcaaggtggcaacgcyatggatgcmgtgattgcaattcaactggcrttgaatgtggtagaaccatttgcatcaggtattggtggtggcgggtayttgctatattatgagcaaagtactggcagtataactgcgtttgatgcrcgtgagacagcmcctgmacatgtagayaaacaattttatctagatgattcaggcgaatataaatcattttttgatatgactacacatggtaaaactgtcgctgtgccagcaattccaaagctgtttgattatattcacaagcgttatgctaarttgtcattggaagatttaattaatcctgcaattgaactagcyattgaaggtcatkcagcyaattgggctactgaaaaatattcgcgccagcaacacgcrcgattgacaaagtatyaygaaacggcacaagtatttacscatgaaaatcaatattggcgtgaaggtgattggattgtacaacccgaattaggtaagacatttcaaatattaagagaacaagggtttaatgcattttataaaggtgacattgcgaaacaattagtcaatgttgtyaaagcatgtggtgggacaatcaytttagaggatctagccaawtatgayattcagattaaagcgccaatcagtgcracatttaaagactatgacatttattcaatgggaccatctagttctggcggtatcacggtmattcaaatattgaagttattagaacatgtcgatttacmatctatgggtccaagatctgtygattacttgcatcatttgatacargcgatgcatttagcatatagtgatcgygcgcaatayttggcggatgataattttcatgaggtgcctgtacagtcattaattgatgayrattatttaaaagcacgcagtamgctcattratagcaataaagcaaatattgatatagagcatggtgttgtgtctgattgcattagtcatacagatgttgaagaaaatcataccgaaacaactcatttttgtgtgattgataaggaaggtaatattgcttcatttacgacatcaatyggtatgatttayggwtcrggtatcacgattccaggctacggygtgttattgaatacsacaatggatggytttgatgtwgtagakggtggkatyaaygaaattgcaccwtataaacgaccactaagtaacatggctccaacgattgtgatgyatcacgggaagccratattaacagtaggtgcacctggtgcyataagtatcattgctagtgttgcgcaaacattaatcaatgtattagtgtttggcatggatattcagcaggctatagatgaacctagartttatagtagccatcctaatcgcattgaatgggagcctcaattttcacaatctacaatwttagcattgattgcacrtggacatgcaatggaacataaaccagatgcytatattggagatgtacatggrytacakgttgacyyramwacryrtgamgcdtcgggwggwrstgatgatackagrgaaggyacmgtratrggtggygakgtrttakyrattagaaaacarccattacywtagtcsbvaaatrtaygrtartrayrbmywtcgwstatatttcaatgatrtgcagttrccwttatwkgcwgawcaagtgcgrtggatgcatgacaaatattgggttgatgaaagtgtyrttagaatcatyttcyctgaagttagtgyrcatattgaagatttaagaagttatgaaawcgcmggaraaaattatatagatattrcctggttrgcacgraarwawgsttatcaagtdrcmttraargatgayrgtttatacttaactgatgawacatatmmttcagtgaaassraacacaaatgcatactatagatatgatcgagatagtatcacaagatar

SEQ ID NO: 833 - DNA, 408 bp, Staphylococcus aureus
atggcagatattactgtagtaaatgacactggcgaattatacaacgtaatcaatcaaaagaaatctgaaggttatttagaatcagagctaacaattattagtaaaagtaaattacacctaaatgacttacacgactctgaaatctcccttatctcaacaagtggaacatttagtgataraatgactaaactgttaacaggagaagatggtgaacatgcagttttatcacgytacaacttagcgcctgatgaattagaaaaatataaacaacttattttagacgataaaatgttagttgtwgssgttcgygaymawtcatcwcaymaagaagtdcwwgaamataaytcagcwtatgaagarrttgatattacwcattttgctgaagcatctaaaggtcccaaagcttag

SEQ ID NO: 834 - DNA, 204 bp, Staphylococcus aureus
gtgcaattgagtcattccgttaaagttgcaatttctatctatttagcacttatctttataacgttcacttcttatttagtcattattttatatacgagtatgactggacatgatgtatcacatttcgtkttagatagtcagcattctcatcatggatctcttacgcaaaaacatttgagtcttcctgaaatctcatttaaatag

SEQ ID NO: 835 - DNA, 963 bp, Staphylococcus aureus
atgttgttggtgttaagttttaaaggggtgagatacttggygaataatcattcagctttgcgtttaaaaggaattatacttgccattgtcggtgcttgtttatggggattaggtggtactgtttctgatttcttgttcaaatataagaatattaatgtcgattggtacgtcactgctcgacttgtagtcagtggtgttttcttacttattatgtacaaaatgatgcaacccaaacgttcwatatttagcgtattccaagatcgacgtatgttaggcaaattacttatcttcagtatactgggcatgttagtwgtacaatatgcttatatggcatctattaatacaggtaatgctgcgattgcaacattactacaatacattgcgccagtytatattattatttggtttgtcataagaggcgttgcaaaactaacattatttgatgtgcttgctattatcatgacactattaggaacatttttattattaacraatggttcattttctaatttagtcgtcaatcctgcaagtttattctggggtattttagctggtgtagcactcgctttttacacaatttatccttcagacctacttaaccgcttcggttcgattctaattgtcgggtgggcaatgcttatttctggtgttgcgatgaatttacgccatccaatttggcacattgatatcactaaatgggacatatcaattatattatttttaatctttggtattatcggtggtaccgcactcgcattttatttctttatcgacagtttacaatacatatcagcgaaagaaacaacattattcggaactgttgaacctgtcgtagccgttatcgcaagcagtctatggttacatgtggcattcaaaccatttcaaatcgtaggcatcattcttattatgattttaattttattactatcmcttaaaagacaacctgaarcattagatgaataa

SEQ ID NO: 836 - DNA, 705 bp, Staphylococcus aureus
atgattgaattatggccagcgattgatttgattgggtcaacaagtgtgaggttaacagagggtaaatatgatagtgaagaaaaaatgtcrcgytcggctgaagaaagtattgcttactatagtcaatttgaatgtgtgaatcgtattcatatcgtcgacttgataggtgctaaggcacagyatgcccgagagtttgattatattaagtcattgaggagattaacaaccaaagatattgaagtaggtggtggcattcgyacgaagtcacaaatcatggactactttgccgcaggrattaattattgcatagttggaacgaaaggyattcaagatacwgawtggcttaaagagatggcacatacatttccaggtcgyatttatytrtcwgttgatgcytatggagaagatattaaagtgaacggatgggaagaggacacagagttraatttatttagttttgtgaracrgttatcggatatacctmttggmggcattatwtatactgatatygctaaagatggcaaaatgtccggacctaactttgaattaactggtcaattagtaaaggcaacgacgattcctgtcatygcktcyggtggtattagacatcagcaagatattcaacgattagcgtcgctaaatgttcacgctgctattataggaaaggctgcacatcaagcatcwttttgggaggggctaraatga

SEQ ID NO: 837 - DNA, 219 bp, Staphylococcus aureus
ttgagcttttacgaatttatgcaaagttttcttggtgatgacacaccattaggtgaattggttgattggattaatcaagatagcaatttccctagagaagtgaagagccatagtgaaatattgtcatattttcgaacaaatccatgtcctgaaagcatctcagtacctgtaattaaacgggcactatcagttttcaaccaattcacaaatgtacaatga

SEQ ID NO: 838 - DNA, 579 bp, Staphylococcus aureus
atgattgtcatcgttgattatggattagggaatattagtaatgtaaaacgygctattgaacatttrgggtatgaggtggttgtctcaaatamstcaaaaataatcgatcaagcagaaacaatcatattrccsggtgtcggycattttaaagatgcgatgtcagagataaarcgattaaatctcratgcaatattggctaagaatactgataagaaratgatyggtatttgtttaggcatgcaattaatgtatgagcatagtgatgaaggcgatgcatctggattagggtttatcccaggaaatatttcgcgtatccaaacagaatacccagtgccrcacttaggytggaataatttagtgagtaagcaycctatgttaaatcaagatgtttayttcgtacattcttaycaagcgccgatgtcagaaaatgtmattgcatatgcgcagtatgggrctgatattccrgcaattgttcaatttaacaattatattggtattcaattccatcctgaaaaaagcggtacatatgggttacaaattttgcgtcaggcaatacaagggggatttataaatgattga

SEQ ID NO: 839 - DNA, 432 bp, Staphylococcus aureus
atgraatataaaaagatactwwttcgtttaytaattgcttttgcagtmcttttctcagcagatttcayttatcaatccgtcgaacaaacgcatcaatcgcatgccgcagttaattattatagtaaaaaccaatgtacatggtgggcatttaaacgtcgcgcacaagtcggyaaacctgtttctaatagatggggcaatgcyaaaaattggtattacaatgcacgtaaatcaaaatatgcgactggtcgtacaccaagaaaatttgctgtcatgcaatcaactgcaggatattatggacatgtcgcagttgttgaacaagtatataaaaacggtagtattaaagtttcagaatacaacttttatcgcccattaaaatacaatacacgtgtactaagcaaaaaggcagcacgtaactttaactatatttactaa

SEQ ID NO: 840 - DNA, 579 bp, Staphylococcus aureus
atgatttatcaaaaacaacgaaacacagctgaaacrcaactaaatatttcaatatcwgatgaycagtcaccatcgcatattaatacaggtgtgggctttttaaatcatatgttaacmttgtttacrtttcatagyggwctrtcrttaaacatygaggcacaaggtgatatygaygtagatgatcaccaygtaactgaagatatcggcattgtyattggccaattgttacttgaaatgattaaagataaaaagcatttcgttcgttatggaacgatgtacattycaatggatgaaacattagcacgtgtcgttgtggatataagtgggcgcccatacytatcwttcaatgcawcrttaagtaaagaaaaagttggtacgtttgatacggagttagtagaagaattttttagagcrgtcgtaatcaatgcaagattaacaacgcatattgatttaattcgtggaggtaatacacaccatgaaattgaagctatattcaaagcrttttcccgtgcattaggcatagcgctaactgcaactgatgatcagcgtgtgccgtcatcgaaaggtgtgattgaatga

SEQ ID NO: 841 - DNA, 1167 bp, Staphylococcus aureus
atgacawtaggtatcgayaaaataaacttttacgttccaaartactatgtagacatggctaaattagcagaagcacgccaagtagayccaaacaaatttttaattggwatwggtcaaactgaaatggctgttagtcctgtaaaycaagacatcgtttcaatgggcgctaaygctgctaaggacattataacagacgaagayaaaaagaaaattggtatggtaattgtggcaactgaatcagcagttgatgctgctaaagcagccgctgttcaaattcacaacttattaggtattcaaccttttgcacgytgctttgaaatgaaagaagcttgttatgctgcaacaccagcaattcaattagctaaagattatttagcaactagaccgaatgaaaaagtattagttattgctacagatacagcacgttatggattgaattcaggcggcgagccaacacaaggtgctggcgcagttgcgatggttattkcacataatccaagcattttggcattaaatgaagatgctgttgcttacactgaagacgtttatgatttctggcgtccaactggacataaatatccattagttgatggtgcattatctaaagatgcttatatccgctcattccaacaaagctggaatgaatacgcaaaacgtcaaggtaagtcrctagctgacttcgcatcwctatgcttccatgttccatttacaaaaatgggtaaaaaggcattagagtcaatcattgataacgctgatgaaacaactcaagagcgtttacgttcaggatatgaagatgctgtagattataaccgttatgtcggtaatatttatactggatcattatatttaagcctaatatcattacttgaaaatcgwgatttacaagctggtgaaacaatyggtttattcagttatggctcaggttcagttgktgaattttatagtgcgacattagttgwaggctacaaagatcatttagatcargctgcrcayaaagcattattaaataaccgtactgaagtatctgttgatgcatatgaaacattcttcaaacgttttgatgacgtwgamtttgacgaasaacaagatgctgttcatgaagatcgtcatattttctacttatcaaatattgaaaataacgttcgygaatatcacagaccagagtar

SEQ ID NO: 842 - DNA, 1014 bp, Staphylococcus aureus
atgatttatattgataaaaatgaaagtccagttacgccgttggatsaaaaaacaatgacgtctattattagtgcaacgccatataatttatatcctgatgcagcatatgaacaattcaaggaagcttatgctaagttttacggattatygcctgaacaaattattgcaggaaatggmtctgatgaattgattcaaaagttaatgctratcatgccaraaggtccggyattaacgctaaatccwgatttttttatgtatcaagcatatgcggcacaagtaaatcgtgaaattgcatttgtagatgcargatcagatttaacgtttgatttggaaaccattttaacgaaaatcgatgaagtacaaccatcattttttattatgagtaatccacataacccttcaggcaagcaatttgatacggcatttttaacagctattgcagataagatgaaagcawtaaayggatacttygtcattgatgaagcatatttagattatggyahggcatatgaygtkgaamtggcaccacacatyttaagaatgcgyacattatcaaaggcgtttggaatwgcyggcttaagrttrggtgtmttaatkagtactgytgraacgatamagcrtattcaaamaatagaacatccatatccattaaatgtatttacgctaaatattgcgacttatatttttagacatagagaagagacaagwsdatttttaacratgcaacgacagttagctgagcagttaaaacaaatatttgatacacatgttgcagataaaatgtcagtrttcccatcaaatgcyaattttgtacttactaaaggytcagcrgcgcamcaattaggacaatacgtatatsaacaaggatttaaacctcgyttttatgrtgagccggtratgaagggctatgtaagataytcaattgcaacagcaycrcagttaaascaattagaagaaattgttaaagaatggagygcaaaatatgatttatcaaaaacaacgaaacacagctga

SEQ ID NO: 843 - DNA, 2106 bp, Staphylococcus aureus
atgaataacrrttttttcaatagygacttygattcwatttthcgaagaatgatgmaagayatgcaarrytcaaatcaastmggwaacaaraartactatattaatggtaaagaagtttcacckgaagaaytagcrcaaytyacrcaacaaggtrgyaatcahtctgcygaacaaagtgcgcaagcttttcaacaagcagcacwaagacaacaaggkcaacaargtggcaayggcaattatttagaacaaattggtcgtaacytwacgcaagargcwcgtgacggwttattagatccagtcatyggtcgtgataaagaaatycaagaaactgcwgaagtyttaagtagacgmactaaaaacaatcctatmytagtyggagaagctggwgttggtaaaactgcgattgtygaaggtttagcrcargcaatcgttgaaggraaygtaccwgcagcaatcaaagayaaagaaattatwtctrtagayatttcatcrytwgaagctggaacgcaatatcgtggygcytttgaagaaaayatycaaaarttartygaaggygttaartcwtcacaaaatgcygtrytmttctttgaygaaatycaycaaatyatcggttcmggtgccacaggaagtgattcaggtagcaaagggttatctgatattttraaaccwgcattaagtcgtggtgaratttcwattatwggtgcaacracwcaagatgaatatcgmaayaatatymtkaaagaygctgcattaacrcgymgwtttaaygargtrctkgttaaygaaccaagcgcwaaagatackgttgaaattttaaaaggwattcgcgaaaaattygaarmacaccatcaagtmaaattaccwgatgacgtattaaargcatgtgtwgacttatcmattcaatatattccacaacgmytattaccwgayaaagcaatcgatgtrttagatattacagcwgcacatttatctgcrcaaagtccwgctrtygataaagtyrmractgaaaaacgwatttctgaattrgaamatgataarcgtaaagcdgtaagtgctgaagaatataaaaaagcwgaygacattcaaaawgaaatyaaatcwytacaagataaattagaaaayagtaatggtgaacatactgcwgtwgcwacrgtkcatgatatttcwgatacyattcaacgattaactggyattccwgtwtctcaaatggatgmyaaygayattgaacgtttaaaaaatatttctartcgtttaagaagtaaaatcatmggtcaagatmaagctgtagaaatggtttcwcgtgcmattcgycgtaatcghgctggktttgatgayggyaaycgyccaattggyagyttcytatttgtyggycctactggtgtkggtaaaacagagcttgcyaaacarttagcmattgatytatttggtaataaagakgcactkattcgacttgatatgagtgaatatagtgayacwacwgctgtttcwaaaatgattggtacaactgctggttatgtyggttatgaygayaattcaaayacrttaactgaaaaagtacgmcgyaatccataytcagtcattctatttgatgaaatygaaaargcwaatccacaaatwttaacattrttaytwcaagtratggatgatggtaatttgactgatggtcaaggtaatgtcatcaactttaaaaatacaattattatttgtacatcaaatgctggctttggcaatggcaatgacrctgaagaaaaagatattatgcaygaaatgaaaaaattcttccgccctgaattccttaaccgcttcaacggcatcgttgaattcttacatttagataaagatgcattrcaagatatcgtcaacttrttattagacgatgtacaagttacattagayaaaaaaggtattacgatggacgtttcwcaagatgcgaaagattggttaattgaagaaggytatgatgaagaattaggygcacgyccattaagacgtattgttgaacarcaagtrcgtgacaaaatwacagattaytatytagatcatacagacgttaaacatgtggatatagatgttgaggataacgaattagtcgtaaaaggtaaataa

SEQ ID NO: 844 - DNA, 1257 bp, Staphylococcus aureus
ttgccaatgcttaatgcacaacaatttttaaatcaattttcattagaagcaccattagatgagtcattgtatccaattattcgcgatatttgtcaggaagttaaagttcatggagataaggctttgaaaatgtataatctaacattcgatcatacgaaaacagatcatttagaaattagtcatgaacaaattaaagcagcatttgacacattagatgaaaaaacaaaacaagcattacaacaaagttatgaaagaattaaagcatatcaagaaagtattaarcagaygaatcaacagttagaagaatcagtggagtgytatgaaatataccatccactagaaagtgtsggtatttatgtgcctggtggyaaagcaagttatccwtcaacggtwytaatgacagcgackttagcacaagtagcrggtgtrgaaaatattgtygttgtgacaccacctcaacctaayggwgtrtcycaagargtattagcwgcatgytatattacgcaagttratcaagtrtttcaagttggtggtgctcaaagtattgctgcrttracttatggmacagaaacgatacctaaagttgataagattgtaggtccaggyaaycaatttgttgcatatgccaaraaatatttatttggacargtaggtattgaycaaatwgcwggaccaacagaaatagcactkattattgaygamacmgcagatttagatgccatcgtatatgatgtwtttgcrcaagcagaacatgatgaattagcacgtacatatgycattrgtgaagatgcgcaagtccttaaagatttagaatcacgtattgctaaagcattgcctaatgtggacagatacgacattgtttctaaaagtatcgctaatcaacactaccttatccatgctagtaattttgatgaagcatgccaygtyatgaatacaatcgcgcctgaacatgcgtcgattcaaacagtaaatcctcaaccatatattgaaaaagtgaaatatgtgggygcattgtttattggacattattcgccagaggtcataggwgattaygtygcwggwccwagtcatgtattacctacaaatagaacagctagatttaccaatgggttatcggtcaatgatttcttaacacggaacacggtcatycatttatcaaaagatacrtttgawcaaattgctgattcagcacaacatattgctcatgttgaagcattatacaatcaccarcagtctattttaatacgtcagtcttag

SEQ ID NO: 845 - DNA, 615 bp, Staphylococcus aureus
atgttaagaatcgccatagcmaaaggrcgtctaatggatagtttaattaactatttagatgyaattgaatwtacgacattatcagaaacattaaaaaatagagaacgccaattattattaagtgtagataatatwgaatgcattttagtaaaaggragtgacgtgccaatctatgtggaacaaggaatkgcmgayatwggyatygttggtagcgacatwttagatgagcgycawtayaatgttaataatttgttgaatatgccttttggagcatgtcattttgcggttgcagcgaaacctgaaacgaccaattatcgtaaaatcgcaacgagttatgttcatactgctgaaacatattttaaatcaaaaggyattgatgtcgaattgattaaattgaatggytctgttgaattrgcytgtgtygtmgatatggtagacggaattgtcgacatcgttcaaacaggtactacgctaaaagcgaacggactggttgaaaagcaacatattagtgatatcaatgcaagrttaataactaataaagcagcttattttaaaaaatcacaattaatagagcaatttattcgctctttggaggtgtctattgccaatgcttaa

SEQ ID NO: 846 - DNA, 144 bp, Staphylococcus aureus
atgttacaaaaatttagaatcgctaaagaaaaaagtaaattaaaactcaatttactaaaacatgcaaacagtaatttagaaacaagaaacaaccctgaactgttgcgagcagttgcagagttgcttaaagagattaatcgataa

SEQ ID NO: 847 - DNA, 192 bp, Staphylococcus aureus
atgagaatattaattacaggcacagttgctatcttaatcattytaggtttrgtyaaaacgatacaagatyacgaaatgacaaacgayacragtcgtcagttgtcagacaacaaagatgaygataaagtcatccatcttaataatttyaaaaatttacatgcgaaagaatttaacccatctgatttcttttaa

SEQ ID NO: 848 - DNA, 819 bp, Staphylococcus aureus
gtgaataattcagaacaattaattgcgttaaaagaatcggaaacagcatttttaaaatattttaataaagcrgattatgagttagttgattttagtktggttgaaaagttggactggaaacaattgaaccatgaggatttgcagcagatgggtgagcgaaatttttggcaacatgagcatcaaatttatgcacttcgaaatgattttacagatcaattattgcgttattactcaatgtatccaactgcagcaacaaaagtggcatacacaggtttaatcattcggaataatgaagcggctgtacaagtkggtttggaaaactatgcaccatcattagcgaatgtrcaacagagcttaaagctmtttattcagtttattcaacagcagttgagagacaacgtgcattttgttgtattgggacattatcaattgcttgatgcsttactcgataaatcgttacaaacaccagacatactatcaatgattgaggaacgtaatttatcgggaytggttacatatttgtcgactgaacatccaatcgtgcaaatcttgaaagagaatacgcaacaacaattaaatgtattggaacactatattccaaatgaccatccagcactcgttgaattaaaaatatgggaacgttggttacatamacaaggttacaaagacatccatttagatattactgcgcagccacctagatcctattacacaggyttatttattcaatgtcattttgctgaaaatgaatctcgagttttaacaggtggttattacaaaggaagcatcgaagggtttggattaggattaacactttaa

SEQ ID NO: 849 - DNA, 123 bp, Staphylococcus aureus
atgactgaacaaacattatttgaacagttgaacagtaaaaacgtgaatgatcatacagaacaaaaaaaacggattaacttatctagcatggtcatatgcacatcaagagttaaaaaagattga

SEQ ID NO: 850 - DNA, 2409 bp, Staphylococcus aureus
gtggctaatacgaaaaaaacaacattagatatcactggtatgacttgtgccgcatgttcaaatcgtatcgaaaagaaactgaataaacttgatgacgttaatgcccaagtgaatttaactacagagaaagcaactgttgagtataaccctgatcracatgatgtccaagaatttattaatacgattcaacatttaggttacggtgtcrctgtagaaactgtcgaattagacattacaggyatgacttgtgctgcatgctcaagccgtattgaaaaagtgttaaataaaatgracggygttcaaaatgcaacggtcaatttaacaacrgagcaagctaaagttgactattatcctgaagaaacagatgctgataaacttgtcactcgcattcaaaaattaggttatgacgcrtctattaaagataayaataragatcaaacgtcacgcaaagctgaagcgctacaacataaattgattaagcttatcatatcagcagtattatctttaccrctattaatgttaatgtttgtrcatcttttcaatatgcatataccagcactatttacgaatccatggttccaatttattttagctacacctgtacaatttattattggatggcaattttatgtaggtgcttataaaaayttaagaaatggtggcgccaatatggatgtacttgttgctgttggtacaagtgcagcatatttttacagtatttatgaaatggttcgttggctaaatggctcaacaacrcaaccgcatttatactttgaaacaagcgccgtactamttaccttaatcttattcggtaagtatttagaagctagagcgaagtctcaaacaaccaatgcgcttggcgaattattaagtttrcaagctaaagaagcacgcattttaaaagayggtaatgaagtgatgattcctctaaatgargtacatgttggagatacacttatcgttaaaccaggtgaaaagatacctgttgatggcaaaattattaaaggtatgactgccatcgacgaatctatgttaacaggtgaatctatccctgttgagaagaatgttgatgatactgtaattggttcaacgatgaacaaaaacggtactattactatgacagcaacaaaagttggcggggacacygcrttggcaaatattattaaagttgtcgaagaagctcaaagttctaaagcgccgattcarcgattggcagatattatttctggttatttcgttcctatcgttgttggtatcgcactattaayatttatcgtgtggattactttagttacaccaggtacatttgaacctgcacttgttgcgagtatttccgttctygtcattgcttgtccatgcgcattrggacttgctacaccaacttctattatggtaggtactggtcgcgctgctgaaaatggyattttatttaaaggtggcgagtttgttgaacgcacacatcaaattgataccatcgttttagataagacgggtaccattacaaatggtygtccagtcgtgacagattatcatggtgacratcaaacgctacaactrcttgctactgctgaaaaagattctgaacacccattggcagaagccattgtcaattatgcaaaagaaaagcaattaayattaactgagacracaacatttaaagcagtacctggmcatggtattgaagcaacgattgatcatcaccatatattggttggtaaccgtaaattaatggctgacaatgatattagcttgcctaagcatatttctgatgatttaacayattatgaacgagatggtaaaactgctatgctcatygctgttaattattcattaactggtatcatcgcagtggcagatactgtmaaagatcatgccaaagatgcwataaaacaattgcatgatatgggcattgaagttgccatgttaactggcgataataaaaacactgctcaagccattgcaaarcaagtaggcatagatactgttattgcagatattttaccagaagaaaaagctgcacaaatwrcgaaactacagcaacaaggtaagaaggttgcgatggttggtgacggtgtaaatgatgcacctgcattagttaaagctgatatcggtatcgccattggtacaggtacagaagttgcyattgaagcrgctgatattactattcttggtggcgacttgatgcttattcctaaagccatttatgcaagtaaagcaaccattcgtaatattcgtcaaaatctattttgggcattcggctataatattgccggtatccctatagctgcattrggcttacttgcgccatgggttgctggtgctgcaatggcactaagttcagtaagtgttgtcacaaacgcacttagattgaaaaagatgcgattagaaccacgccgtaaagatgcctag

SEQ ID NO: 851 - DNA, 1125 bp, Staphylococcus aureus
atgcataaaaaatatttattgctattttttctgttattatcagttgcattgytatatagctgttccaagcaaaatgagaaagctcaaaataaatctgttaatccaaatgagtatgcaawgcataaatcgaaaatggatgaacattgggaaacatatcacggccaagtttatcatgtgttttatcayccattaattacagacccaaaagttgcgtttacaggagatacacaccaagctaagggcaacaatgattggatgattactgtaagtgaatttaaaaaatcattgaacgaattatataaaaataattacatcatcgttaatccacatgatgtatacgacttatcatctcatcatgtaaaagccaaaaaartaaaattgccgaaaggtaaaaagccrctaatcatctcaattgatgatatgaattactatagttacatgagacaccatggttatgctgaccgyttagtactygataaaaataarcatgttgtwtctgaaackacagacwmaaaaggycatgctacttattctgatgacaatgatatcgtgccaattttaaataaatttgtaaaagagcatccagatttttctttaaatggtgaaaaaggtgttgttgctttaaccggttatgagggygtattaggwtatcgcacgaatgaattaacgagtaaagattatacaaagaataaaaaggcagctgaggaagttgttcgcgcaatgaaacgggatggatggtcatttgcgagtcattcatatggtcacattaattttgaaaaaacatctttagawggtattaaacgtgatactaaaagatggaaagatgaagttgaaccaattgtaggtaaaacagatatgtttgtatttccacatggcgcacaggatagacatacacaagcgtatgattatttggtmgatraagcagrstttaartttattgcaggtgtcggtccaaacaattttacagatatatcagcaacgaacgtttaccaagatagggttgcgattgatggtctaaacttatttgaatttaaatataaactcaaaccgttttttaatcctgaaaatgtatatagtaaacaagatagacrwtwctttaaaggkaatcgggattatgaagaatag

SEQ ID NO: 852 - DNA, 207 bp, Staphylococcus aureus
atgtcacaagaaattttaaatgttgaaggtatgagctgtggtcactgcaaaagtgctgttgaatctgcattaaataatattgacggtgtcacttcagctgamgttaaccttgaaaatggtcaagtaagtgttcaatatgatgacagtaaagttgctgtatctcaaatgaaagacgcaattgaagatcaaggttacgatgtcgtttaa

SEQ ID NO: 853 - DNA, 498 bp, Staphylococcus aureus
atgataaatactgaaagattaaatttaatgattccaagttcctcgcatttaattgawctttataatatttgtagtcatccacaagcaaatatatacactcccaaaggtttacataattccaaattagacacacaacggtggattgaaaaatggcraaaccattggcaacaatatcaatttggttactttgtattggtraaaaaaatagattgtagtgttattggtatttgtggatatgaatatcgacaattaaagcaagaaacagtaytaaatttattttataaattacatccaagttttgaaggacaagggtacgcatgtgaggctattacagcaatcacaaattttgtgaattatatcgatcaagaaacagtaaaagttatcaggacaaataagtgtaaccaacgttcaataaatttagcagaaagrcttaawttcaagcgagacrawrcwatggacgacattatcaatcaaggagatattgtgttttataaataa

SEQ ID NO: 854 - DNA, 579 bp, Staphylococcus aureus
atgacaaagcgaccaaaacgtattttggcaacaattatcatttttctttcactattatttacgattatttatatagatgacatwcaaaaatggtttaaccaatataccgataaattgacacaaaatcataaaggacaaggacactcaaaatkggaagacttttttagagggagtmggattactgagacttttggyaaatatcaacattcaccatttgatggtaagcattatggyattgattttgcattgccaaaaggtacaccaattaaagcgccgacgaatggtaaagtaacacgtatctttaataatgaattrggcggcaaggtattacagattgccgaagayaatggagaatatcaccagtggtatctacacttagacaaatataatgtcaaagtaggtgatcgagtyaaagcaggtgatattattgcatattcaggcaatacaggtawacaaacgacaggcgcacatttacattttcaaagaatgaagggtggcgtaggtaatgcatatgcagaagatccwaaaccgtttatcgakcagttacctgatggggaacgtagcctatatgatttgtag

SEQ ID NO: 855 - DNA, 537 bp, Staphylococcus aureus
atgcacaacaawaatgaattcaacaaaaaactgaaagattttataggtagcgataaacggatggctttagtaaagggttatrttaacgagtataaattaacaactgttttaagagctttaaataattccgattacacaaaagggacgatacacactcgttcaataggcaacctaaaacaaatagtagataatcgaattattcctaaaaatataactcaaaacamaatcttcaaattgagtaatttaaccttagaggttaacctctatgaaagaaacacaatttatcacggagactttgctatttactatcctgtagaatctgctctaataatagaaacagatactcctaggctaattaatcatataaataacaacccagtccaaaaaatatttataataacaacaaatgactggagctttaatacacttgaattagaaaaaatagtagacgaaactataatttatgatttaaaacaagaagatcctaaacaatatgaaattttatataaaaataaacacggaaaattgccttattga

SEQ ID NO: 856 - DNA, 201 bp, Staphylococcus aureus
atgaaaaatagtatatcrcaaaattctgaatttttagataaagaaattggcaatttttcaaacatattgttacaatacacttttattttatcttcatttttaaaatccattaatacaatagaagaaagacattcaaatgcttaccaaaaaggtacattatttgttaggagcgtatcarcacttayatatcatcaacacaat

SEQ ID NO: 857 - DNA, 834 bp, Staphylococcus aureus
atgaatcaatataatactataggttttcacccgggaaatagtcgtattcatcaattaaatgcgactgttaaacttttattcttattagttgtttctatttctgcaatggtgacttatgacacaagatatttaattttaattagtgyttcatctattttattgktcaaatatgctcatattgaatggaaacaagttcghtttgttgttaaattyattctgtttttcacaatattaaatattattgccgtrtayatatttgaycctgaatatggtgtgaagatttataatcagcgtacagagttartcaatggtattggtcgatttacgctaacatcacaggaattattctatctktttaatctaatattaaaatatattagtacagttcctttagcgttaatatttttattcacaacgaatycgagtcattttgctgcaagtttaaatcagctaggtgtgaattataaaatcagttaygcagtmtcactagcattaaggtatattccagatattcaagaaacatattttaatatttcacaagcrcaacaagcaagaggatatgataattcgaaaaargcraaatttactagccgtgttaaaggtatcaaacgcattgtgttacctttaatattttctagtatcgaaagaattgacactattagtactgctatggagttaagacaattcggacagtataaaaggagaacctggtacgtcaaaaaacaattaaaaaaagatgattatgttgttttgtgtttgacgttaatacttctgatgttagtagttacattattctttttaaataatagtcgatatttcaacccgtggyattag

SEQ ID NO: 858 - DNA, 303 bp, Staphylococcus aureus
ttgagatatgaagatagagttgtttttcaattagaacaagtagcaacttacaatcctaaaactagcaaaaaagaaaacgcactaatcacttatgatgcgataccatgcaatattaaccccatttctagagcaagaaagcaacttgaatttggtgatgtaaaaaacgatgtaagtgttctgaggataaaagaatcaatatctcaccctgttagccacgtgttggttaatggcattcgctacaagatagttgatacaaggatatacagacacgaaacgtcatattatatcgaagaggtcaattga

SEQ ID NO: 859 - DNA, 603 bp, Staphylococcus aureus
gtgttaaaacaacagatgttaggtagtgaacaaatgayggaaagtaaatccatagatccaagaatcgttagaaccaaacaattgcttgtcgatgcttttcttaaaatttctagagaaaagaaattrtctcaaattacagttaaagatatcactgatattgctacgytaaatcgtgcaacattttacgctcatttcrctgataaagaagacctcctagactacacattrtctgtaaccattttaaaagacttgaatgataayttgagcatttctaatgtcattaatgaaaaggtdctgcgtaatattttcatttcaattgcgagttatatcaaagatgctgcaaagtcttgcgaattaaatagtgaagcattttgcaacaaagcacatcaacgtattaataatgaattagaagatatttttgcgattatgttagaaaacagctayccrgagcatcaacgagatatcattgtaaatagtgsgagttttttagcagctggtatmtcaggcttagcattacattggtttaacacgagtcaagaracagccgatgtgtttatcgatcgcaaccttccatttttaattcatcatatagcacatttttaa

SEQ ID NO: 860 - DNA, 1713 bp, Staphylococcus aureus
atgactgaaccaattatctcgttcaaagactttagttttcaatatcatagtcaagcaacacctacattacagaawataaatgttgatatttatccrggagaaaaagtrytagtagttggtgcttcrggtagtggtaaatcgacttttgcaaattgcataaayggattaattccatttaaaactaaaggtaacrtaacyggggaactayatataaataatcaagatgcaacygttagttgtttacatrawagatctaatgttgttggtacagttttacaagatacagatggacagttcataggcttaacagcagctgaagatatggcctttttattagaaaataattgtgttgaacaagatgatatgaagaaaaaygtragttattgggctgaaaaagttgryatgatagaacatttaaatcaccgaccgcaagatttatctggrggtcaaaaacaacgcgtttcattaggtggtatattaatccatcgtacscctattttaatattggatgagccrctggccaatttagatcctgcgacaggacatgaaacgctgagattgttaaayaatattcatgaagaaacaaagtcaacgatgattattgtcgaacatcgattagaagaatcattagatgatacgtttgatagagttcttctttttaaagatggaaaaatcatcgctaatacaacgcctagtgatttgctaaaatcatctaagcttaaagaagcaggmatacgtgaaccattatactgtacagcgcttaaatatgcagaagtagatgtygaatccattgataacttagcgaatttacgtgamgtttgtatgagtgaacatgttaaatttaaagtgaaaaaatggatagatraaacatctkcaaatratgataataagtacaaatctgaaccgctattagaattaaatgaggtrtgtgttcaatatagtgactatagtaatagtgtacttaataatgttcaattaaatgtttatagaaragaaatgcttagtatagttggtcacaatggtgccggcaaatcaacacttgctaaagcaatttgtggatttttagatataacaggtaatatccaattttgtaatargggatttaatcaattgtcaattagcgaacgatctgaattcrtaggttatgtgatgcaaaatccaaatcatatgatttcygaaaaaatgatttacgatgaagtagcattagggttaagagcacgaggtatgaaagaatcagatataaagatacgrgtagagaatgtgctcaaaatatgcggactttatgcatttcggaattggccaattgyagctttaagctatggtcaaaaaaagagggtcactatagcatctgttttagtcttaaatccggaaataatcatattggatgaaccgactgctggtcaagatttctatcattataatgagataatgtcatttttaattgarctaaacagacarggraagacgattattatgattacgcatgatatgcatttattgtctgagtatagttcaagaacagttgtattatcaaaaggwcaagtcgttgctgataccacgccagtattgrtwttaaatgataaaaaaatctgtgagattgcatcattgagacaaacatcgctatttgaaatggccgaatatatagggattagcgagccacagaaattartacaattatttattaaccatgataggaaggtgagacgccaatga

SEQ ID NO: 861 - DNA, 555 bp, Staphylococcus aureus
atgaaaaaacaagatatttcagttaaaactgttgttgcrattggtataggagcagcggtmtttgtrattttagggcgttttgttgtaataccaacaggktttcctaatacgaatatagaaacatcwtatgcatttttagcattaatatctgcaatatttggrccttttgctggtttaatgactggattarttggwcaygctattaaagatttyackacatacggtagtgcytggtggagttgggttatttgytcrggaattataggctgtttatatggmtggattggmctaaaattaaatctttcttcaggmckattttctaggaartcgatgrtttattttaataycggtcaaattattgcgaatattatttgctgggcacttattgcaccaacattagatattttgatttataacgaaccrgctaacaaggtttatacacaaggtgttatctctgcagtattaaatattatttcagttggyattattgggacaatattattaaaagcatatgcttcatctcaaatwaaaaaaggtagtttacgtaargaatar

SEQ ID NO: 862 - DNA, 231 bp, Staphylococcus aureus
atgaaaattttagatagaattaatgaacttgcaaataaagaaaaagtmcaaccacttactgtagctgaaaaacaagaacaacatgcattgcgycaagactacttaagyatgatccgrggacaagtattaacaacattttccacaataaaagtggttgatccaatcggtcaggatgtcacaccagataaagtktatgatcttcgccaacaatacggttatattcaaaattaa

SEQ ID NO: 863 - DNA, 849 bp, Staphylococcus aureus
atgggaaattatttggtwttgcaatcagattttggacttagtgatggcgctgtaagtgcaatgtatggagttgcatatactgtaagtgatgatatacgtgtygaaaacttaacgcatgatataccaccgtatgacatttgggtagcgtcatatcgtttatatcaaactgtaaaatactggcctaaaggcacagtttttgtatcagtggtagacccgggtgtaggtagtgataggcggagcattgcttgcttaacatattcaggtcattacattattacacctgataatggytctttaagtcatatyaaacattaygaaggtattaaaaaagttatcgaaattgatgaagtgaaaagccgattgcctcattcggaagaaagtcatacttttcatggtagagatgtttatgcatacaatggwgcgagattagctgcaaataagatagcgtttgaacgtctcggtcaggcaattaatgttgatagtattgaggcattagaaataagwgaagygacaaaaaatgaggattctgttacaggaagyattgatattttagatatcagatttgggtcattatggacaaatattccattggcattcttaaaatccttggaaattgttcatggyaataatttggtggtaacaatttatcatcaagataagaaagtctatcaaaatattattaaatttgcgcgatcgtttgcagatgttaatgtgggtgaacctcttgtgtatgttaactcgctagtaaatattggtgtagcrgtcaatcaagactcattttcagatttatatcatattggtactggaaatgattggacgattcatttatctaaagcaccatcratwtar

SEQ ID NO: 864 - DNA, 558 bp, Staphylococcus aureus
atgcgaaaagatgcaaaagagaatagrcaacgaattgaagaaatagcgcacaaactttttgatgaagaaggcgttgaaaacattagtatgaatcgtattgctaaagaactaggtatcggtatggggacattgtatcgacatttyaaagataaaagcgatttatgctactacgtcatacaaagagaccttgatatttttatcactcattttaagcaaattaaagatgactatcattctaattatgaggttatgcaagtgtcgttagattatcttttacaatttaaaatcgaymataaggcactactgcaatgtattgaagcaggcaacaataaattacgtttttaccaaagcgcattttatcaagaattatttkatttttattatgacttrtttaaaagcgatgacgacayttacacgaagttcaaaacagatatgctgttgcaakcattatcaacwmgtgtatttgmyttccaaatagarcatcgcmatatttcaattgaagcgtayagaaattatttattaaacatttatttagatgaggtggracgtaatgactaa

SEQ ID NO: 865 - DNA, 972 bp, Staphylococcus aureus
atgtcacaacaagatttacctacattattttatagcgggaagtcyaatagtgctgttccaattatatctgaaagtgaattacaaacaattacagctgaaccatggcttgaaatttccaaraaaggattgcarctagaaggattgaactttgatcggcagggacaactctttttattggatgtattcgaaggmaatattttyaaartmaatccwgaaackaargaaatyaarcgrccttttgtaagycayaaagcraatcctgcagcaatcaaaatacataaagatggccgattattyrtttgttatttaggagattttaaatctacaggaggcatttttgcagckacagaaaatggtgacaacwtacaagatatyattgaagatytwtcaacarmwtattgtattgatgacatggtatttgattctaaaggtggrttttattttacagattttagaggatactctaccaayccactaggrggcgtttattatgttdcgccrgactttaraacagtgacgcckatyattcaaaatattagcgtagcaaatggtattgctttaagtamagatgaaaaagtactatgggtaacagaaacwacagccaawcgattacatcgcattgcacttgaagatgatggtgtgacgatacaaccatttggagctacyataccgtactattttacaggtcatgaaggaccagactcatgttgtatygatagtgacgataatttataygtrgcaatgtatggtcaaggycgagtrttagtttttaataaaaggggttatccaataggacaaatattgataccargccgagatgaagggcatatgttacgttctackcatccgcaatttatacctgrmacaaatcaactcatcatttgttccaatgatatagaaatggrcggaggrtctatgctttatacrgttaatggctttgcaaaaggkcatmaaagttwtcagtttcaataa

SEQ ID NO: 866 - DNA, 705 bp, Staphylococcus aureus
atgactaaaattgtgttaatcacaggwggyaataaaggrttaggctatgcaagtgcrgaggcacttaaagcattgggytacaaagtktatataggttctcgkaatgaygtaagaggacaacaagcatcwcaaaaattaggtgttcattatgtacarttagatgttacaagtgactactcwgtcaaaaatgcttataacatgattgctgaaaaagaaggycgtcttgatatcctcattaacaatgcaggtatatctggtcaattttcarcaccttcyaaattgacacctcgtgacgttgaagaagtatatcaaacgaatgtattyggtatcgtwcgaatgatgaayacattcgtccctctcttagaaaaatctgaacaacctgttgtcgtcaacgtatcaagtggtttaggttcatttggaatggttacaaaccccgaaacagctgaatctaaagtgaattcattagcttattgttcgtctaaatcggcagtaacaatgctaacrytacaatacgctaaaggattaccwaayatgcaaatcaatgctgctgayccaggygctacaaayactgatttagttggtgattttagtaataattcmaaacaygtttctgaaggratcaagccaatcattcaattagcaacsattgrtgcagatggcccracaggtacatttattaatggsratggwgaratgccttggtar

SEQ ID NO: 867 - DNA, 768 bp, Staphylococcus aureus
atgttaastaaacaatctcaagattttttagaaaaattacgtgttgaattgttatttagaggtaagactgaagcagaagtagaagagttattggaagagctcgaagatcatttaactatggctgaaaaaaataacgaagatacaagttcaattattaatacaccgattaagtcaatggctgatcaattatcacctgagataagtcttactaccggtttgtataaatatattactttgtacttckcttttatwttagcagtcattataattcctaggtttttagatttgggtacatttgatgtgacaattgcatttttactttatatagctagtatcgttattttaggtgttgtcattggtatgctgattctacgmaatacattagtccgatttggtgaccaaaaaataacgtatgttataaatgtgacttatggaattrtcgtatttttatggatgattttwggtggyttgattattaaaaaatatcctatctatagtttctttgagttaagtgacaaacagagtttcatcgttgggttagtacttttaattgcgctyattgkaayttgtattttaattaaacagaaaatttatgcgctcatcgtgttggtaatttcattgccaagtttgatagcaaggatagcagctatctttagtaaagaaccagacacttttaatttagtttcagtaagtatactcatcattctaaatatagcatttattatttatacatttgtaaattttaggaagttaaaaaaagaagactaa

SEQ ID NO: 868 - DNA, 339 bp, Staphylococcus aureus
atgtcagtgtcagatcagattatgaaaggtctcttagatggggcgatattaggtctcattgcccaaggcgaaacgtatggatatgaaattatgacgaaacttaagaatcaagagtttccagagataagtgagggtagtatttatccagttttaatgcgtttaaacaaaaaaggatacgttgatacgacaataaaaaaatctagtaatggcggcccgaggcggaaatactatacgattaccgattcaggtttaaaggaactaaaagtatttaaatcraaatggcaagytttgaataaagggatgattaacttgtttggaggggaaaacgatgttaastaa

SEQ ID NO: 869 - DNA, 1011 bp, Staphylococcus aureus
atgaaaagtattacgtttgaagaacattatgtcattgaagatattcaaaaagaaacgatgaatgcgatatcrgcagatcctaaaggtgtrccgatgaaagtaatgttagaaggccttgaaaaaaagacaggttttacaaatgccgacgaattatcacatcatgatgaacgtatccaatttatgaataatcaagacgttcaaattcaagtcttatcttatggaaatggdtctccttcaaatttrgttggtcagaaagccattgaattatgtcaaaaagcaaatgatcaattggcaaactatattgcmcaatatcccaatcgctttgtaggctttgcaactttacctatcaatgagcctgaagccgcagcgcgagaattcgaacgttgcatcaatgatttaggattcaaaggtgcgctcattatgggacgtgcacaagatggttttcttgatcaagacaaatatgacattattttcaaaacagctgaaaatttagrcgtaccgatttatctacatcccgcgccagttaacagtgacatttatcaatcatactataaaggaaattatcctgaagtaacygcggcaacatttgcttgttttggttatggttggcacattgatgtygghattcatrcaatacatctagtattatcyggyatttttgatcgttatccaaagttaaatatgattattggacattggggtgagtttatcccattcttcttagaacgtatggatgaagctttattcrctgaacatttgaaccacyctgtaagctattactttaaaaatartttttatatcacaccragtggyatgttaacgaagccacagtttgatttagtcaagaaagaagyaggtattgatagaattctttatgctgctgattatccatatattgagcctgaaaaattaggtgtatttttagatgaactgggtttaacagatgaagaaaaagagaaaataagttatacaaatggtgctaaattattaggtttatcabctaacaattaa

SEQ ID NO: 870 - DNA, 909 bp, Staphylococcus aureus
gtgaatwyagartataaaaaaggyatatttttagcactyagtgcwtacattctgtggggaatactacctatatattggcagttcgttgatgmaataggcgcatttgaaattttagcctttcgtattatattttcagyaatattcatgatwttcatactcgcggttggacaaaaacaacgcaatgcatttcaacgagatatgaatcaattgttagscaagcccattcarytaytagcrattgtcgtagcrggytatgtyatyacattaaattggggtacatttatttgggctgtaacgaacggtcacgtmctacaaacaagtttaggttattatataaatccacttgttagcattttgctcgcacttatctttttaaaagaaagattcaataaatttgaatggctagcyattttattcgcattcatcggtgtattatatatgacgctcaagattggagaattcccaatcgtytctattatattagcgttatcctttggtacatayggattattraaaaaagtagtacatattgatgccatcagcagtattacgattgaatgtattgttacmgcacctgctggactmatatacgttatttatttatggcagcaacatcagatgtcatttggattgaacatgtcatcattttggttrttattttctggtgctattacggcaataccactaatcctattctcagccggggcaaaacgtattccactttcgytaataggatttattcaatacgttggaccaacaataatgtttgtactcggcatatttgttttcaaagagccttttartatagatcaattaattacgtttatatttatttggacaggtattgtgttatatagtctttctcaatacattaaattgaagaaacatccggtcgcaaaaaccctataa

SEQ ID NO: 871 - DNA, 831 bp, Staphylococcus aureus
atggaaactttagaattacaaggcgctaaattacgmtaccaccaagtcggacaaggacccgtgctcatctttattcctggtgcaaacggtaccggaracatttttctrcctcttgcagaacagttaaaagaccattttactgttgtagccgttgatcgtcgtgattatggagaaagcgagttarctgaaccactccctgattccgcttcwaaccctgacagtgattatcgtgtcaaacgcgacgcacaggacattgccgaacttgcaaagtcattaagtgatgaacctgtctatatattaggttcaagttcaggttcaatcgttgcgatgcatgtgttaaaagattaccctgaagtcgttaaaaagattgcatttcaygaaccaccaattaatacatttttaccagacagtacttattggaaagataaaaatgatgacattgtgcatcaaattttaacagaaggcttagaaaaaggyatgaaaacatttggygaaacattaaatatcgcaccaattgatgcaaaaatgatgtctcaacctgctgatactgaagaaggacgtatagaacagtacaaacgtacgatgttctggtcaraatttgaaattagacaatatacgcattcagatattactttggatgatttcacaaaatacagcgataaaatcaccytactaaatgggacagattctagaggctccttcccacaagatgttaacttttatataaayaaagaaactrgcatacctattgtagatattccaggcggtcacttaggttatattcaaaaacctgaaggctttgctgaygtattattaaatatgtggggttaa

SEQ ID NO: 872 - DNA, 513 bp, Staphylococcus aureus
atggmaaaaggaaaycaaggwattaaatggtctagtttratwatgggtgtrttrttattaatgttrgcagtygttatttttacattyccaattgaaaayttttatgcwatyacmwggttrattggaytrtttgtattrattaayggtgtgattcaaatyrtttaycgtagaaaagcmaaagctttagtwggtggtaaccaaaattggattctgtttatggggattgtagatattctmtttggtcttattgtyatttttaatgttggygcwagytcrgcattytttatytayatgtttgcwttytggttyatttttagttctatykcwggattatttacgtttwcrggtagtggtagcttaaaactaatttcagtgatttttaatttattaggtattgttttcggtgtcattttattatttaatccattaatgggtatcgtctttatttcgacgatgattgctattgcatttgtattcgtaggtgtcatttatgttgtagatgcacttgcttaa

SEQ ID NO: 873 - DNA, 183 bp, Staphylococcus aureus
atggaaccacgtcttaatcggcgtggttcgttttgtagatatagcatctatgattgtatgacggtgaaagttcattacaaacttggtattggtaaatttatcattttaagtatcggtgatttaattgaaatagaaactattatcgaagaaacattatataacacgataattatacgttactaa

SEQ ID NO: 874 - DNA, 1065 bp, Staphylococcus aureus
atgtacaaattaattaaacctttcttattcaaaatcgaacccgaaaaagcacacggactaactatcgatgcattaaaaacgttacaaaartttccrgttttattcccagtcgtcgataaactatttacttataagaatccaacgttatcacaaacgatacaaggtaatacgtacgacaatccaattggcttagcagctggtttcgacaaatcttgcgaagtaccaaaagcattggaacaccttggattcggtgctttagaattaggtggtatcacacctaaacctcaaccgggtaaccctcaaccacgcatgttyagattattagaagatgaygccttgataaatcgwatgggcttcaataatattggtatgaacaaagcactmagtcatttgcgtaaaaatgcttatcaagtacctgttggtatcaatgttggtgtgaataaaatgacaccttatgaagcgcgttatcaagattatataaargtyattgatacgtttaaacacgacgtttcatttttcacagtcaayatcagttctccaaatactgaaaaycttcaaaayttccatgataaagatgaattttcaatgttatgycaagctttracarcatttaaaaaacarcaygatgtaacagtgccaatttayttaaaactaacgtctgatatggatttcgatggcttaaaagcactattaccagcgattactgagacatttgacggtatcatcttagcaaacacaacgcgacaacgagatggtttaacttctgctaataaagtcgaagaaggcggtttgagtggtcgtccattatttgaacgtaatttaaaattgattaagtatgcttatcagcaaacaaatggtgaatttttaattataggtacaggcggcgtattcagtactgaagatgcaatcaaaatgatgcgtcacggtgcgtcacttattcaaatttattcatcacttgttattgaaggcccaggtttaactaagaaaatgaacaaaggcatcrcacgttacttaaaagatcatcattttgacaatgtcagtgatattataggactagatgcctaa

SEQ ID NO: 875 - DNA, 498 bp, Staphylococcus aureus
atgattattaaccttgaaacacaacaaatacattttgatttagaacatgaaattccctattttcaakcacctgagaaaaataggatacgcttagatattgatgttctcaataaaaagcaaatttctaatattattaatgttatatttaataaccaatcaaagacgaaatgtacatttttgtctgaatacttatatcctgttaaatttagagaaaaaacaagaattggtcgtttttttaatattactaactggtacgaagaaatccattctrccgatgagaagtatgttattgcaactattaaaaatataaaaaacaaagacttaattgattattctttatatattaaaaaaggtttagtggagccatttattgtattctataatcaagaaaatatattctacattagcaatgctgttatagatatcatcagtgtatccaaagatactcttgrttatataaagtcagaattcaatgatcactgtgcttcgccatactga

SEQ ID NO: 876 - DNA, 1098 bp, Staphylococcus aureus
atggcagaactaaagttagagcatattaaaaagacgtatgataacaacaatactgtagtgaaagattttaatctacatattactgacaaagaattcattgtatttgttggaccatcgggatgtggtaaatcaacaacattacgaatggttgctggactagagtctatcacatctggagatttttatattgatggggaacgcatgaacgatgttgaaccaaagaatagagatattgcgatggtatttcaaaactatgcattatatccacatatgactgtwtttgaaaatatggcatttgggctaaagctacgtaaagtraataaaaaagagattgaacaaaaagtyaatgaagcagctgaaatattaggattaactgagtatcttggtcgtaaaccaaaagcgttatctggyggacagcgtcaacgtgttgctttgggcagagctattgttagggatgcgaaagtctttttaatggatgaaccattatcgaatcttgatgcgaagcttcgagtacaaatgcgcacagaaatattgaaattacataagcgacttaatactacgacaatttatgttacrcatgatcaaactgaagcattgacgatggctagtcgaattgttgttttgaaagatggcgacattatgcaagtcggcacacctagagaaatatatgatgcccctaattgcatwtttgtggcgcaatttatcggctcaccagcaatgaatatgttgaatgcyacagttgaaatggayggattgaaggtaggaacacaycattttaaattacataataaaaaatttgaaaagttaaaagctgctggctacttagayaaggaaattattttaggtattcgagctgaagacattcatgaagaaccaatatttattcaaacytctccagagacacaatttgaatctgaagtagttgtatccgarytgttaggttcagaaatyatggtacatagyacattccaaggaatggaattgatttctaaattagattcaagaachcaagtgatgrcgaacgacaagattacactagcatttgatatgaataagtgtcacttttttgatgaaaaaacaggaaatcgtatcgtctaa

SEQ ID NO: 877 - DNA, 705 bp, Staphylococcus aureus
atgtctaaaaatatcaatcaagcaaatagtaaattaaatacgtcaaacaaaaaactaaaacaagcttattcaaaatccgayagtaaaaacwtgaaagttatatacatgcctcattggctagagttttattcaattgctatacatagcgatgttacaagcaataaaaaaagatattataaatcatwtagtagaggaacagtggtatatgtaaaactagggagtaatattggaagtgagttttctggtaatcatttttgtgtaatattagataacaaagacaataaaggaaaagaaacagttacaatagttccactttcttccaaaggtaataaaaattatttgaagttaaacgaatcggtgctaaatctaacarcaacagatttaaaaaaacagattatcgatatcagtagtaaagtacaagcattarcccaaaaatatagagawattgacattaaacttagcacagaagataaaaagcttttgtctaacttaaatcaaaaagctaatgaactgtatagagtgataggtgtttattccaagcacaaagggaaagatacatacgttaatatatcagcaattacaacaataagcaaaagacgtataagcaaaataaatgattctgatcctactggaacgataataatttcagaagatgacatgaatgaaatcgaaaagcaattaaagataaagttcttttctaattga

SEQ ID NO: 878 - DNA, 276 bp, Staphylococcus aureus
atgactaaagaaacagataataaaaaaacagtagcgacttctgacaacaaagacacacagcaacaaaatcaamctgaagaagatgaacgtcaaggtttgaatggttatcgtaaaacagatcttgatttagaaatygagcaagagctacgtgaaatgatgaaaacaggagaaaatgaaacgaaaaaygactayaaaaagtttaaagtgttttcacttatttcaacacttrtcattgtcattttagcaattataagatttgttcataaaatgatktaa

SEQ ID NO: 879 - DNA, 570 bp, Staphylococcus aureus
ttgaatctgagtaaacaaattaaaaartatagggaacgagatggttattcacaagaatatcttgctgaaaagttatatgtatctaggcagagtatttctaattgggaaaatgacaaaagcttaccagacatacataacttattaatgatgtgygaattgttcaatgtaactttagatgatttagtaaaagggacyattccatttgtacctgatattaaagygcaacgaagtcttaacttatggacatatgtgatgcttattttcatgacattagctgcaattttaatgggacctttagttgtttattggaattggacttggggtrtaacggtggcaatcattttgggaataggtttttatgcatctatgaaaatagaagatttaaaaaaagtgcataaaatggacaactacgatcgaattgttgcttttatgaatggaaaagatcctagtgaagtacaaacgactaaagctagaaatacgatgacaaatgcgctttctattatatcagyaattggtatactcagcctcataattttccttagtgtgtatwtggcaaataagtttttataa

SEQ ID NO: 880 - DNA, 570 bp, Staphylococcus aureus
ttgaatctgagtaaacaaattaaaaagtatcgggaacgagatggttattcacaagaatatcttgctgaaaagttatatgtatctaggcagagtatttctaattgggaaaatgacaaaagcttaccagacatacataacttattaatgatgtgtgatttgttcaatgtaactttagatgatttagtaaaagggaccattccatttgcacctgatattaaagcgcaacgaagtcttaacttatggacatatgtgatgcttattttcatgacactagctgcaattttaacaggacctttagttgtttattggaattgggcttggggtataacggtgatagtcatttatggaataggttattatgcatctatgaaaatagaagactttaaaaaagtgcataaaatggataactacgatcgaattgttgcttttatgaatggaaaagatcctagtgaagtacaaacgactaaagctagaaatataaaaacaggtgtactttctttcatagcatttgttggtgcaatcattcttatagctttgattagtatgcatctggcaaataagtttttataa

SEQ ID NO: 881 - DNA, 96 bp, Staphylococcus aureus
gtgtcagttggttcactagcggtgttaacaattacggaaattgcatttccgactgaaatttttgaaaaaaatcaacgcacgctacaaataaaattt

SEQ ID NO: 882 - DNA, 450 bp, Staphylococcus aureus
atgacagcattattcccttatatcgcttttgaaaattcaaaagaagccmttgcatattacgaagaagtatttggtgcaactgacgttaaacgtttagaagttggcgaagaacaagcgtcacattttggyatgactaaggaagawgcrcaagaagcaactatgcatgctgartttgaagtgcttggygtaaaagtgytatgttctgattcttttggtcgcgctgacaaaattaataatggcatatcattattaattgattatgatgttaacaataaggaagatgctgataaagttgaagcattctatgagmaaattaaagatcattcttcaattgaaatagaattaccgtttgctgaccaattctggggtggcaaaatgggcrtctttaccgataaatacggtgttcgttggatgttacatggtcaagactatactgcaatccaacaataa

SEQ ID NO: 883 - DNA, 381 bp, Staphylococcus aureus
atgaaattttttgtggggggatttgcagtattattaagttatattgtatctgtaacactaccttggaaagaatttggcggtatatttgcaacgtttccggcagtatttttagtgtctatgtttattacaggtatgcaatatggtgataaagtcgctgtgcatgtaagtcgtggcgcagtgtttggtatgacaggggtattagtttgtattttagttacatggatgatgttacatatgacgcacatgtggttgattagcattrttgttggtttcctaagctggttcatcagtgcagtatgtatttttgaagcrgtagaatttatagcacaaaaaagattagaaaagcatagttggaaagctggaaaatcgaatagtaaatag

SEQ ID NO: 884 - DNA, 1683 bp, Staphylococcus aureus
atgaaccaacatttactaggaaatccaaaattaactgtaactcatgtcaatgaagtkaaarccggtattaaccacatcgttgtcgacagtgttcaatatggaaaycaagaaatgattatggaaaaagatgkcactgtggaaatgcgcgatggcgaaaaattatatattaatattttcagaccaaataaagatggcaaattccctgtagttatgtctgcagatacttayggtaaagataataagcctaaaatcacmaatatgggtgccctttggccaacattaggyrccattccgacatctagttttacacctgaagaatcaccagacccaggattttgggtrccaaaygattatgttgtagttaaagttgcattacgcggtagtgacaaatcmaaaggcgtcttatctccatggtcaaaaagagaagcggaagattattacgaagtgattgartgggcagcaaawcagycatggagtaatggaaayatcggracaaatggygtttcttatcttgcggtgactcaatggtgggtcgcatcattaaatccaccacatttaaaagcaatgattccttgggaaggmttaaatgatatgtatagagaagtagcctttcayggrggtatwmcdgatactggcttttatcgtttctggaywcaaggtatttttgcgagatggacagataatccaaatatcgaagaywtgattcaagcacaacaagaacaycctytgttcgatgatttttggaaacagcrtcaagtgcmattatcacaaattaaaacacctctactaacatgtgctagttggtctacacaaggtttgcacaaccgtggctcttttgaaggatttaaacaagcwgyatcwgaagaaaaatggctatatgtgcatggacgtaaagagtgggaaagttactaygctagagaaaatctcgaacgccaaaaatcattctttgatttttaccttaaagaagaaaataacgattggaaagatacgcctcatgtcatwtatgaagttagagatcaattttataaaggcgaattcaaatcagcgtcagcgttccctttacctaacrcagaatatacaccattgtatttraatgctgaaaatcacacattgaatcatgcaaagatyagtagcgcgyatgtcgcacaatatgactctgaagataaacracaagatgtaagttttaaatatacgtttgacaaagatactgagttagttggaaacatgaacttaaaactatgggtaagcactamagactcagaygatatggatttatttgcaggtattaaaaagttagatcgtcgtggtaatgaagttaacttccctgattttaatcatattgaaaatggtcaagtagctacyggttggttacgcgtatcacatcgtgaattagatcaagaaaaatccwcaatygcgcaaccttggcataaacatgaaacagaattaaagttgtcacaagatgagattgtacctgttgaaatcgaattgttaccttcaggcacgctatttaaacaaggcgaaacattggaagttgttgtaaarggtagtgaaattgtaattggtaatagtacycctggcatgaaaacrcgttatgaacatgaagaaaccrtaaataamggcatgcacatgatttatactggtrgtaaatatgattcacaattaatcattcctatcgttaattga

SEQ ID NO: 885 - DNA, 354 bp, Staphylococcus aureus
atgttttcaattggaagtgcaatwcttcattttgtcattggtggtatcgctgttgcattagcttcaattattgctgataaggtaggtggtaagttaggaggtattatagctactatgccggcagtctttcttgcggctattatcgcattagctttrgatcatcgtggtacrcaattagtggagatgtcgatgaatcttagtactggagcaattgtcggtattctgtcttgtatattaactgtatttttgacatctctctayattaagcataaaggttatcggaaaggcgcaatattcacagttgtttgttggtttgtyatttccctygcaatattcagtattagacatttatag

SEQ ID NO: 886 - DNA, 861 bp, Staphylococcus aureus
atgttatcagttgcgattatcggcccaggcgctgtcggtacaactattgyctatgaattacaacaatcattgcctcatacaacgcttatcgggagacacgccaaaacaataacatattatactgtaccacatgcacctgcacaagatattgttgtraaaggttatgaagatgtcacaaacacatttgatgttattattattgcagtcaaaacacatcaacttgatgcmgttattcctcatttaactyatcttgcacatgaggacacgctcatcattttagcccaaaatggttatggtcaactcgaacatattycatttaaaaaygtatgccaagcagttgtctatataagtggtcaaaagaaaggcgatgttgttacgcacttcagagattatcaattacgtatacaagataatgcattaactcgacaatttagagatttggtccaagacagtcaaatcgacattgtaytagaagcaaatattcaacaagctatttggtataaattgttagttaacttgggcattaattctatcacagcactcggkagacagacmgttgcaatcatgcataatcctgaaatacgtayactgtgtagacagytattactagatggttgtcgtgttgcacaggcagaggggttaaacttttcagaacaaactgtcgatactattatgactatatatcaaggttatcccgaygaaatgggaacgagcatgtattacgacattgygcatcagcaacctcttgaagtcgaagcrattcaaggctttatttatcgacgtgcacgtgaacacawtcttgacaccccatatcttgatactatttatagctttttacgcgcktatcaacaaaatatgtaa

SEQ ID NO: 887 - DNA, 840 bp, Staphylococcus aureus
atgaaaaaacctttttcaaaattatttggtttgaaaaacaaagatgacatcattggacatattgaagaaratcgcaatagtaatgttgaatccattcaaattgaacgtatcgttcccaaccgttatcaaccaagacaggtrtttgaaccaaataaaattaaagaacttgctgaatcaatacatgaacatggtttaytacarcctattgttgtaagaccgattgaagaagatatgtttgaaattattgctggagagcgccgatttagagcaatacaatcactaaatttacctcaagcagacgttattattcgtgatatggatgatgaagagacggctgttgtkgcattaattgagaatattcaaagagaaaatttgtctgttgttgaagaagcggaagcctataagaaattattggaaattggtgatacaacgcaaagtgaattggcaaaaagtttaggtaaaagtcaaagctttattgcaaataagttgcgtttattgaagttggcgccgaaagtactacttcgcttaagagaaggtaaaattactgaacgycatgcgagagcggtattatcattgtctgatagygaacaagaagcgttgattgagcaagtcattgcacaaaarctaaatgtgaaacagactgaagatagagtacgccaaaaaackgggcccgaaaaagtcaaagcacaaaaccttcgctttgmacaagatgtcackcaagcacgagatgaggtaggcaaaagtatccaagcgattcaacaaacaggaytacatgttgagcataaagacaaagatcatgaagattattatgaaataaaaattcgaatatataaacgttag

SEQ ID NO: 888 - DNA, 1449 bp, Staphylococcus aureus
atgggaagttttttcaataaaatagcacgaaaagaggatccggctatctatcaaaataaagatggtcatttaaagcgtacacttcgggtgcgtgatttcttagctttaggtgtaggaacaattgtatcgacatctatctttacrctacctggcattgwwgctgcaraacatgcaggaccggccgttgcgttatcattcttactcgctgctattgttgctggtttagttgcatttacttatgcagaaatggctgccgctatgccatttgcaggttcagcctattcttgggtcaatgtattatttggtgaattytttggatgggttgccggttgggctytattagctgaatattttatcgccgtagcctttgttgcatcaggattctcagcgaatttacgcggacttgtgaaaccaattggcatcgaattaccwgcagcattatcaaatccatttggtacraatggcggttttatcgatattattgctgctatcgttattttattaactgcattattactatcacgtggtatgtcrgaagcagcwcgtatggaaaayattttagttattttaaaagtattagctattattttatttgtmatcgtaggtttaacagcaataaatgttagtaactatgtgccatttattccagaacacaaagtaactgctacaggtgactttggtggwtggcaaggcatatatgctggtgtttcaatgattttcttagcgtatatcggtttcgattctatcgcagcaaactcagcagaagcacttgaycctcaaaagacaatgcctagaggtattcttggttctttaagyrttgctatcgtattatttattgctgtagcacttgtgttagttggtatgttccattactcacaatacgcaaacaatgctgaacctgttggttgggctttacgtcaaagtggtcatggtgttgtagcagctattgttcaagctatctctgttatcggtatgtttacagcattaattggtatgatgttagcaggctcacgtttactttattcatttggacgtgacggcttattaccttcatggktaagccayttaaacgacaaacatttacctaatcgygcactagttatacttactattattggtgttttaattggttctatgttcccattcgcatttttagcacaattaatttcagcmggtacacttgttgcatttatgttcgtttcattagcaatgtatcgtttgagaaagcgtgaaggtaaagatytaccaattcctgcrtttaaattacctttatatcctgtgttaccagcarttacatttgttttagtattgctagtattctggggattaggattcgaagcgaaattatacactttaatttggtttattgttggtatcatyctatatttaagttatggacttagacattctaagaaaaatgaygtagctgaataccacccaccaaaataa

SEQ ID NO: 889 - DNA, 720 bp, Staphylococcus aureus
atgactgtagaatggttagcagaacaattaaaagaacataatattsaattaactgagactcaaaaacaacagtttcaaacatattatcgtttacttgttgaatggaatgaaaagatgaatttgacaagtattacagatgaacacgatgtatatttgaaacatttttatgattccattgcacctagtttttattttgattttaatcagcctataagtatatgtgatgtaggcgctggagctggttttccaagtattccgttaaaaataatgtttccgcagttaaaagtgacgattgttgattcattaaataagcgtattcaatttttaaacyatttagcgtcagaattacaattacaggatgtcagctttatacacgatagagcagaaacatttggtaagggtgtctacagggagtcttatgatgttgttactgcaagagcagtagctagattatccgtgttragtgaattgtgtttaccgctarttaaaaaaggtggacagtttgttgcattaaaatcttcaaaaggtgaagaagaattagaagaagcaaaatttgcaattagtgtgttaggtggtaaygttacagaaacacatacyttyraattgccagaagatgctggagagcgccagatgttcattattgataaaaaaagacagacgccgaaaaagtayccaagaaaaccagggacgcctaataagactcctttacttgaaaaataa

SEQ ID NO: 890 - DNA, 417 bp, Staphylococcus aureus
atgcgtttaaaagtattgttccatttcattgctgctattttcatatcattcatgttgctatggatgaccatgttgtttgacwtaataagcaatcaatcacatttaaaagctttrttattgaatttagattttctaattccttctgacaatacaccatwtaytctagaaataatatgtcacttactaattggtagcstcatttattttgtatttgtgttrctgtttcatacttctaaaaggctttactatctatgttatatccctttakttttcttatttatagcattgtatccctttttagtatttattgcgcaacgtccaatttttcaatttagtgtgacagaattaatcggttggattattacacatattttcttyatgtcattaatggcgttagtcatacctagaataaaataa

SEQ ID NO: 891 - DNA, 1878 bp, Staphylococcus aureus
gtggttcaagaatatgatgtaatcgttataggtgcgggacatgcaggtgtagaagcaggtttagcatctgcaagacgtggtgctaaaacattaatgctaacaataaatttagataatattgcatttatgccatgtaacccatctgtaggtggaccagctaaaggyatcgttgttcgtgaaattgatgctttaggtggacaaatggcaaaaacaatcgataaaacacacattcaaatgagaatgttaaatacwggtaaaggacctgctgtaagagcactaagagcgcaagcagataaagtactttatcaacaagaaatgaaacgcgtgattgaagatgaagaaaatttgcatataatgcaaggtatggtagacgaacttattatagaagataatgaagttaaaggtgtacgtacaaatattggtacagagtatttatctaaagcagtaattattacaacgggaacatttttacgtggtgaaatcattttaggtaatatgaagtattcaagtggaccaaatcaccaattaccatcaatcacattatcagacaatttaagagaacttggttttgatattgttcgttttaaaacaggtacaccaccgcgtgtaaattcaaaaacaattgactattcgaagactgaaatacaaccaggtgacgatgtrggtcgtgcattcagctttgaaacaacagaatatatattagatcaattgccatgttggctaacgtatactaatgctgaaacacacaaagttatcgatgataatttacatctatctgcaatgtattcagggatgattaaaggaaccgggccacgttattgcccttcaattgaagataaatttgttcgatttaatgataagccgcgacatcaacttttcttagagcctgaaggtcgtaatacaaatgaagtatatgtgcaaggattgtctacaagtcttcctgaacatgtgcaacgtcaaatgttagagacgataccaggtcttgaaaaagcagatatgatgcgtgccggctacgcaattgaatatgatgcgattgtgccaacgcagttatggcctacacttgaaacgaaaatgattaaaaacytatayactgcaggtcaaattaatggtacatctggttatgaagaagcagcaggacaaggattgatggcaggtattaacgctgcaggtaaagtgttaaacacaggcgaaaagatattaagtcgttcagatgcatatatwggtgtmttaatcgatgatcttgtaactaaaggtactaatgaaccttatcgtttactaacatcacgtgcagaatatcgtttgttactacgtcatgataatgctgatttgagattgacggatatgggatatgaacttggtatgatttctgaagaamgatatgcacgttttaatgaaaaacgtcagcaaattgatgcggaaattaagcgtttatcagatattcgtattaaaccaaacgaacatacgcaagcgattatygaacaacatggtggttctcgcttaaaagatggtattttagctatcgatttattacgcagacctgaaatgacttacgatataattttagaamttttagaagaagaacatcaattgaatgcagatgttgaagaacaagtagaaatacaaacaaaatatgaaggttatatcaataaatcactacaacaagttgagaaagttaarcgtatggaagagaagaaaattccagaagacttagattatagtaagattgatagtttggcgactgaagcgcgagaaaaattatcagaagtaaaacctttaaatattgcacaagcttctagaatatcaggggtaaatccagcagacatatctatattattgatttacttagaacaaggtaaactccaaagggtgagtgactaa

SEQ ID NO: 892 - DNA, 891 bp, Staphylococcus aureus
atgaataaagagcaattagaaaaaatgaaaaatggaaaaggctttattgccgcattagaccaaagtggtggtagtacaccaaaagcacttaaagaatatggtgtaaacgaagatcaatatagcaatgaagacgaaatgttccaacttgttcacgatatgcgtacacgtgtggtaacttcaccttcattctcaccagataaaattttrggtgctattcttttcgaacaaacaatggatcgcgaagtagaargcaaatacactgcagattacttagctgayaaaggtgttgttccgttcttaaaagtagacaaaggtcttgctgaagagcaaaatggtgttcaattaatgaaaccaatcgacaacttagayaryttattagaycgtgcaaacgarcgtcacatttttggtacaaaaatgcgttctaayattttagaattaaatgarcaaggtatcaaagacgttgttgaacaacaatttgaagtygctaaacaaattattgctaaaggkttagtkccaattatcgaaccagaagttaatattaaygcaaaagayaaagctgaaattgaaaaagtattaaaagctgarcttaaaaaaggtttagayarcttaaatgctgatcaattagtwatgttraaattaacaattcctactgaascwaacttatacaaagasttagctgarcatccwaaygttgttcgtrtcgttgtattatcaggtggttacagcagagaaaaagcwaatgaattacttaaagataacgmtgaacttatcgcaagyttctcacgygcattagctagtgatttaagagctgrwcaatctaaagaagaattcgataaagcwttaggtgaygctgtagaatcaatctacgacgcatctgtaaacaaaaactaa

SEQ ID NO: 893 - DNA, 1380 bp, Staphylococcus aureus
atggatttagatacaattacgagtatttcaacaccaatgggtgaaggggcaattggaattgttcgattgtctggaccgcaagccgttgaaattgctgacaaattatataaaggaaaacatcttttaaatgatgttccatcacatacgattaattacggtcatattattgatccagagtctaaagaagtgrttgaagaagttatggtgtctgtgttaagagcrccaaaaacatttacacgcgaagatattatagaaattaattgtcatggtggtattttaacgattaatagagtgctggaacttactatgacatatggcgctagaatggctgarccaggtgaatttacaaaacgtgcctttttraatggtcgtattgatttatctcaagctgargcagttatggactttattcgctcgaaracagatagagcttctaaagttgcgatgaatcaaattgaaggtcgtctaagtgacttaatcaaaaaacaacgtcaatctatattagagatactcgctcaagtggaagtgaatattgattatcctgaatacgatgatgttgaagatgcgactactgaatttcttttagagcagtctaaagaaatcaaacaggaaattaatcgtttattagataccggtgcgcagggyaaaattatgcgtgaaggtttatctacagttattgttggtaaaccaaaygtaggtaaatcatcgatgttaaataatttaatacaagataataaagcgattgtaactgaggtagcaggtackacwagagatgtcttagaagagtacgtcaatgttcgtrgcgtgccattaagattagttgatactgctggtatacgygagacagaagatatagtagagaagattggtgttgaacgctctagaaaggctcttagccaagcrgacttaattttatttgtattaaacaataacgaagcattgactcaagaagattacacattatatgaagtggttaaaaatgaagatgtaatcgtaattgttaataaaatggatttagagcaaaayatagatattaatgaagttaaagatatgataggygatacgccattaattcaaacttcaatgttaaaacaagaaggtattgatgaattagaaatacaaattcgagatttgttctttggtggagaagtacaaaatcaagatatgacttatgtttctaattcaagacatatttcattattaaaacaagcaagacaaacgatacaagatgcgattgatgcagcagaatctggtgtgcctatggatatggtacaaatygatttaactagaayttgggaaatattaggagaaattattggtgagactgcaagtgatgaactcatcgatcagttattcagtcaattctgcttaggtaaatag

SEQ ID NO: 894 - DNA, 354 bp, Staphylococcus aureus
atgttattggaaaaagcttaccgaattaaaaagaatgcagattttcagagaatatataaaaaaggtcattctgtagccaacagacaatttgttgtatacacttgtaataataaagaaatagaccattttcgcttaggtattagtgtttctaaaaaactaggtaatgcagtgttaagaaacaagattaaaagagcaatacgtgaaaatttcaaagtacataagtcgcatatattggccaaagatattattgtaatagcaagacagccagctaaagatatgacsactttacaaatacagaatagtcttgagcacgtacttaaaattgccaaagtttttaataaaaagattaagtaa

SEQ ID NO: 895 - DNA, 564 bp, Staphylococcus aureus
atgactcgttctcagaacaaacagcaacaattagaacaagcaaaagatattgtaattaattcaattggacagacaatggatttgtatggcactaatagaagtgtaggaaacttatatggcacwatggtgtttgaaggcagtatgacgcttgatgaaatgcgtcatcaattgcaaatgagcaaaccaagtatgagtgctggcgttaagaaattgcaggaatttgatattgttaaacaacaatttacgagaggaagccgcaaacaacattttatcgccgagaaagactttttcatctttttccgaaactttttcactaaaaaattycagcgtgaaattgayatcaatgtcgaagcagtaaaagatgctcaagctattatcaatycattacttgaaagcagtgatttaactgaagctgaaacacaagaggcacamaaaattaaagctcagcttgatcatacacatgtttattacgaatggttagaacagttaaccgaagcgattgaaagcggtgaaattttyaaatatttcccaattccagaacagycttctgattctraaaattaa

SEQ ID NO: 896 - DNA, 138 bp, Staphylococcus aureus
atggtaaaacgtacttatcaaccaaataaacgtaaacatagtaaagttcatggtttcagaaaacgcatgagyacaaaaaatggccgtaaagttttagcgcgccgtcgtcgtaaaggccgtaaagttttatctgcataa

SEQ ID NO: 897 - DNA, 153 bp, Staphylococcus aureus
atgaatgatagcaatcaaggtttacaagccaatccacaatatacaattcactatttatcgcaagaaatcacaagactaacacaagaaaatgcaatgttaaaagcatatatacaagaacaaaatgaaaaaagcaaaagtgctgaggaagagtaa

SEQ ID NO: 898 - DNA, 1272 bp, Staphylococcus aureus
atgtctaaaattttaaaatrtatcacgttagccgtggtaatgttattaatcgtaactgcatgtggccctaatcgttcgaaagaagatattgataaagcattgaataaagataattctaaagacaagcctaaccaacttacgatgtgggtggatggcgacaagcaaatggcgttttataaaaaaattacggatcaatatactaaaaaaactggcatmaaagtaaagcttgtaaatattggtcaaaatgatcaactagaaaatatttckctagacgctcctgcwggaaaaggtccagatatctttttcttagcacatgataatactggaagtgcctatctacaaggcttagctgctgaaatcaaattatcaaaagatgagttgaaaggyttcaataagcaagcacttaaagcgatgaattatgacaataagcaaytagcattgccagctatcgtwgaaacaaccgcacttttytataataaaaaattagtgaaaaatgcaccgcaaacgttagaagaagttgaagctaatgctgccaarctaactgatagtaaaaagaaacaatacggtatgytatttgatgctaaaaatttctattttaattatccgtttttattcggcaatgatgattatattttcaagaaaaatggcagtgaatatgatattcatcagctaggactaaattcaaaacatgtcgtcaaraatgctgaacgattacaaaaatggtacgacaaagggtatcttcctaaggcagcaacacatgatgtcatgattggtctttttaaagaaggaaaagtaggacaatttgtcactggaccrtggaacattaatgaatatcaagaaacgtttggtaaagatttaggagtaacaacattrcctacagatggtggcaaacctatgaaaccatttctmggtgtacgtggttggtatttatctgaatatagtaaacataagtattgggctaaagatttaatgytgtatatcactagtaaagatacattacaaaaatatacagatgaaatgagcgaaattactggacgtgttgacgtraaatcatctaatccaaatttaaaagtgtttgaaaagcaagcacgtcatgctgaaccgatgcctaatattcctgaaatgcgacaagtttgggaaccgatgggcaatgcaagcatatttatytcaaatggtaagaatcctaaacaagcgttagatgaggcgacgaatgatataacgcaaaatattaagattcttcatccrtcacaaaatgataagaaaggagattag

SEQ ID NO: 899 - DNA, 273 bp, Staphylococcus aureus
atgacaaaagaaagaagaacatttagttcagagtttaagttacaaatggttagattatataaaaatggtaagcttaagaatgaaattatacgaaagtatgatttaaaaccctcaattatctcaaattcgataaaacaacaccaaaatactggacccttcaatcatcaagataatttaaaaagtgatgaaaaagagttaataaaattacgcaaagaagttcaacatttaaaaatggaacatgatgttttaaagcaaattttaaagttgatttag

SEQ ID NO: 900 - DNA, 1425 bp, Staphylococcus aureus
atgttatcagttaaaaaagccacaaaatttgcagttgctaaccttattatcgtgtcaacrgttttyagytctgtcacacctgcaattgcgcaatccgataaaagttctaaagatgaaagtttcgcggttggtaatactaaaaatccaaaaaatgttatctttttagttggcgatggcatgggtccatcatttaacacagcttatcgttattataaaaatgatyckcatgcyaaagaaatgacycctactgcttttgattcatatttaaaaggcacaaatcgtacatattcaaatgacccaaaacagaatattactgattctgcagctggcggaacagcctttagttctggycataagacatataatggtgccatcggtgttgacagtaacaagcagaaagtaaagacrgtgcttgaacgtgcaaaagaaaaaggtaagtcgactggtcttgtttcaacagctgaattaacagatgcaacaccagcagcatatgctgcacacgtgacttctagagatgataaaaacgaaatcgctaaacaattttataaagataaaatcaacggaaagcataaagttgatgttttattaggcggyggcgctaaatatttcggtaaaagtaatggcaatttagataaaaaattcaaaaawgatggttacgaccttgccacraacagtaaggakttatcaaaatctgataaagataaagtkcttggtttgtttgcagataaaaatatgccacttgcaatagatgcttctaaagaygaaccatcattagctgatatgcaacaaagtgcacttagtaagcttgagcgyaataaaaaaggwttctttttaatggtcgaaggtgcttctatagataaatcagcgcattcyaacgatattacaggmgtyatgtctgaaatggaaggttttgaaaaagcattcgatgacgccattcaatatgctaagaaacataaagatacacttgtcgttgcaacagcagatcactctactggtggtctaacaattggtaaagataaaggatacgaatggaatcctcaaccgattaaatckatgaaacactctggatcatatatgacagaaaaaatggctaaaggtgaagaccctgaaaaagttattaatgaaggttatggmtttgaattttcacaagatgatatgaaaaargttaaaaaagagaataaaaagytrmaaaraytacttaaaaaagaaaaagaygaaaaatcygcarawgtagaaamrcaaacaaaagccytacaacacgcwattcagaagccagtaaatgataaatcttatacaggrtggacttccgatggacatacaggcgargatgttaatacytacgcttayggacctagatcagaatcatttagtggtaatatcgaaaatacagaaagcgcaaaaataatatttgatatattcaagtaa

SEQ ID NO: 901 - DNA, 474 bp, Staphylococcus aureus
atggaggcgttatatttgaaaaaacttcttattaccatcgtaattatcgtattaatcggagcacttgggttcgcaatttatgctgcaataaatcattctacatcatcaagtaataaccaagaacaagaaaataaakctacgcataaaaaracagaaaccgaagaaaatgatcaacaagatgatagtgcagacaaarcagataaaaatcaaaataatggcaataacgwtactaatgacaatcaaccatcttcacmgtcaaatgttcctaacaaccattcaacagyaccatcgaatacgcaaccagctcagccaaamgactcaaattcaaataaaaataatactcacgrtggtggyagtcaatcgtcaacaaacaaccaaaataatcaacaacagaacacaccacctgctaataaatcaaataataccaatacgycttctaaacaaacacctcaagcacaatcacctaaaaattaa

SEQ ID NO: 902 - DNA, 1875 bp, Staphylococcus aureus
atgcttgatagacacttaaaactactccagttttttattaaaaayccatcaaagcacattagttctaatgaaattgctraacatgtcaatgtttcaaaccgcacagttcgcaatgatatycatgttatcaatagcaattttatggatgatatcatcgtwagtattaaatctaaaggatatcaattaaatacatckcagtataccttagaaacgataactgaacgttacacgcatattcaatcatataaagaaaaactattattatctatggcgtatcaactgctaatgcacaataaatcrcagacattgcaacaactagagcaagattatctattatctaaaactgtgctcaacgactatttcgttcgaattcaacaatggtgtcaaaaatttaatatcgytttaacaatyaagaaaaaacaaggtattgtggtcgatggaacagataatgatatcactaatgccatcatccatttaaatcaattatcatcagggcatgtacatgttgaagacctaattttaaatgaattacctgattcacaccaaaggatgatttcgcatattatacaagagacacttcaacaacatagtattgaaacaactgatattcaaatacaacagcttttaattcatctcattttaatcattaaacgtaagcaatctttaagtgagctagacacgttaaaccaygatkcaaaattgatatctcaatcttgcattaagcaaatcaacgaaagattaggttatgacttgaaygaaaaagtaatcaatatgttttcattctttattgcttatcattttaataaactcgatattggyatagaacgtatatttatacaaagttatattgatcgcttaatcgaattgatgcagcaacgtattcatrtacctttcaatgaagattcgattttacaacaaaatttatataatcattttagtaaagcatatttacgtatcactcaaaacatttatttaaacaatcctttagttatagagattaaaaaactytatccctttgtgttyaacacactttttgaagcgattgataaattagcaattgatactgatatagagatgagcgaagatgaaattgcmtttttaacaattcattttcaagctgccatcgagcgtcgtaccaaaacacaattaaatgtagtcattgcttgttattatggtctaggtgtgtcgaattttttagaaactaaaataaataacttatccgaagagttgtcagtrataaatacgattaaactagaaartataacacactatcactttgacaatgtwgatttaytaatwacracycaygatatyccwaarcaaackytamamatrctycctaagcacctdwcractatcaaggttgcaccattattttctgargatgaycgtcacaaaatcakacwcgttgtgaagcaaaagcaaaatccrgttcaagcacatcatcatatggacactgtyaatttccttgtcgtaaatactgaacaaaaaycacgrcatactgtgcaaatttttgaagaagctcaaaaaatattacaagcacatcatgcgattgtagaaggatatatcgaatcagctttagagcgtgagaaatcatcttctacatacataggtaattttatggcgattcctcatggagatcctgaaaaagttttacaatcacatgtgcttatttttcgcacaaaagatgtttttccwtggcgacaacacgatgtcaaactygtctttttcttagcratttcrcawaaagacamagcttttacaaaacaaatgatgcaattaattgctaacttggatgatgattcagtgaaccatttatgtagtttagatratcatagtttaaagcaacagttatttgaatacttacaagaataa

SEQ ID NO: 903 - DNA, 1953 bp, Staphylococcus aureus
atgaaaattgtagctattacctcatgcccaaatggcattgcacatacatatatggctcaagaaaarcttgagcaggtagcaaaagaaatgggtgtggatattaaagtagagacacagggcggtgttggtgctgaaaatgttttaactacgcaagacatcgaagaagctgacggtgtcataattgcagctgataaacaagttgatctrtcccgatttgttggtaaacggttgattaatgaaaatgttcgcgaagggattcataatccgagaggtctaattcaacgtatcattaatcaagatgcgcctatttatcaatctgaaacaaattatcattcgaaagatcgcggtaagtctaaaartggtattcaaatggtgtatcaacatttaatgaacggtgtatcgtttatggttccttttatcgtagttggtggactccttatcgccatcgcgctgactctaggcggtgaaacgacatcaaaaggattagtcatmccrgatgattcattttggaaatccattgaaaacattggtagtttagcctttaaatttatggtyccaatactagctggatatatcgctgttagtatcgctgacaagcccggtcttgttcctggtatgattggcggcgctatcgctgctgacggtagtttttatggcagtgatgcaggcgcaggatttttaggtggtattgttgctggtttcttagcaggttatatcgcaaagtggattaaagatattaaagttccaaaagcratggcaccaattatgcctatcattattattcccattatttcatcggtcgttgtaggattgatatttatatttttaatcggtgcaccaatttctaatatttttgaggcattaacaacctggttaaaaagtatgcaaggtgctaatattattatacttgcgatgatwataggtgcgatgatygccttcgatatgggcggtccagtaaacaargtagcatttttatttggctcagcacttattgctgaaggtaattacgccgttatgggtatggtcgcagttgctgtatgtacaccaccaatcggtytwggtttagcaacgtttgttcaaaagtataaattcaatcattccgaaagagaaatgggtaaggcttccttcactatgggactrtttggtattactgaaggtgctattcctttcgcagcycaagayccaytrcgcattatacctgcwaacatsattggwgcratgattgcatcagtcattgcagccatyggtggtgtyggmgatagagtsgcacatggaggtccaatmgtggctgtattaggtggtattgatcatrtattatggtttatctttgcagtgatagtaggtagtcttgtcacaatgaytactgtactattattaaaacgymryacaccagttatagcagtagatgcaccagcgcaacayacgcaacttcatgatacagatatwacacaacatgatacagaggttgacaatgtagataamaccgcgaaacattcasatctcaataaacmttctcatgtktttgatcaacaaactatsatwattrctgatcayracatgtctcgaaacgaagcaatygataygttgattcatmaacttaaartktgccgttatgtagagcacacatcgcatttaaaaaatgcaatmctagaacgtgaaatggagtctacgacagctattggcatgaacgtggccattccacatgcaaagtctgatgttgtaaaacaaccgattgtagctgttatgaaaaataatcatggtgttaaatgggamagtctagatggtagtctacctcaattgatwttcttaattgccgtaccaaacaacagtcaggatacacatttaaaaatacttcagcgcttatctaaagcgttaatgaatgatgagacrcgccaatcactaattaatgcaaacagtactacagaaatttataacttattaatgaaaatatag

SEQ ID NO: 904 - DNA, 102 bp, Staphylococcus aureus
gtgagaagtaaaaaaacaattgatatgactaggagagaattagaataccttaaaaaggaattgaaacaacgcgatgaaaaaacgcccaactccaatcacaaa

SEQ ID NO: 905 - DNA, 129 bp, Staphylococcus aureus
atggggaatttaggctatggcttgaaaattggattaagcaaattatcagataaaagatttatgaaaatagctgaaaatccagaattaaatgtcctaccattggaatatatgggcgcatgtattttatac

SEQ ID NO: 906 - DNA, 939 bp, Staphylococcus aureus
atggcattatttttacaacccgtttttaaagacagaatttggggcggtcatgcattaaaagcatttaactatgatatccctaatgaracaactggtgaatgctgggcaatttctgcacatccaaatggtcctaatacaattatcaatggtccatacaaggatatgaccctagatcaactttggtcacaacatcgtgaattattcgataatgattcacgagatagtttccctctgctaactaaagtattagatgccaatgataaattatctgttcaagttcayccrgatgatgaytacgctttaaaacacgaaggcgaactaggtaaaacagaatgttggtatattttagatgcagccccaggtgctgaaattatatatggcgtacatgcacataataaacaracgttaaymgacatgattgataatcatgaatttgacagtcttttcaaacgtatacctgttaagyccggtgacttttattatgtkcctgctggcactgtccatgccattggttcgggtattttaattttagagacacaacaatcmtccgatacgacataccgtatttatgactatgatagacgagatcaaaatggtcaattgcgtgatttgcacttagagcaaagtaaagatgtgattgaattaggcaatcatgaaccaaatactactcctataacaactcacatcgacacacacactgtaactcaatttgtagataatcaatattttgcagtatataaatgggatattcatggagatttaaaattcaataaaccacatgcttattgcttagttacwattatcgatggtactggyactttarcagtaaacgataagcactatgacatccaaaaaggttctagctttattttaactacggaagaygaggatattcactttgtcggtaatattagtgctatagtaagtcatcctggataa

SEQ ID NO: 907 - DNA, 1860 bp, Staphylococcus aureus
atgcctaaaaataaaattttaatttatttgctatcaactacgctcgtattacctactttagtttcacctaccgcttatgctgayacacctcaaaaagatactacagctaagacaacatctcatgattcmaaaaaatctamtgaygatgaaacttctaaggatactacaagtaaagataytgataaagcagacaamaataatacwagtaaccaagacaataacgacaaaaaakttaaaactatagacgacagcacttcagactctaacaatatcattgattttatttataagaatttaccacaaaccaatataaaccaattgctaaccaaaaataaatacgatgataattactcattaacaactttaatccaaaacytattcaatttaaattcggatatttctgattacgaacaacctcgtaatggygaaaagtcaacaaatgattcgaataaaaacagtgayaatagcatcaaaaatgayackgatacgcaatcatctaaacaagataaagcagacaatcaaaaagcacctaaatcaaacaatacaaaaccaagtacatctaataagcaaccaaattcgccaaagccaacacaaccwaatcaatcaaatagtcaaccagcaagtgacgataaagyaaatcaaaaatcttcatcgaaagataatcaatcaatgtcagattcggctttagaytctattttggatcaatacagtgaagatgcaaagaaaacacaaaaagattaygcatctcaatctaaaaaagacaaaaatgaaaaatctaatacaaagaatccacagttaccaacacaagatgaattgaaacataaatctaaacctgctcaatcattcaataacgatgttaatcaaaaggatacacgtgcaacatcaytattcgaaacagatcctagtatatctaacaatgatgatagyggacaatttaacgttgttgactcaaaagatacacgtcaatttgtcaaatcaattgctaaagatgcacaycgcattggtcaagataacgatatttatgcgtctgtcatgattgcccaagcaatcttagaatctgactcaggtcgtagtgctttagctaagtcaccaaaccataatttattcggtatcaaaggtgcttttgaagggaattctgttccttttaacacattagaagctgatggtaatmaattgtatagtattaatgctggattccgaaaatatccaagcacgaaagaatcactaaaagattactctgaccttattaaaaatggtattgatggcaatcgaacaatttataaaccaacatggaaatcggaagccgattcttataaagatgcaacatcacacttatctaaaacatatgctacagatccaaactatgctaagaaattaaacagtattattaaacactatcaattaactcagtttgacgatgaacgyatgccagatttagataaatatgaacgttctatcaaggattatgatgattcatcagatgaattcaaacctttccgygaggtatctgatartatgccatatccacatggycaatgtacttggtacgtatataaccgtatgaaacaatttggtacatctatctcaggtgatttaggtgatgcacataattggaataatcgagctcaataccgtgattatcaagtaagtcatacaccaaaacgtcatgctgctgttgtatttgaggctggacaatttggtgcagatcaacattacggtcatgtagcatttgttgaaaaagttaacagtgatggttctatcgttatttcagaatccaatgttaaaggattaggtatcatttctcatagaactatcaaygcagctgccgctgaagaattatcatatattacaggtaaataa

SEQ ID NO: 908 - DNA, 360 bp, Staphylococcus aureus
atgattttrcgttacgyracvaatttaaaacttgcgaaagagctataccaagccagtaaacctaaattgcaagaagataagggtatgattgaactgtttgaacatacttttggyttgcaaaaagaacttgtaaaatacgtcggcattgcagaagcaactactgctgctttatactcagctagctttatcaataaaaacatttctcgccttgcwtcrctatcaacrataggyattttaagtgyagctgcttacaaacatttcgaagctggccaaggtaaaaaaggtgcacaacatgcattaratttattaggtcttgctactttaagtttactagatacattttcttgtaataaaaaatag

SEQ ID NO: 909 - DNA, 1239 bp, Staphylococcus aureus
ttgcaattttttaactttttgcttttttatcctgtatttatgtctatttactggattgtcggttcaatttatttctatttyacyagagaaattagatattcattgaacaagaagcctgacataaatgtggatgaattagaaggcattacatttttacttgcctgttataacgaaagtgamacgattgaagatacgttgtctaatgttcttgcactcaaatacgagaaraaagaaattattatcattaatgatggaagttcagataatacagcagaactcatctataaaatyaaagaaaataatgactttattttcgtcgatttacaagaaaacagaggtaaagccaaygcactcaatcaaggcattaaacaggcttcatatgattatgtaatgtgcttggatgcagatactatcgttgatcaagatgcaccatattatatgattgaraatttcaaacatgatccaaaacttggtgcrgttacaggtaatcctagaattcgaaataagagttctattttaggtaaaattcaaacgatagaatatgcaagtttaattggctgtattaagcgaagtcagacacttgctggcgcagtcaatactatttcgggtgtcttcactctatttaaaaaaagtgcagttgtcgacgttggctactgggatactgatatgattaccgaagatattgcagtttcttggaaattgcatttacgtggatatcgtattaagtatgaaccgcttgccatgtgttggatgttggttccagaaacattgggaggtctttggaagcaacgcgtgagatgggctcaagggggacacgaagtattactacgagacttttttagcacaatgaaaacgaaaaggtttcctttatatattttgatgtttgagcaaatcatctcrattttatgggtatatatagtgcttctatatttaggctatttgttcataacagcaaacttcttagactatacatttatgacatatagtttttcaatatttctactatcatcatttactatgacttttataaacgttattcaatttacagtcgcactctttattgatagtcgctacgagaaaaagaatatggctggactcatatttgtaagttggtatccgacagtatactggattattaacgcagcagtagttcttgtcgcatttccaaaagcattaaaacgtaagaraggtggttacgcaacatggtcaagcccagacagagggaatacccaacgctaa

SEQ ID NO: 910 - DNA, 1269 bp, Staphylococcus aureus
atgacgaaacgtaaccctaaattagcggcattattatctgttatacctggtttgggacagttttataataaaagacccattaaaggkacgatattttttatctttttcatcagttttatttctgtwttttatagctttttaaatattggtttttggggattgttcacattagggacagtacctaagttagacgattctcgtgtcttacttgcacaaggtattatttctatcttactcgttgctttygcaatcatgctatatrtcattaatattttagatgcatatcgtaatgctgaacgatttaatcgcaatgaggaaataaaggatccgaaggcrcgtatggtkgcaacatgggacaagacgttcccatacttactaatctcaccaggtacattcttattgatatttgtagttgtatttccattaatatttatgtttggagtagcatttacaaaytacaatttatacaacgcgcctccgagacacacattagaatgggttggtttagataactttaaaacgttattcacaattggcgtttggcgyaaaacatttttcagtgttattacttggacattagtatggacgcttgttgcaacgacacttcaaattgcattagggctgtttttggcaattattgtaaatcaccctgtcgtcaaaggtaagaaatttatccgyactgtgttaatcctaccttgggctgtaccatcatttgtgacaattttaatatttgtagcgttatttaatgatgaatttggtgcgataaataatgatatwttgcaacctttattaggtgtwgcaccagcatggttaagtgatccrttttggkcaaaagtggcattaatyggyattcaagtatggcttggwttcccattygtctttgcactgttcactggwgtactgcaaagtatttcatcagattggtacgaagcagcagatatggatggtgcgtctagttggcaaaagttyagaaacatcacattcccgcatgtcatttacgccacagcgccattgttaattatgcaatatgcaggtaatttcaataattttaatcttatttatctatttaataaaggyggtccaccagtgtcagggcagaatgctggtagtacagatatcttgatatcttgggtgtataatctgacatttgagtttaacaacttyaacatgggtgcagttgtgtcattaattattggatttattgttgctattgtcgcatttattcaattcagacgtacaagtacgtttaaagatgagggaggtttataa

SEQ ID NO: 911 - DNA, 306 bp, Staphylococcus aureus
atggtcaagcccagacagagggaatacccaacgctaaaatcatcgctaaayattrtaagagaaacagcacttatcgctatatcktgtgtcttttggatatattgtttagttgttctactcgtttatattggtactatatttgaaattcatgacgaaagtatcaatacaatacgtgttgctttaaacattgaaaatactgaaattttagatatatttgaaactatgggcattttcgcgattatcatttttgtwttttttacaattagcatattgattcaaaaatggcagaraggragagaatcgtga

SEQ ID NO: 912 - DNA, 900 bp, Staphylococcus aureus
atggcagaraggaagagaatcgtgaagtatagaaaattwataattttagtgttgagtatcttgatcatattgcctgtaagcacactggatggtcatcatattgcaaatgcagatgacgatycacctaaaaaactgaaatataaagaaaatagtgctctggcattaaattatcaccgtgtaagaaaagcgaattttctgaataatttyatttacttcttttctagtagtaaagaaattaaaaattatagtgttagycaatcacaatttgaatctcaaataaaatggctaaaatcacatgatgctaaatttttaacyttgaaagaatttttatattacaagaaaaaaggtaagtttccaaaacgaagtgwrtggrttaactttgatgatatggatgaaactatttatgaaaatgcttatccaatcttaaaaaaatataaaataccggcractgggtttattatcacaggtcatgttggggrrgaaaactttcacaacctcgatatgattagtaaaaaagaactaaaagaaatgtataaaactgggttatgggaatttgaaacacatacccacgatwtgcataacttatctaaaaataataagtcaaaattaatgaaagcttctgaagctacaatcataaaagatttaaacaaaagtgaaaaatatctaactaaaaactttaaaaagtcgcagaaaactatagcctatccttatggcttgatgaatgacgataaattaccggtaatcaaaaaagctgggttaaaatacggtttttcattagaggaaaaagcagtcactccgaactccaatgattattacatccctagaatattaattagtgatgatgcttttgagcatttaattaagagatgggacggattccatgaaaaagatkagacttga

SEQ ID NO: 913 - DNA, 1053 bp, Staphylococcus aureus
atgaaaaagatkagacttgarctcgtatatttacgtgcyattatatgtgcaattattattrtyacacatttaytwacacaaattactttaaaacatgaraatatggarggwggrtcyttagtrytacarttytayattcgtaatattgtsatttttggtacaccttgctttattatcttgtcacagttactgacaaccttgaattaccaaaaagtcacctatagatacttaactacacgcgtaaaatatataytkattccttacatattaatgggwttgttttacagttatagtgaatcattattaacwgaywcaagtttcaataaacaattyattgaaaatgtcctattaggtcaatggtatggctattttatcgttgttatcatgcaattctttattttgagttatatcatttttaaaattaactataacctattcaacagtaaaatattattattgttatcttttattttacagcaatcatttttatattactttacgaacaacacagcgtttcacgataccgtgctacactattatccmttaagtgaaaayactataatattcggatggattttttatttcttyttaggtgcatatatgggttataactacgaacgtgtwttaaatttcttagaacgttatttagttattatgattgtattagctgtagctacttattttgtgtttattgcgttagcaaatggagactattggaacgttaccagcttttcatattcattaacaccatataatagtattatgtttattgttatcttgggtatttgcacgcattttaaaacaatrttatttaatacgattcaaatgattagtgctttctcattctttatttatttattacatccaatcattctagactcattgtttgcatatacaaatatatttgaggataatacaatggtctttctagcgatatcactactattcattttaggrttatgtataggtgtcggyatgatattgcgtgaattctatatctttaggtttattattggaaaacaaccatataaattgaacattaatgcttattaa

SEQ ID NO: 914 - DNA, 96 bp, Staphylococcus aureus
atgcagcaaaattttaaagcattttattttgaacatattaaaatggagcgtatcataatggaatgtaatgtttatatcgtatgcattacggataaa

SEQ ID NO: 915 - DNA, 957 bp, Staphylococcus aureus
atgaactatcaagttcttttatattataaatataygacgattgatgaccctgaacagtttgctcaggatcacttagcsttttgyaaagcacaccatttaaaaggtagaattcttgtttctacagaaggtattaacggcacattatctggtacaaaagaagaaaccgaacaatatatggcacatatgcatgccgatgaacgattcaaagatatggtgtttaaaattgatgaagctgaaggacatgcttttaagaaaatgcatgtacgtcctcgaaaagaratygttgctttagatttagaagawgacgtcgatccaagacacacaactggccaatatttatcacctgtagaatttagaaaagctcttgaagatgatgacacagtcattattgatgcacgtaatgattatgaatttgatttaggtcatttccgaggtgcaattcgyccarayatcacrcgytttagagatttrcctgactggattaaagagaataaagcgttatttrcagataaaaaagtggttacgtactgtacwggtggmattcgatgygaaaaattttctggmtggytwttaaaagaaggtttcgaagatgtagcdcarcttcayggcggtatwgctacatatggtaaagaycctgaaacaaaargtsaatattgggacggtaaaatgtaygtatttgatgaycgyatcagtgttratatcaaccaagttgaaaaaacrattattggtaaggattggtttgatggcaaaccatgtgaacgttatattaattgcgctaacccagaatgtaataaacaaatattagtttctgaagaaaacgaarctaaatatttaggtgcatgctcttatgawtgtgctaaacatgagcgtaatcgttatgttcaagcaaataatattagtgrtaatgagtggcaacaacgtttaacaaactttgatgatttacatcaacatgcttag

SEQ ID NO: 916 - DNA, 639 bp, Staphylococcus aureus
atgcacattttagtaacagggttygcgccttttgacaatcaaratatyaatccytcwtgggaagctgtgactcaactagaaratattattggcacacatacaatcgataaattaaaactaccaacctcttttaagaaagtagatamtattataaataaaacgttggcatctaatcattatgatgttgtactagctataggacaagctggtggtagaaatgccattaccccagaacgtgtcgccattaatattgatgatgcacgtattccagataatgatgattttcaacctattgatcaagccattcayttagacggtgcgccassttatttttcaaatttaccagttaaagcaatgactcaaagtrttattaaycaaggacttcctggagcactttcaaatagygcaggtacrtwygtwtgtaatcacryrctttatcacttaggttatttacaagataagcattaccctcacctwcgattcggwtttattcatgtgccatayataccagagcargtcrttggtaaayccgatacaccatctatgccattagaamagatagttgcaggtttgactgcagcyattgaagctatttctratsaygakgatttacrymtagcyctrggcacaacgsaatag

SEQ ID NO: 917 - DNA, 465 bp, Staphylococcus aureus
atgactacaaaaacrgtatttgatgtcattgatatgggkttaggatatttagtaaatgtgtatgatrcttggaaagttgaaaagrtacttgatgattatcatragcctttttctaataccattcattggcaatttggkcatgtattaacaatttttgaatcrgccttagctgttrctggtaaagagaatattgatttaaatatmtatagacctttattcggaaatggttcgtctccagatgaatggaaggrygaagtaccgagtattgraavgattttagaargtctycaaacwttacctgaacgtgcacgaaawctaactgaagatgatttagcaattgaattgaaacarccaattgtyggttgtaataacttagaagagttattagtattaaatgccattcayatcccacttcatgctggtaaaattgaagaratgtctcgtatattaaaaaatttwaaataa

SEQ ID NO: 918 - DNA, 1419 bp, Staphylococcus aureus
atggaaaacacggttaaatatcgtaagtttatactccctatcgttgtaggtctcctwatttgggcacttacaccttttaaaccggatrctgtggatccaacagcatggtatatgttcgcaatattcgtcgcgacaatcattgcttgtattacacaaccgatgccaattggggcygtctctataattggatttacaatcatggtactcgttggcattgttgacatgaaaacggctgtcgctggttttggtaataatagcatttggttaattgctatggcmtttttcatttcragaggatttgtgaaaacaggtcttggtagacgkatcgcacttcatttcgtcaaattatttggtaaaaaaacattaggmttagcatattctatcgtcggtgtagatttaattctagcgcctgctacaccragtaataccgcgcgtgchggtggaatcatgttcccaattatcaaatcactttctgaatcatttggttcgaaaccgaaagacgratcakcacgyaaaatgggtgcatttctwgttttcacagaattccaaggtaayttaattactgcggctatgtttttaactgcaatggccggtaayccccttgcacaaaatttagcatctagcacatctaatgttcacattacatggatgaattggttyytagctgctttagttcctggacttrtttccttaattgttgtaccttttatyatttataaaatttatccaccaactgttaaagaaacaccaaatgctaaragttgggctgaaaatgaattagcgactatgggtaaaatcgctttagctgaaaaatttatgattggtatttttgtcrttgckytaacaytatggattgtcggaagtttcattcatattgatgcaactttaacggcctttattgcgytagcattgttattattgacaggygtcttaacatggcaagacattttaaacgaaacaggtgcttggaacacattagtatggttctcagtrttagtgttaatggccgaccaattraacaagcttggatttattccttggttaagtaaatccattgctacaagtcttggtggmttaagctggcctatagtmctggtcattttaatattgttctacttctattcacattacttatttgcaagttctacagcacatatcagtgckatgtatgcagcattactaggcgttgccatcgcagccggtgcaccaccattattcagtgcattaatgttaggtttcttyggtaacctattagcttcaacaacacactatagtagtggyccagcgccgattctmttctcttcaggttacgtgactcaaaaacgttggtggacaatgaacttratmttaggtttcgtctactttattatctggattggtttaggatcactttggatgaaagtaattggtatattttaa

SEQ ID NO: 919 - DNA, 204 bp, Staphylococcus aureus
atgaaatataaacattttgccattattactttaattacaggcatcgtcatgctcacggcaatgtactttgtaccatttggatatcataaaataccaatatttgcaggaatggcgattatttttacagtctattttagtaataaaaaatctattgatgaaacaaatatctttagtaagaaaaatcgcaataaaaataaacaataa

SEQ ID NO: 920 - DNA, 1053 bp, Staphylococcus aureus
atgattaaatatcatgttatgaaagaaggatatattttgactgtttttaaaaatgagcgcttaagctggttaccatacatagctattgtcattttgttacacgttattgggtttagttttttatggattgctggaaaagaccatcatatcttatttggtatggggattcttgcatayacattaggtttrcgtcatgcatttgatgcwgatcayatygcygcratagayaatacsgttcgyaaattattacarcaacgcaaagatccatctggtgtkggtttctayttttcaattggacattcatctgtygtatttttaatggctgtttttttagggrtatctgtaaaatgggctaaagatgaattaccrcatttccaagatattggtggaacgattggtacactagtwtcaggtttctttttagtgcttatcggtgtgttgaatctaattattttaatctctttaattaacttgttcgctaaattacgtcgtgaacacattgaagaagctgaagtcgatgyattacttgaatctagaggattkgtttctcgatttgtaggaccttatttcaarttaatcacgcgtagttggcacgtattgccacttggctttttatttggacttggttttgatacagctagtgaaattgcgttactcgctctttcttcaggcgcrtcacaacargccatttcrtttatcggaatcttatctttaccaattttattcgcatcaggtatgagtttrttggatacwttagatggtgttgtaatgaartatgcctataattgggcattcttcaatcctattcgcaaaatctattacaatataacgattactgcgatatcmgtcatrgcwgcattagtgattgggatgattgaattgctrcaaattcttgctgataagytagayttacayggtgcrttttgggcattyattrgttcratcgaatttgattatttaggctatattytagtygcwttatttttaattacttggcttatttcragtttaatttggaagtttggtcgcatagaacacaaatggtctarataa

SEQ ID NO: 921 - DNA, 111 bp, Staphylococcus aureus
atgtcaagacatcataatgatataaatgatttaaaaacatactttaactcagttatagattggatatcgagcatttttattaatgtagaaaaagaaatgcggggattagaa

SEQ ID NO: 922 - DNA, 141 bp, Staphylococcus aureus
ttgatttgtgaacatctcatcacacaacgtaaattaaattatcaaaaagaacattatttagaatcactgccatcctcttttgggaatagagaaaaggatgatattaatcagattacgatagataatttaaatgcgattgga

SEQ ID NO: 923 - DNA, 840 bp, Staphylococcus aureus
atgacaaagaagaaaaacatattaaaagcaatcggtatttacagttttatagcgatgatgtttgtcatcattttatatccactactgtggacatttggcatttcccttaatccaggtacgaacttgtatggtgccaaaatgataccagacaatgcaacatttaaaaattatgcattcttactattcgatgacagtagtcaatacctgacttggtataaaaatacgcttatcgtagcatctgcaaatgcactgtttagtgtgatatttgtcacgttaacagcatatgctttttctagatatcgctttgttggtcgtaaatacgggctgattacatttttgattttacaaatgttccctgtattaatggcaatggtcgcaatctatattttgctaaatacaattggwttattagattctttatttggactaacactkgtatatattggtggrtcwataccgatgaatgcctttttagtgaaaggttacttcgatacgattccaaaagaacttgatgaatctgccaaaattgatggtgcwggscatatgcgtattttcttacaaattatgcttccattagctaagccrattttagcagttgttgctttgttcaattttatgggrccatttatggactttatattacctaaaatactattaagaagtcctgaaaaattcacattagcagttggattgttcaactttattaatgataagtatgcaaataatttcacagtgtttgcagcaggggcaattatgattgcagtacctatagcaatcgtattcttgttcttgcaacgctayttagtatcaggtttaacaacaggtgcgacaaaaggttag

SEQ ID NO: 924 - DNA, 360 bp, Staphylococcus aureus
gtgaatatcatctcracaattttaatcatatttgtggcattagartttttctatattatgtaccttgaaacgattgctacaacttccaraaagacyagcgagacatttaatataagcgtcgataaattgaaagacaaaaatattaacstacttttgaagaaycaaggcgtatataayggtttaatcggarttttgctaatatacggtttrtttatcagcagtaatccaaaagaaatatgcrcagctattttagtgtatatcattggcgttgctatttatggtggcctttcaagcaatattagtatctttttcaaacaaggyacattgccagtattggcactyatatcaatgctttggtaa

SEQ ID NO: 925 - DNA, 165 bp, Staphylococcus aureus
ctgatagtattatatttagaagaggttcctaagtttatttctaatcttaaagagcgactgaactactcagttcatgtgagtacaggtaaaatgcctattattgccttagaaaaagaaaaagttcttacaatcactaccgaatgtgaatgtaagaaactcatataa

SEQ ID NO: 926 - DNA, 327 bp, Staphylococcus aureus
ttgaaggttaaacttagattaacctgtgtctattctgcatttagagcttatgtccttaagcatgttgtatttaatcgttattttatgaaaggttatcaacagatgtcgcctaaaggtacaacgagaatcgagacaaaaaccggtcatcaagcacagtttgactggaaagaaggcattaactttaaaacgaatgataatcaaatagtttcactaaatataggcgtgttactactttcttactcccgttttgtaatcatgaaagtgacaatgaataaatcgagtgatgttttatttaatttatttacacaagcgtttgagctaatgtga

SEQ ID NO: 927 - DNA, 747 bp, Staphylococcus aureus
atgaatcgaattgaaaaacatgccaaaaacacttttattattctgatgctcattatgttattttggatttttatgagttttattttccagaaattattatttccaccttcgaaaaataatttaactacatatgaagcattaaaatattatacacatttaaagggatattacggtttggatcatatatcaaaaggaatagcatacattgcctgtgtgttaattccattcaatttcttttttagattcaatgacatcaaaaaagataataactataataatattataagtacgttattcctattattatactttttagttaatggaatttcgttgattattcaaggattcwctgcagaatttacaattagtttaattagtgagtcaaatattcataataatcatgaatttgctgtgaacttatttagatatgtcatacaagaaggtggtatttcttttagtacatatctagtgtgtaacttttctataataatgtggttattcttttcgtgttctttattaaaagaacgaaaaccagttgtcagatgtttaccattaattatatcttgtttaaaattaatattaatcctactatttttactttcaatacttttggtcatatatcaaactcaatctgcacaaatcttatttatttttatagattttctaaattttgtcgcgttaattttagtttatttatgtactaatcctaataatagaggtattgataaaatagcatgtgttaaataa

SEQ ID NO: 928 - DNA, 759 bp, Staphylococcus aureus
atgacratattatcagtgcaacatgtttcaaaaacatacggtaaaaagcacacatttcaagcacttaaagatattaactttgacatacaaaaaggcgaattcgttgcgattatggggccttctggatcaggtaagacaaccttattaaatgtactaagttcaattgaccaaatttctagcggtagcgtgattgctaacggacaagagcttaataaacttaatcaaaaagcacttgccaaattccgyaaagaatcattaggtttcatcttccaagattacagtattctgccgacattaacygtyaaagaaaacattatgttacctttatctgttcaaaaaatgtcgaargcaacaatggaagaaaattayaaagcratyacdacagcattaggtatttatgacctaggaaataaataccctagcgaattatctggtggtcaacaacaaagaactgcagcagcgagagcatttgttcacaaaccacaaatcatatttgcagatgagccaacaggcgcactcgactcgaaaagtgcaaatgayytattacaacgtttggaagaaatgaataaatcgtttgatacmacwattgtcatggttacacatgatccggttgcagcaagttttgcagaacgtgtcatcatgctaaaagatggccaaattcatacacaactttatcaggaaggacgttctaaacaggccttttatraagacattgtacatcttcaatcagtattaggtggtgtctcaaatgacatttaa

SEQ ID NO: 929 - DNA, 1881 bp, Staphylococcus aureus
atgacatttaaccatatcgttttmaaaaayttacghcaaaacttaaaacattatgcaatgtatttattttcattattttttagcatcgtcttatatttcagttttacaaccttacagtttactaaaggtgtaaataatgacgactcgatggcyatcattaagaaaggtgctttagtcggatcaatatttttatttatcattattgtcatctttttaatgtatgccaatcatttattcgtraaacgycgtacacgtgaatttgcgctatttcagttgattggtttaacacgacaaaacattttgaaaatgttagcacttgaacaaatgatygtatttwtaatcacaggtgttgtcggtgtattatgtggcattgcaggtgcacaattattgctttccatwgtatctaaattgatgtcrttatcgattaacttatcgatacatttcgaacctatggcccttgttttaactattttmatgctaattattgcgtatrtactgattttatttmaaagyrstttatttytaaaaagacgyagtatcttatcaatgatgaaagaytcarttaaractgatgyyacaactgckaaagtwacrrytryagargtyatttcaggcgtattaggtattgctatgattgcactaggmtattatatggcgacagaaatgtttggwacrttyaaagcactaactatggctatgacatcaccgtttatcattttatttttaacggtwgtaggygcctatttattcttcagaagttccgtgtcactwatttttaaaacwttgaaaaaatcwaaaaatggacgcgtatctattacmgatgttgtattyacatcktctattatgtacmgaatgaagaaaaatgcsatgtctttaactatcattgcaattatttctgcagttacagtaactgtattgtgtttygcrgcattatctaaatcaaatacmgatcaaacccttacatctatggcaccmaatgawtttaacgtggtcgcywctcaagatgckmaacaatttgaawctaaactaagccaacaacawattacattttctaaaaatkmttaygaaactattactgtagataatgttaawgatcaggttattactttggaaaatggtagygattcaggtcgcacgaattcwatwttaagtgcaaatammaagktaacwggyaacaatgccatcattacaaatacaaaatcrctkcctaacrtkattaatatycatttaaacaawgatttagtagtaaaaggwacwaagaaygaractttycgtgttacacaagaagacaaagryarggtttatcctttaaatctaakcttyaaytcacctgtcrtygaagtaagtccwgaaaagtatcagcarttgaaaacacaaaataacgttcatactttttatggatatgatattaaacaaacatcacaaaagraaaaagctcaarcaattgcaaaacagtttggagacaaartcatcacktatgatgamatgaaaaaagaggtcgatgctactaacggtattctaatattygttacwtcatttttaggattagcatttttagtagcagctggatgtattatttatattaaacaaatggatgaaactgaggatgaactaagtaacttcagaatattaaaacgcataggctttacgcayacagatatgcttaarggattattaytaaaaattactttcaacttcggtttaccattattgattgctatattacatgcagtattcgccgcaatagcatttatgaaattgatgggtaatatwtccttcatgccggttattrtagtaatyrttgtatacacmctcatttacattryttttgctttaatygcttttrtacattcaaayaaattgattaagaaaaccatttaa

SEQ ID NO: 930 - DNA, 96 bp, Staphylococcus aureus
ttgatagccgtttgtaagttacccattgcgccatctaaactatttgcactttgtttaactgattcaacaccagctaagtttgtagcttatgaaatt

SEQ ID NO: 931 - DNA, 195 bp, Staphylococcus aureus
atgattggaatcagtttaattactaaagtaactgattgtaaaattccgcctgcttttgaacctaggaaatttatcaacacaatagataacgcagatgcgattgctattggtattaacgaacctatagataaatggaataaattaattagctgtgtcgcaaatacgatagacaatgctgctacgttagctggaaaa

SEQ ID NO: 932 - DNA, 156 bp, Staphylococcus aureus
gtgcaagttggggaggggccccaacaaagagaaattggattcccaatttctacagacaatgcaagttggggtgggacgacgaaatatattttgcgaaaatatcatttctgtcccactccctatgcagctatccacttcatatgtatggcgcatact

SEQ ID NO: 933 - DNA, 537 bp, Staphylococcus aureus
gtgctaaactcaatatgtatttcctaccaaagaaaacataaggagtttggacatcttgaaggagatactattgttggtcgtcgtcatggtagtgcaatcattactttggtagaaagagtatccaagatgattatcaccttacgayccttaggtcgtaaggcaactgatatagaaaaygctctrmaytsmaysttttcwkctttaycttctcatatatttaaatcaattacttttgattgtggtaaggagttctcaaactggaaaacawtatgtaactgtcacgatatatctatattttttgctgatccargcaygccakcacagcgaggtttaaatgaacattctaacggaatamttagacgcagtggattagataargaactrgatttcaatttagtaacrgaygatcatatcatcagtgttgctcaaaaaatcaatcatcrtcctagaaaatctttaggttatagaacaccattggaagtatttatgagtttcatcraagatgataaacttgtccagcttaatttgacaatctaa

SEQ ID NO: 934 - DNA, 141 bp, Staphylococcus aureus
atgattcatataatattcgcattaaaacatcacaatactgatacacaacaaaaagagcagtacatttgtcatgcaccactctcaacaaatatatttttcaatgaagcaattacgcgatcttacaaatactataagtatagc

SEQ ID NO: 935 - DNA, 228 bp, Staphylococcus aureus
gtgcaaaagcacayggaggttttctatatgaataacggtacagtaaaatggtttaacgcagaaaaaggttttggtttcatcgaacaagaaaatggcggagacgtattcgtacatttctcaggtatcgctagcgatggctacaaaactttagaagaaggtcaaaaagttactttcgaaatcactgaaggtcaacgtggagaccaagcagttaacgtacaaactgtttaa

SEQ ID NO: 936 - DNA, 117 bp, Staphylococcus aureus
atggttaaaaaatattttagaagccagcgtttggcttgcttwgacgacatgttcgcgcatgtcgtcttatttttacatttatataataacacgcaattcaataaaatgtctaatcaa

SEQ ID NO: 937 - DNA, 1077 bp, Staphylococcus aureus
atgacgattaaagttggaatcattgggtgtggtggtattgcgaatggcaagcacatgccaagtttacaaaaagttgaaaatgttgaaatgatcgcattttgtgacgtagacatttcgaaagcagcgwgtgcggcagaagcatacggwactgacaatgcaaaggtttatgatgattacaaagcattgttaaaagatgacacgattgatgttatccatgtttgtacgccaaatgactcgcattgtgaaattactgtagcagggytgcatgcyggtaarcatgtgatgtgtgaaaaaccaatggctaaaacgacagcagaagctcaaaaaatgatagatacagctaaatcaacaggtaaaaaattaacaataggttatcaaaatcgyttcmgascagatagtcaatttttayatmaakcagcgcaacgtggcgacttaggwgacatttayttcggaaaggcacatgcyattcgtcgtcgwgcagtaccracatggggtgtmtttctaracgaagaagcycaaggtggaggaccwttaatcgatatyggtacrcacgcwttagatttaacgttatggatgatggataattatgaaccagaatcagtgatgrgttcaacattccataaattaaataarcagcatsatgcggcaaacgcttggggttcatggaatccagatgaatttacagttgaagaytctgcgtttggmtttattaaaatgaagaayggagcgacgatcatkttagaatccgcttgggcgattaattctttagaagtggatgaggcaaaatgttcattatcaggaackaaagcaggtgctgatatgaargatggtctacgtattcatggtgaagayatgggyacactttataccaaacacgttgaattggaaaacaaaggcgtcgacttttatgaaggtaatgaagtggatgaagctgaagaagaagcaaaagcttggattgatgcagttgtaaatgatactgaaccagttgtgaaaccggaacaagcaatggtagttacaaaaattcttgaagcgatttatcagtctgcaaaatcaggcaaagcaatttactttgaataa

SEQ ID NO: 938 - DNA, 846 bp, Staphylococcus aureus
atgaatattatgttaacaggtgctacaggtcatttaggcacacatattacaaatcaagccattgcaaatcacatagatcattttcacattggtgttagaaatgttgagaaagttccagawgattggcgyggaaaagttyctgttcgacaattagattattttaatcmmgaaagcatggtarargyatttaaaggmatsgayaccgttgtgtttattccaagtattatccatccatcattyaaacgtattccwgaagtggaaaatttagtatatgcsgcaaagcaragyggcgttgctcatatcattttcataggttattacgcagatcagcataataatccattccatatgagyccttatttyggwtatgcakcacgtytattgkcaacaagtggyattgaytatacstatgtaagaatggcratgtacatggatccacttaaaccmtatttaccagaattgatgaatatgcataaactgatttatccagctggygatggtcgtattaattatattactagaaatgatattgctagaggtgtcattgctattattaaaaatccagatacttggggcaaacgytayttattatcaggctayagttatgatatgaargaacttgctgcwattttatctgaggcatcaggcacagaaattaaatatgarcccgtttcattagagacatttgcagaaatgtaygatgaacctaaaggctttggtgcattattggcatcaatgtacsacgcaggagcaagaggactattagaccaagaatccaatgawttcmaacaattagtcaatgatcaaccacagacactgcaatcatttttacaagaaaatatttaa

SEQ ID NO: 939 - DNA, 126 bp, Staphylococcus aureus
atgattaaactcggtaatattgctaagtactacaacagagatttacatgtcccatttaaagtatgtaaaatcatcacttttataaatcaacactttaactttttgacattgttatcctatgagatt

SEQ ID NO: 940 - DNA, 99 bp, Staphylococcus aureus
atgggtattgtgataattcaaatcatattaatgttgacgtctttggtaacaagccatgaaatgatacacatggtagatatgtatttcaagcttattcaa

SEQ ID NO: 941 - DNA, 102 bp, Staphylococcus aureus
gtgctttttgaaacgcctgccaatttggcaatatcagatatatttttcatacttattcacctatcattatttgtgacacttagccttattttagcatatgtg

SEQ ID NO: 942 - DNA, 90 bp, Staphylococcus aureus
ttgaacaattatgatacaaccgtgcaaacgatatgtagtataacttgtcaacttagaattattgataaatatattaatattggtttacca

SEQ ID NO: 943 - DNA, 183 bp, Staphylococcus aureus
gtgaaaaataaacatgtattgcaaccactaaaaaaatgtgagtatcaaagatggatagatattggtattcaaactataaataaacttttacaatggaaagaagaacaaaatctacaaaatgaagaatatggattttcagtctctagtgataaagagcaacatatcttttcaacataccataca

SEQ ID NO: 944 - DNA, 1041 bp, Staphylococcus aureus
atgacaaaattaaaagttggtgtgataggtgttggtggyattgcacaagaccgtcatattccagcattgctgaaactcaaagacacagtctcattagttgcagtacaagatattaatacagtgcagatgattgatgttgcgaagcgctttaatatacctcakgcagttgagacacctagcgagctgtttaaacttgttgatgcggtggtcatttgtacaccyaataaattccatgctgatctttctatagargcattgaaccatggtgtccatgtmttrtgygaaaagccaatggcratgacgacggaagagtgtgaycgcatgattgaagcggctaataaaaatyrcaaattattaactgtcgcwtatcattatcgtcacacagatgtsgcwatkactgctaaaaaagcaattgaakcaggtgtggttggwaaaccwttagtagcacgtgtacaagcgatgcgtaggcgtaaagtrcctggstggggygtttttaccaataargcrttgcaaggtggcggtagtttaatcgattatggttgccacttgttagacttatctttgtggctaytaggtaaagatatggtgccgcatgaagtgctaggaaaaacatataatcaattgagcaaacaaccgaatcaaattaatgattggggaacatttgatcayactaaatttgatgtcgatgatcatgttactagttatatgacatttgccaatcgagcaagcatgcagtttgaatgttcgtggtctgcaaatatmaargaagataaggtwcacgttagtttatcaggmgaagatggcggtatcaatttatttccatttgaaatatatgagccccgctttggaactatttttgaaagcaaagctaatgttgagcataacgaagacattgctggtgagagacaggcgcgtaactttgtcaatgcgtgtttaggkatagaagagattgtggtraaaccggaagaagcacgcaatgtaaatgcccttatagaagcgatttatcgtagcgatcttgataacaagagcatacaactttaa

SEQ ID NO: 945 - DNA, 183 bp, Staphylococcus aureus
ttgtttagatttatatcttttggacaacttgttgtttattcgacaacatttatacctaaaaaagatatattacaactcaatgacttggagtgtgacatcaatgttaaagagcccttaaagattaattatgtagtgatttttgggagtgggacagaaataacattttcacaaaatttatttcgt

SEQ ID NO: 946 - DNA, 102 bp, Staphylococcus aureus
atgattatcaagaaaacgttaacatttttcaataagtatgcttggattgataaaaatagagggcaggattttggtattaggagtcgttgcagtttagttaag

SEQ ID NO: 947 - DNA, 105 bp, Staphylococcus aureus
gtgtgtgttcgaactagacttgtaagttccagttcggcacgactttctaaagcaattattattgctgtgattgtcgtatatcacttagatgtgcgtggtttattt

SEQ ID NO: 948 - DNA, 132 bp, Staphylococcus aureus
gtgataaagcataaaaatgaaagcgattgcaaaactaaccttaatcatagtaaaatgagtttaaatgatgttatatcattaaatcaaagggttaaaccactttcaaaatttatagggggtaagtgtacatgg

SEQ ID NO: 949 - DNA, 111 bp, Staphylococcus aureus
atgccatatcccattaaaaattatcaaatagaaacccgagattttagtgaaatgaatcatactaaaatctcgggttatttatataatcgtaaatattgtagmtatamtgaa

SEQ ID NO: 950 - DNA, 1401 bp, Staphylococcus aureus
atggatagaatgtatgagcaaaatcaaatgccrcataacaatgaagctgaacagtctgtcttaggttcaattattatagatccagaattgattaatactactcaggaagtkttgcttcctgagtcrttttataggggtgcccatcaacatattttccgtgcaatgatgcacttaaatgaagataataaagaaattgatgttgtaacattgatggatcaattatcgacggaaggtacgttgaatgaagcgggtggcccgcaatatcttgcagagttatctacaaatgtaccaacgacgcgaaatgttcagtattatactgatatcgtttctaagcatgcattaaaacgtagattrattcaaactgcagatagtattgccaatgatggatataatgatgaacttgaactagatgcgattttaagtgatgcagaacgtcgaattttagagctatcatcttctcgtgaaagcgatggctttaaagacattcgagacgtcttaggacaagtrtatgaaacagctgaagagcttgatcaaaatagtggtcaaacaccaggtatwcctacaggatatcgagatttagaccaaatgacagcagggttcaaccgaaatgatttaattatccttgcagcgcgtccatctgtaggtaagactgcgttcgcacttaatattgcacaaaaagttgcaacgcatgaagatatgtatacagttggtattttctcrctagagatgggtgctgatcagttagccacacgtatgatttgtagttctggwaatgttgactcaaaccgcttaagaacsggtactatgactgaggaagattggagtcgttttactatagcggtaggtaaattatcacgtacgaagatttttattgatgatacaccgggtattcgaattaatgatytacgttctaaatgtcgtcgattaaagcaagaacatggcttagacatgattgtgattgactacttacagttgattcaaggtagtggttcacgtgcgtcygataacagacaacaggaagtttctgaaatctctcgtacattaaaagcattagcccgtgaattaraatgtccagttatcgcattaagtcagttatctcgtggtgttgaacaacgacaagataaacgtccaatgatgagtgatattcgtgaatctggttcgattgagcaagatgcygatatcgttgcrttcttataccgtgatgattactataaccgtggyggcgatgaagatgatgacgatgatggtggtttygagccrcaaacgaatgatgaaaacggygaaatwgaaatyatcattgctaagcaacgtaayggtccaacaggcacagttaagttacaytttatgaaacaatataataaatttacmgatatcgattatgcacatgcwgatatgatgtaa

SEQ ID NO: 951 - DNA, 1068 bp, Staphylococcus aureus
atgtcacaatataaaacgaaacacattaatgatttcactaaaaaagaattacaagaattgagttctaagggtcaattaattgacgttcgacatcctgaagaatttgaattaggacacattaaaaacgctttattacattcagttgaaaatatagagacttttaaacaaagcaaaaataaaacttactatatctattgtaaaagtggtaatagaagtagaaaagccagtcaatttcttgcacaacgcggatacgatgtagtgaatttagacggaggttataccgcatacgaacaacaacatcataatgataatttatctaaagtaaaagaagatagagaaattaaagataatcgtaagacattcaattatagtaatctacagtgtccaggacctattgttaatattagtaaagaaatcaaaaacatcgctattggcgatcaaatagaagttgttgtgactgatcacggatttttaaatgatattaaaagttgggtcaaacaaactggacatacgcttgttagactcaacgattttggcaatgaaattcgcgctattattcaaaaagaagaaaataaaaatatagaagtgacacacacgaaaagtggaacaacaattgttttatttagcggcgagctagataaagcagttgcagcaatgattattgctaatggtgctaaagctgcaggtagagatgtaaccattttttgcacattttggggcttaaatgcacttaaaaaaattcaaagtcaacgtattaagaaaaaaggtattgcaaaactttttgacttcatgcttccaaattcaccaattaacatgcctatttctaaaatgaatatgtttggtttaggcaatctaatgatgcgttatgtcatgaaaaagaaaaatgtcgatactttaccttctcttattgatcaagcagttgagcaaggtgttaaacttatcgcttgtacaatgagtatggatgtgatgggcattacaaaagaagaactacgtgatgatgtagaatacggtggcgtaggtgcatatattggatatacagaacaagctaatcacaatttatttatataa

SEQ ID NO: 952 - DNA, 969 bp, Staphylococcus aureus
atgaaaataggtgtattttcagtattattttacgataaaaatttygaagatatgttagattatgtckcagaatctggattggatatgattgaagttggaacaggtggtaacccaggagataaattttgtaagttagatgagttgttagaaaatgaagacaagcgmcaagcatttatgaagtcaatcacagacagaggcttacaaataagtggtttcagttgtcataacaatccaatttctccagatccgayagaagcgaaagaagcsgatgaaacgttacgtaaaacaatccgtttagcaaatctattagacgtgccagttgttaatacattttctggcattgcaggrtcagatgataccgctaaaaagcctaattggcctgttacaccttggccaacagcctactctgaaatttatgattatcagtggaatgaaaagttgataccatattggcaagatttagctgagtttgcaaaagagcaagatgtaaaaattgccatagagttrcatgcaggatttttagtkcatacaccatatacratgttraagttacgtgaggctacaaatgaatayatcggtgctaacttagatcctagtcatytatggtggcaaggtatygayccaattgctgcgattcgcatattaggccaagcaaatgcaattcatcacttccatgctaaagatacgtatattaatcaagaaaatgtaaatatgtatggtctaactgatatgcaacyatatggtaacgttgcracaagagcatggacrttccgtacagttggttatggacatagtccatatgtatgggcagatatcataagycaacttattattaatggatatgattatgtattaagtattgaacatgaagatcctattatgtcagtagaagaaggtttccaaaaagcttgtcaaactttgaaatctgttaatatttacgacaagccagcagacatgtggtgggcataa

SEQ ID NO: 953 - DNA, 309 bp, Staphylococcus aureus
atgaaatttaaaaaggttttagtagctacggcaatggtaggtgtwttagcaactggcgttgttggatatrgtaatsaagcagatgcgaaagtktattctcaaaatggactygtactacatgatgaygcaaacttcttagaacatgaattaagytatatygatgtgttattagataagaatgctgaccaagctacaaaagacaacttaagatcatacttcgccgataaaggactacattcaatcaaagacattatcaacaaagctaarcaagacggctttgatgtttcaaaatatgaacacgtaaaataa

SEQ ID NO: 954 - DNA, 114 bp, Staphylococcus aureus
atgtctttactattagacttagccattggtttcacctctccaaaaattgtaaatgtgtatcatcaatatgaaagttacataaaactgacatatttctttaaaatatcaacgcca

SEQ ID NO: 955 - DNA, 480 bp, Staphylococcus aureus
atgaaaatcaccattttagctgtagggaaactaaaagagaaatattggaagcaagccatagcagaatatgaaaaacgtttaggcccatacaccaagatagacatcatagaagttmcagacgaaaaagcaccagaaaatatgagygacaaagaaatygagcaagtaaaagaaaaagaaggccaacgaatactagccaaaatyaaaccacaatcmacagtcattacattagaaatacaaggaaagatgctatcttccgaaggattggcccaagaattgaaccaacgcatgacccaagggcaaagcgactttgtwttcgtcattggcggatcaaacggcctgcacaaggacgtcttacaacgyagtaactacgcactatcattcagcaaaatgacattyccacatcaaatgatgcgggttgtgttaattgarcaagtgtayagagcatttaagattatgcgwggagargcdtatcayaartra

SEQ ID NO: 956 - DNA, 126 bp, Staphylococcus aureus
ttgttactaaatattcaacttagtagcgatgcattttttcgctttataaatgaaaatgttaaagcaatatgtcgtggtatttatatttttaaagaagaatcttttagaattacacatatattacac

SEQ ID NO: 957 - DNA, 90 bp, Staphylococcus aureus
ttgaatcaaaagtacacaggtgctaaagtatgtgcttctaaaatgaagactattttttattacaagaaaatgtatctagtaaacttaaag

SEQ ID NO: 958 - DNA, 1923 bp, Staphylococcus aureus
atgaataaaggttactttatgttgagagtgactaacattaatcgagcaacaaaaaatatcgttgcgtcagcgtcttatcgttctgatgaagcattatatagcgaacgtacagatgaaaaaattaagtttagaaatcatactattaagcctgaaagcatgattttaactcctcaacatgcacccgaatggactaaagatagacagcgtttatggaatgaagttgataaagttgaaaagaataatgcgaaaacaaaaaatcctagattagcaaaagaagtcttattaagtttgcctaatgattttgatagagaggtacaaactgaattaactaaagattttataaaaagtgagtttgtagacaaaggaatggttgctgatatttcaattcatagagatgatataaacaacccacacgcccatgttctacttactcaaagaccgtttaatgcagacggtacttgggggaaaaagacaaaaacgagaacgcaatatgatgaaaatggcaatgcgattttaaataaaaatggtaataaagttagaaaacaagaacgatttgccgactttgatttcaaagaagttcgtaagcattgggaattaaaattaaatcaatactcagaacgtgaacaaagtttaagacgatatgatagtcgttcttttgaagcgcaaggtttagaaaaaattgccgaaattccacttacaagagaagaatatagattagaacaaaatgaaagaaaacgctgtgaaaaagagggtatcgagtaccaacccgttacttattacggacagaaaaatgaacaaattagaagatataatcgtggcgaagtatcacaattatttagtgataaagagaaagaacaagcacaaaatgaaattagattatttattcaaaatgctaacgaacaagtaagtaaaaatgaacaaagttattctattttatttgatagatatcaacgtgatgttggctattcagaggcgaaagaaacaattaaaaatacgtttgacagtgcgtctacctttggtcgtaaaattcaaaatgatttacttaaaaatgaaattaagagacgtcaattaaaattctatgctaaaaattatgatgaaaattatcagtttagaaaagaaattgaaagtaaaggatatagtcaacaagagtttgttaatactgttgaaactaactataaagcgttactcaatgagaagaataaattagaaagtagagaggaaaaacgtaaagagatttatcaatcagctaaagatgtttatctaactgaaagtgaaaaaaatcatctcattgttcagcaaatgtaccctaaatctcatcatcattttagccatgatgaaaaagcatttattgttgatgaggcacaaaaaggtaatattataaaagcaactcatgttcaatacctgttcaaacaaaataacaatattcctaatgatgtattgctagaagatacttataaaaaagcgagtaaagatattttctttagtcaaaaacatcttaaaaatttagaaaaagatagctttgaatataacgttgagttgcaatttattaaggaaaaagaaaaagaaattgatagttataaagaacatattgatgatgatttaagaatagatataggcgataaaaactttgaaaaagtcaaagaccaaacacctaatgaaaaagttcaattactcattaaacttgagaaatataatcatgtcgatcaagaagaagttatcgaaaaacatattaatcaagtagatagaaatgatcatgacaatcgtattgaacatgaaaatgaacaaactaatcacattaatttaccaacgataaatgctagtgactttcttatgtactatgcgaacgaaactgaaaagcaaaacaatattaatcatcagaaaaagaagaagaaacaagagagaaataaccaaatgagaagatag

SEQ ID NO: 959 - DNA, 414 bp, Staphylococcus aureus
ttggaaacaaaaattggacatcaaatacaaaagttaagaaaaagtaaaaacatgtctcaagaaaaattagctgaaaagttaggggtatcgagacattctatttctaattgggaaagagaagtaagtaatcccgacttaaaaacaattttagaaatcactaaattatttaatgtttctctaaatcaattaattaaaggagtggaaatcatgcaagttaataaatatgtttactctgcattagcattttttctaggaggtttcggggctcataagttttatgttaagaaaaataaaaatgctcttctttatttactattttgttggacgggaataccgggtgtgataggtatggtagaaggtgttttaacacttatgcgtccgagcgatagtgaaaacaatatagaaataaattaa

SEQ ID NO: 960 - DNA, 234 bp, Staphylococcus aureus
atgaacacattcgttttcggcgtgattacaaagcgattagaagaaataggttttaatgtacacaaggtgtttaaaatgcccgaaaaacaggcactatttgaagatttgtaccattatgtgagatacgttaaaccatgcaaggctgaactaacaatggtggcattagatagtgatgaattgattcattactttatatgctgttacatggaacgttatgcttatcttttgaactaa

SEQ ID NO: 961 - DNA, 270 bp, Staphylococcus aureus
ttgaagtctacattagcccaaccatctccatttgtatctgcgctatttggtaagttctctccgtatacggttttggcaccatcctcagcattggctgtcgctgaaaaacctgtgaatgttaatgagctagccaataataaagttggaagtaatgatcgttttttcataaaattatctcctttaatagaatttgtattttcattatcacatagatacattaaacataaaatgacttatcggaagtgcatatgcttaacaattcacaaatga

SEQ ID NO: 962 - DNA, 99 bp, Staphylococcus aureus
atgttcagcatcatatttgtatctatagtagctcctattatagtaggggttataatcacgttgttttcacattggttgaataatcgtgataaacaataa

SEQ ID NO: 963 - DNA, 120 bp, Staphylococcus aureus
gtgaatattaacagtcaaaatccagttatgtcggttaatgaatcgatgaaaattttcaaagctcaagtaatgcttagaaatttaaagctattaagcgagtggattgttaaaggggactga

SEQ ID NO: 964 - DNA, 93 bp, Staphylococcus aureus
ttggataaatacattttaaatagaaaaatacgctctcaaaatgaagtcatctctaaaagaaacgatttaaagatgactactgagagcgtagca

SEQ ID NO: 965 - DNA, 270 bp, Staphylococcus aureus
atgtctaaaattaaacaaacagatattacaaaattaagtcaattagaaaaacaaattgcacaactgaaagagcaaaagaaaaaacaagaagaacaactatctaataaaattggtggttattttttaaataaacttgatttaaatatgatcaactctagtgatgaattgtataaaattatggataaagtcattggagaatttaataaagatatcgaacaaaatagcagcaacgagaacaaggaaaatttaacagaagacaaaattaactag

SEQ ID NO: 966 - DNA, 705 bp, Staphylococcus aureus
atgaaaaaaatcattttacctatattaattgttagtttatcggtaattttagtgagttgtaataataacgattcagaacatcacaatgataataattctagtgatactaacacctcagaaaacaaagataatgaagcatcaaatgaaattgacgaaaaaactaacacatctgatagtgcggataattcagaaagtagtaataaacaaaataaagaaaaaaatgataataaaaaacaagaaaaaaataatgatagtaataagaagcaacaatctactgataaaaataaaagttacttaaataattttaactcgaaagaaattgaatatgcacgagtttggtatcagttaatatctacaagaaatgatttaaaaggtattaaaaatgtttatgttacagaaataccaaaaggctcaaaagtaaatccacaagccaaaaatagtgcaatttataaagaaaaagttgtgaaattagaagctcctatgagagctggtgggtctgtaacatatagcagtaatggtgatggaacaattaatgtatataataatatcccttataaatgggaaaattcacaaaatagtgattatagtcaaatgaataagataacaaaaaaagcaatagaggagaatattgaaacagtctatattaaaccctacgacaataaaacagtagctaagttagcaagtaaaattagatataataagtag

SEQ ID NO: 967 - DNA, 699 bp, Staphylococcus aureus
atgaaaaaacgatcattacttccaactttattattggctagctcattaacattcacaggtttttcagcgacagccaatgctgaggatggtgccaaaaccgtatacggagagaacttaccaaatagcgcagatacaaatggagatggttgggctaatgtagacttcaatacttcatccctcccacaatctgcacaaaatcaaataagtgaactttctaaacagaaagattcaggggaattaactcaaatcgagtataatgagaaagtttcaagtgtatttaatgaatatcaatcacaaagtactgatatacaaaataatgagagaactcaacaaggtaaaagacctttcggaggggtgatacctaattgtatgactcaagaagaataccaagaattagaaagtcatgttcctaaccctaatagtgtatccacagaaaaatataatcaaattgtaaaaaatgaaagtcaaaagatagctaatgaagaaaataaaactattaatacacctcaaggtgtgttgacacctgtaactgaaaataaaaacaagagttctgaaggaatgaaaaatcaagattcaaactctcaagtattaccagaaacaggagaaagcaaccaaagtgatatattgtcaataattggcgcttctggactactaatattaggtataagtcttttaatattcagaaaaaaggcaatataa

SEQ ID NO: 968 - DNA, 912 bp, Staphylococcus aureus
gtgacactagtatgtaccaaattcaatcatgatgctaaatcaactgattatttaaatatttctattgaagaagacactcttcaatatatagacccaaaccttattaaagtaatatctaatagagaagttggaaaagttgcgactttggctcaaagagcacaagagcaaattgatgttttttttgaaaaaattatcgatatacatcttagtgatttttctgatacccaaaagcgtaatgaatttagaaaattattctctcatttttcagaaccacaccatttacgcttaggtttttctcagaaaggtaatacaggaaaaggtactacagcatctgaattgattaatctatttatgaatgaagatattctttccattatcttaaatgatgacggattaacaatacctcaaaaagcaccattaatcagaaattttggtgatgataaattatcagatttaacaagtaatataatcatgaatgttataattgattttaataaatccatgattcagtcatttccagaaatgaaatcgtttctttctaaagaaactgtgacatattattatttctctactaacggtatatgggaaacttatgatttcactccatttctttttgatggtaataaaactttattagttccaaaattattcactacttataatcagacatctagtttagatttgatgataagagtatacattgaagaagaaatcattagattgcaaaaacaacgtaatacaaccaaaaaaatgacaaaaaaacaatttatcaatgaatttataaaaggacatcgtatggataatatgacctatttctttttaaacacttcttcaaaatcacacaaaaaatttcaaaaagaattagattcaaaagccaatgaaaggggtaacaataacaaagatgataattag

SEQ ID NO: 969 - DNA, 240 bp, Staphylococcus aureus
atgatgagtgcattcgctgaacttgaagctaatttattaagtgaacgaactaaaaaaggtttggaagctgcaagagcaagagggagaaaaggtggaagaccttcactaccagatcataagaaaagagagatcaaattcttatatgatgaacaaaagctgtctggtgaagaaattgctgaacaaacaggagtgagtcgttctactgtatataggattattaaagagtcaagaaaaatataa

SEQ ID NO: 970 - DNA, 303 bp, Staphylococcus aureus
ataatgactacaatagtattgctaaaaagttatctaataaagaagaaactttatctgaaaatgatgctaaaaactttgtgttatttgttaaaagtaaagaaaatcaagaacaatacaatgagcaaatacaaaaaattaaaagtaatattgaataaaaataaagacaataataccgtgtatggctctataacagatcaatacggaaataacctaataactattaagaaaaacggaaagactttcttttttatagataaattagaattcaaacctacttaccagcgtttatgtgaaagaatttaa

SEQ ID NO: 971 - DNA, 318 bp, Staphylococcus aureus
attaacaggggtttaatatatggattacacaaatcaaaaaagaaaatacataatatttggtatgttcttgctataacacttctaattgttggaattgcttactatttaatcagtttgaataatgctaaaggacaagttaaagaatttgaaaaattagtacagcataatgactacaatagtattgctaaaaagttatctaataaagaagaaactttatctgaaaatgatgctaaaaactttgtgttatttgttaaaagtaaagaaaatcaagaacaatacaatgagcaaatacaaaaaattaaaagtaatattgaataa

SEQ ID NO: 972 - DNA, 339 bp, Staphylococcus aureus
atggctaaaattggttatgcacgtgtgtcaacacaagatcaaagtcttgatggacagattgatacacttgaggaatatggttgtgaacgtatctttagcgagaaagcgagtggtcgtaaaactaaaagaacggaacttgataagtgtttagattatttacgtgaaggagatattctagttgtctataaattagatcgtcttggacgtacaacaaaacaattaattgagctatctcaatggttggatgaaaatagcattgatttacatattatagatatgaatgtgtcaacgaaagatgcgatgggcaagatgttctttacggttctgttgcaaagttga

SEQ ID NO: 973 - DNA, 1380 bp, Staphylococcus aureus
atgaacttttttgatatccataagattccgaacaaaggcattccattatcggtacaacgtaaattatggcttagaaacttcatgcaagctttcttygtagtgttctttgtttatatggctatgtatttaattcgaaacaactttaaggcggcmcaaccgtttttaaaagaggaaattggattatctacattagaacttggttatatcggattagcatttagtatcacgtacggtttaggraaaacattacttggatattttgtcgatggacgtaacacaaaacgtattatctcrttcttacttatcttatctgcgattacagttttaattatgggatttgttttaagttactttggttcwgtaatgggattattaattgtactttggggacttaacggggtgttccaatcagttggtggacctgcaagttattcaacgatttcaagatgggcgccaagaacgaaacgtggccgatacttaggrttytggaatacatcacataatatcggtggtgccatwgcaggtggtgttgcactttggggtgctaatgtattcttccatggaaatgttatagggatgttcattttcccatcggtgattgcattacttattggtatcgcaacattatttatcggaaaagatgatccrgaagaattaggatggaatcgtgctgaagaaatttgggaagagccggtygataaagaaaatattgattctyaaggtatgacraaatgggagatctttaaaaaatatatcctgggaaatcctgttatatggattctatgtgtttcaaacgtctttgtatacattgtacgaatcggtattgataactgggcaccgttatatgtgtcagagcatttacactttagtaaaggcgatgcagttaatacgatattctactttgaaattggtgcwttagttgcaagtttattatggggctacgtatcagacttattaaaaggtcgtcgtgcaattgtagctattggctgtatgtttatgattacatttgttgtcttattctacacaaatgctacaagtgtmatgatggttaacatttcattgtttgcattaggtgcgttaatctttggtccgcaattattaattggtgtatcattgactggttttgttcctaaaaatgccatcagtgtagcaaacggaatgacaggttcattcgcgtatctattcggtgactcaatggcraaagttggtttggcggctattgctgatccaacacgtaacggtttaaacatctttggatatacattaagtggatggacagatgttttcatcgtcttctatgttgcattattcctaggcatgattctattaggaatcgttgctttctatgaagaaaagaaaattagaagtttaaaaatytaa

SEQ ID NO: 974 - DNA, 762 bp, Staphylococcus aureus
atgaaaactattaaaatgattgctgatgaattaggtgtaactaaacaaactattgttaataatgctaaaagattaaatatatcttttgaaaaagaaaatggaattaattatattaaagataatgattatttaaaaattatagaaaaaatcactaagaaagagaaaacaactcataataaagaatcagtaaaaaatgaattatttaatgaaaatactgcaaaagttgaaaagtatatacataataattcaaatagttctgagacattaaaaacaaaagtaaacgaattagaaaagcaaatagaaatctttgaaactagagctaaaaatgatgaaaaatatattgagaatctaactaaacaattagatcaacaaaatagcaatgttaatacattaaataaactgttggagaatcaacaaatattatctttagaaaacaataaaaaaattcaaaaactagaaagccaattagaagaagaaagacagcttaaatattcttttgatacaacgatgaataatagacagaatattaatccacaagaagcaacttttactgaagaatctcaaaatatcaaccaacaacaaaaagaatgtcaaccaaccgaagtaaatcataaaaatataactgaagagaataagcatgacagtacagatgaattaacaaaagaggataagtttgttgaaaaaacgaagaacgattccagtgataatagggaggtagaaccacctaaaaagagattttggagtcgtttatttggtaactaa

SEQ ID NO: 975 - DNA, 141 bp, Staphylococcus aureus
gtgctctgcgaggctgtcggcagtgccgaccaaaaccataaaacctttaagacctttcttttttttacgagaaaaaagaaacaaaaaaacctgccctctgccacctcagcaaaggggggttttgctctcgtgctcgtttaa

SEQ ID NO: 976 - DNA, 192 bp, Staphylococcus aureus
atctccacctttaaacccttgccaatttttattttgtccgttttgtctagcttaccgaaagccagactcagcaagaataaaatttttattgtctttcggttttctagtgtaacggacaaaaccactcaaaataaaaaagatacaagagaggtctctcgtatcttttattcagcaatcgcgcccgattgctga

SEQ ID NO: 977 - DNA, 126 bp, Staphylococcus aureus
atgtcggtacttaagtgggttagttcctataataatgaaagggatgcttggtttgtactttatccaccaagcaaagcgtcttcctgcttcacgttgatcgttgatgttgcactgttctctgaataa

SEQ ID NO: 978 - DNA, 171 bp, Staphylococcus aureus
atgatatgttcacaaactttatttcgttatcccactcacatgatttttttgatgaaacataattacatgattgattgcatcattttgttaaacaatttattgcaaacctgccatttcacactgaaaatttacataataagtgacgatattttacaagtcatatacaaataa

SEQ ID NO: 979 - DNA, 153 bp, Staphylococcus aureus
gtgatgttttataatatcttgggtgtgttaatactagtaatgctttcaactgatgcattagactgtgacatcataactcatttaagaacttcgcttattaattttctaccaatacaatcccttctaagtgcactaaaaaatccttactgctaa

SEQ ID NO: 980 - DNA, 282 bp, Staphylococcus aureus
atggtgttaattacctatcaaatcattttattttttattattagtctaagttactatttaactttaaatcattacatggcagtcactgtaggtaacttcacttcaatattcggcatgttcgcagccatactctttatgtactactacctactctataaaagtcccgaatacaatcaacgcaaacgatttaaacatttcattcatatcactaatttgataataattgcttttagcaccttcgtattagttcatttagcattaaaattattcttcagcatttaa

SEQ ID NO: 981 - DNA, 2250 bp, Staphylococcus aureus
atgttagaaacaaataaaaatcatgcaacagcttggcaaggatttaaaaatggaagatggaacagacacgtagatgtaagagagtttatccaattaaactacactctttatgaaggtaatgattcatttttagcaggaccaacagaagcaacttctaaactttgggaacaagtaatgcagttatcgaaagaagaacgtgaacgtggcggcatgtgggatatggacacgaaagtagcttcaacaatcacatctcatgatgctggttatttagacaaagatttagaaacaattgtaggtgtacaaactgaaaagccattcaaacgttcaatgcaaccattcggtggtattcgtatggcgaaagcagcttgtgaagcttacggttacgaattagacgaagaaactgaaaaaatctttacagattatcgtaaaacacataaccaaggtgtattcgatgcatattctagagaaatgttgaactgccgtaaagcaggtgtaatcactggtttacctgatgcatacggrcgtggacgtattatcggtgactatcgtcgtgtagctttatatggtgtagatttcttaatggaagaaaaaatgcacgacttcaacacgatgtctacagaaatgtcagaagatgtaattcgtttacgtgaagaattatcagaacaatatcgtgcattaaaagaattaaaagaacttggacaaaaatatggtttcgatttaagccgtccagcagaaaacttcaaagaagcagttcaatggttatacttagcataccttgctgcaattaaagaacaaaacggtgcagcaatgagtttaggtcgtacatcaacattcttagatatctatgctgaacgtgaccttaaagcaggygttattactgaaagcgaagttcaagaaattattgaccacttcatcatgaaattacgtattgttaaatttgctcgtacacctgattacaatgaattattctctggagacccaacttgggtaactgaatctatcggtggtgtaggtattgacggacgtccacttgttacgaaaaactcattccgtttcttacactcattagataacttaggtccagcwccagaaccaaacttaacagtattatggtcagtacgtttaccwgacaacttcaaaacatactgtgcaaaaatgagtattaaaacaagttctatccaatatgaaaatgatgacattatgcgygaaagctatggcgatgactatggtatcgcatgttgtgtatcagcgatgacaattggtaaacaaatgcaattcttcggtgcacgtgcgaacttagctaaaacattactttacgcwatcaatggtggtaaagatgaaaaatctggtgcacaagttggtccaaacttcgaaggtattaacagcgaagtattagaatatgacgaagtattcaagaaatttgatcaaatgatggattggctagcaggtgtttacattaactcattaaatgttattcactacatgcacgataaatacagctatgaacgtattgaaatggcattacatgatacagaaattgtacgtacaatggcaacaggtatcgctggtttatcagtagcagctgactcattatctgcaattaaatatgcacaagttaaaccaattcgtaacgaagaaggtcttgtagtagactttgaaatcgaaggcgacttccctaaatacggtaacaatgacgaccgtgtagatgatatygcagttgatttagtagaacgcttyatgactaaattacgtagtcataaaacatatcgtgattcagaacatacaatgagtgtattaacaattacttcaaacgttgtatacggtaagaaaactggtaacacaccagacggacgtaaagctggcgaaccatttgcwccaggtgcaaacccaatgcatggccgtgaccaaaaaggtgcattatcttcattaagttctgtagctaagatyccttacgattgctgtaaagatggtatttcaaatacattcagtatcgtaccaaaatcattaggtaaagaaccagaagatcaaaaccgtaacttaactagtatgttagatggttacgcaatgcaatgtggtcaccacttaaatattaacgtatttaaccgtgaaacattaatagatgcaatggaacatccagaagaatatccacagttaacaatccgtgtatctggttacgctgttaacttcattaaattaacacgtgaacaacaattagatgtaatttctcgtacattccatgaaagtatgtaa

SEQ ID NO: 982 - DNA, 141 bp, Staphylococcus aureus
ttgtacyttcaattaacagttggtacgatggttttrycatttttcatcaamgyaaayataaaaaggactaagacayatacatgtcctagccctatggataaaatgcaaatttctgctttatcaaaactatcacactttaga

SEQ ID NO: 983 - DNA, 177 bp, Staphylococcus aureus
atgaagaaaaatgatttgttagtaatgagtgtagtatatattttaacttcagtcataatgttctacattaatggattaagtaaacaattttttacatatgtagttggtttcccaattatttattttggttatatatgtctagttaatcttataaaaaaaagaagccggaataattaa

SEQ ID NO: 984 - DNA, 105 bp, Staphylococcus aureus
atgatagtaaataaatatgatagaaaagtagtgtctcgaagtttattcattaatatcatcactcctttaattatgtgtttctatattaaaaaatatgatttaaaa

SEQ ID NO: 985 - DNA, 210 bp, Staphylococcus aureus
atgactacacagtcttttatattcatgaacataatactcctggatggcgcaacccaacgtcatcctttttttatttgtcaaatactcgcttttttatttccaaaatttcctcatattaatttattacttttttatcctatcttatctacattttcaaatattataatacatattgaccattttcacgcaaataaaaaagatgacaactga

SEQ ID NO: 986 - DNA, 144 bp, Staphylococcus aureus
ttgttgcaaataaatggtcttggtattttttgtataggatgttcttggtggtacgtaaggaatattcgtgatctttgtagtctgacgcgttatatttttgtggcgtgttttatgtttgatactcgaagtctaagacattcatga

SEQ ID NO: 987 - DNA, 756 bp, Staphylococcus aureus
atgcttaagggacacttacattctgtcgaaagtttaggtactgtcgatggaccgggattaagatatatattattyacacaaggatgcttacttagatgcttgtattgccacaatccagatacttggaaaattagtgagccatcaagagaagtcacagttgatgaaatggtgaatgaaatattaccatacaaaccatactttgatgcatcgggtggcggtgtaacagtcagtggtggcgaaccattgttacaaatgccattcttagaaaaattatttgcrgaattaaaagaaaatggtgtgcacacttgcttagacacatcggctggatgtgctaatgatacaaaagcatttcaaaggcattttgaagaattacaaaaacatacagacttgatattattagatataaaacatattgataatgacaaacatattagattgacaggaaagcctaatacacacatccttaacttcgcgcgcaaactgtcagatatgaaacaacctgtatggattcgmcatgtccttgtgcctggttattctgatgataaagacgatttaattaaactaggggaattyattaattctcttgataacgtcgaaaagtttgaaattctgccatatcatcagttaggtgttcataagtggaaaacattgggcattgcatatgaattagaagatgtcgaagcgcccgatgatgaagctgttaaagcagcctaccgttatgttaacttcaaagggaaaattcccgttgaattataa

SEQ ID NO: 988 - DNA, 417 bp, Staphylococcus aureus
atgttatccataatatcaatgtgccacaaatttcactttaccgacaatatcaaaattataaagttcatattgttatgtatattgcaaataaaacattgtataattgaaataacaatattttgctattttcaatttagtacgatytatatttattatacagagggggtarggcgtatcaatagagtwatttttgtctatatagcgttaatcattacattagttagattctttacccctatwcatccatcrttttcaaatttgatttactggatatttgtattatattttattcctattatactatgcgttatcggtttcaaggccgaaaaacttattgcaacaatggtcattatacctaattttttaggwatactttatcgattatatgcctacgtcacacatatactctttatgtaa

SEQ ID NO: 989 - DNA, 159 bp, Staphylococcus aureus
ttggtgcgcatagcttatacaaaaaggatgcatcaatcgatatcgtcgttaagccgtttttgtttgtgtgtcatgaatcctatcccaatctccatgaatataaaaattccaccaccaacatcaaaattctccacatcgcaacataaccaaatgttataa

SEQ ID NO: 990 - DNA, 270 bp, Staphylococcus aureus
atggcaaaacgttccaaatcacaacgtttatcaagtttactaaatgtcgcaggtttcatagtcgacggctacaatggctataaatatcatgctaaaaataaaaaattagtatatctttcattaggtttaagcactgtaggaaccgtgttagacttttacatttcaattaagtcaccacgyaagttcaaaaaagcagtggcagttgttactttaataacaaacggtgctagattatttacaagcattcgcaaagtaaarcatgaatactaa

SEQ ID NO: 991 - DNA, 93 bp, Staphylococcus aureus
atgaattatactctacaatgttatattgactgcggggacccaacacagagaatttctaaaagaaattctacaggcaatgcacgtttatgttag

SEQ ID NO: 992 - DNA, 132 bp, Staphylococcus aureus
gtgacagaaatggtattttataaaatttatttcgttgtcactccccaacttgcattgtctgtagaatttctttttgaatttctctatgttggggccccgccaacttgcattgtctgtagaatttctttttga

SEQ ID NO: 993 - DNA, 210 bp, Staphylococcus aureus
gtgtcagttattgcgattgcgataacttcttttctctatatacatatagtaacgtcttatctaataaaaaacatggtactacagtatcaaatttatctagggcttaagtttgatttttataataggcaggtttacctgataaaaatacttattcattatataatgttaacaagatgtattttaaagtttacattgagtgagggatattga

SEQ ID NO: 994 - DNA, 90 bp, Staphylococcus aureus
atgttatttaattattctttgtatgataccttaaataccttattacatatcccatatgaaaacggcttttttattatgttatatgactaa

SEQ ID NO: 995 - DNA, 1764 bp, Staphylococcus aureus
atgaagagaattagtaaagatatatgggcagtatttaaattactgtatcaaaataaagggcgttttagcattaatgccttactattgcagttaatcatgatttttattagtagtacatacttaattttactatttaatatgatgttaaaagtagctgggcaaagccaacttacgattaacaattggayggaaatcrtwagtcayccygccagtgtgatacttcttattatattcatattaagtgttgcctttctgatttatgtagagttttcattgttagtttatatggtttatgccggctttgatcgacagattattacatttaaatccatttttaaaaatgcctttgtmaatgtgcgtaaactcataggtgtaccagttattttctttgtyatttatttaatgttaatgatacccattgccaacctaggactaagttcagtattaacaaaaaatatttacatacctaaatttttaacggaagaacttatgaaaacgacgaaaggtataatcatttacggtacctttatgattgctgtatttatattaaaytttaaattaatatttacyytaccgttaacgattttaaaccgycartcgttatttaaaaatatgagactaagttggcaaattacgaagcgaaataagtttcgrcttgttatagaaatagttatattrgaactcatcattggtgcgattttaacattaattatttcaggagcaacatatcttgcyatttgtgtagatgaagaaggagataagtttttagtctcatcaattttatttgttgtattgaaaagckcattgttcttctattatttatttacgaaattatcattaatcagtgtgttagtactgcacttaaaacaagagaatgtattagaccarccgggcttagaatttaaatayccaaaaycgaaacggaagtctaggttctttataatttcaatggtrcttgcagtgacrtgttttatcggttataacatgtacttactttacaataatactatcaatacaaatatctccattattggccatcgtggtttcgaagataaaggbgttgaaaattctattccgtcattgaaagctgctgcaaaagcgaatgtcgaatacgttgagttagatacaattatgacgaaagataaacaatttgttgttagtcatgataacaatttgaaacgtttaacaggtgttaataaaaayatttctgaatctaatttcaaagatrtcgtcggtttgaaaatgcgtcaaaatggacatgaagcaaaayttgtatccttagacgaatttattgaaacggctaaacaatcaaatgtgaarctactagtwgagttaaagccacatggtaaagaaccagcagattatacacaacgtgttattgatattttgaaaaagcatggtgttgaacatcaatatcgtgtgatgtcwttggattatgatgtgatgactaagttgaaaaaagaagcgccatatctcaagtgtggttatatcattccgttgcagtttggtcattttaaagaaacatcwttagatttctttgtcatcgaagatttttcttattcgccaagacttgttaatcaagcrcactyggaaaataaagaagtctatacttggacyattaacggcgaagaagatttaacgaaatacttacaaaccaatgttgatggtattatcacagatgacccagcattagctgatcagattaaagaagaaaagaaagacgaaacatacttcgatcgttctataagaatwttrtttgartaa

SEQ ID NO: 996 - DNA, 783 bp, Staphylococcus aureus
atgaatgctgtatttatattggcgttattgctcctctttctgatgataattttcggaggtaraaagggattcatctcttatttaaccctatttttaaatttygctattttaattattagtattgtrttgattatttttggcgtaccgatttatgtcgtcacattctttttctgcattattattggcgcttgtaatttattcgtactcaatagttacaatgttaaaacacaagctgcatttatcagcactatcgttacaacaatattgttgattacactcatttatttatckgtctacttcggtcatctacaaggcttttcaaccgaacaacaagatgaaacatatgtgtattcaatgaatattggcattgatatgrttcaatttatggtgttcactattattcttgctgttattgcagctgtgatagatttaacrattaccattagttcacccatttatgaattgcatcaagtraatccaacrcttacgcaatacgaattattccaatctggcatgcgtgttggtagagaaattttagcgacatctgcgaacacgatttaccttgccttttttggtggycaacttgctttatttatttggtttttcaaacttaaatattcatttggtcatattataaactcgaaaatatttgcccaagaatttatttctattattttaggcggtattgccgttgcaatcagtattccgattacggcttggattacggcatttttaataaaaagaccatctcgacagcgcaaaaatgatgagtctatcaattaa

SEQ ID NO: 997 - DNA, 201 bp, Staphylococcus aureus
atgaccaatccaacaagaacgaaacgttgtgggggggatgttctatgtggtattgataatcattttcaactactattatacattagtgagaatcattgtcaattagaaactaaaactttttttgaatattttttaagaatagtaaataaaacgcatgattacgctattttagaaaataaaaaaatttgtatttctcattag

SEQ ID NO: 998 - DNA, 81 bp, Staphylococcus aureus
atggatatagatgttaataaattgcttcaagcttttgtctattttaaatcatttgagaagttacgacataataattcttaa

SEQ ID NO: 999 - DNA, 1113 bp, Staphylococcus aureus
ttgaaatatagaaatttatttacaaagccatttaatataattttaggtttgttctgcatcgcattcattggtgctattttattyacattcaataatgagaacttttacaacaaaccaattggtcaaattatagatgtcaaacatgtttcttcgacacctacaaaagatgcacaaaataatcgtgatattaaatataaaaatcaattaaaagtcaaaatattaaatggtcaatttgctggagaaacgacgacgattaatcatcagtacgtcaaatcgcaagcagattctgaggcatttcgcacacacgaaaaagtattattacatatttctaacaagccgagtgatgcttatattatagaaaagaagcgtgataccttaacggttatcatcactggtttgttcttattaactgtattattggttggtcgcaaagtcggactgcaatcgattttatcrttaatcttgaattctattgccatattaatcgcaatttacattcatattcaacatagcaatattaatttattcttactcatgaccattgccatgatctgttcaacaatactcactttattgctcgttacaggctggcatatgcgyacactcattaccatagccagtacaattatcggaacttttttgagtataggtttaacagaattaatcatatatatgacagayggtaaaggcattaaatatgaaacgatgaactttttatcattaccaccgaaagatatcttcctagcctcagtgttaataggttcacttggcgctattatggatgttgcaattacaattgctagtggtatgcatgaaattttacagcgtacgccrcacatttcaatgaggagatgggcgcttgctggscgaaacatmggccaagatattatgggaacaatgactaacatcttattattctcatatttatccggtgcactacctatgtttttaatctttttaaaaaatgcmaatacwgtgacttatactatttcgatgaattggtcgttagaaattgcgcgcgcactaacaggyggtataggtatcgtacttacaattcctatcacaatattgtttatggaaatatttgaaacattaaggagggcgaaacaatga

SEQ ID NO: 1000 - DNA, 51 bp, Staphylococcus aureus
atgcgaagaagtcaagccagtattggaaccggtcacatttatgatgactaa

SEQ ID NO: 1001 - DNA, 885 bp, Staphylococcus aureus
atggaaattaaacaattaagatattttatcgaggtcgctaaaagagaacatatctccgaaacagcacttgaactaaacattgctcaatcagcgataagccgtcaaattacattattagaacaagaacttaatgtgtcwttatttaaaaagcaaggacgyaatattacgctcacwtctgaagggaaattattatttaatgaagctctgcgyattattgaacatttagatagcacgattgaacaatttcaaagycatggattaactaaaaataaaagyatctacattggctatratgagagtgacgtatcccacatgttactaccacttatycaaacgtttcatttacaaaatgatacacatgtcatmcckaryttattagawcatgacacrattataaatagcgtattaaatggraatatagacattggtttcacggaacttacaccagaaatacgtaaacacaaacaattamatatgctacctttattcgaagagcactatcatttatatgcgccttcagacgatccaatyacgatggcgacacacccaccattaattcagtttgagcatagtcatatttattgcttggsaccatttgccgaawctgtaaaaaaacaattgcgyaagattactaaatcagatgtatacacaatcagtagccaaccacttgcgcagtatctccttcgtcaaaaagaaggttacatcatttcatcacaaaatatacatttaccagaatctaaatcatgkatagatataaaattagaycatactgaattaaaaagaacgatatgtgctattacraargarccttatacraagagtgatattggyatmttattaacactyattcarcaattaatgactaaaacgtctacattccattaa

SEQ ID NO: 1002 - DNA, 102 bp, Staphylococcus aureus
atgggttttcttgcagcgtacacgccttatatgaaggacgtacaaaacaagaaacagggcacccacctgtatataacaggccgaatgatcaagctattataa

SEQ ID NO: 1003 - DNA, 975 bp, Staphylococcus aureus
atgaaaaggttaagcataatcgtcatcattggaatctttataattacaggatgtgattggcaaaggrcgtctaaagaacsgtctaawaatgcccaamatcagcaagtgattaaaattggatatttgccgattacacattcagctaatttgatgatgactaaaaaattattatcacaayacaatcatccgaaatataaaytagaattagttaaattcaataattggccagatttaatggacgcattaaacagtggtcgtattgatggtgcatcaactttaatagagctmgcgatgaaatcaaarcagaagggctcraatataaargctgtggcattgggscatcatgaaggcaatgtcattatgggacaaaaaggtatgcacttaaatgaatttaataataatggcgatgattaccattttggtataccrcatcgttattcaacacattatctyttacttgargmattacgwraacaattaaagattaaaccggggcattttagctatcatgaaatgtcgccagcagaaatgccagccgcattragtgaacacagaattacagggtattctgtagccgaaccattcggtgcactgggkgaaaagttaggcaaaggtaagactttgaaacatggtgatgacgttatacctgatgcgtattgctgtgtgctagtactgagaggsgaattgcttgatcaacacaaggmtgtagcgcaagcatttgtacaagattataaaaagtctggctttaaaatgaatgatcgcaagcaaagtgtagacattatgacgcatcattttaaacaaagtcgtgacgttttaacacagtcagcggcatggacatcctatggtgatttaacaattaagccatccggmtatcaagaaattacgacattggtaaaacaacatcatttgtttaatccacctgcatatgatgactttgttgaaccgtcattgtataaggaggcatcrcgttcatga

SEQ ID NO: 1004 - DNA, 1143 bp, Staphylococcus aureus
atgtcatcagcaagtacacaatcwactaagacrtccgacatacataatgaatctatcrataaacaaatggaagcyaaagcgcatgaaacagcgcaaaatrcagatttaaaaamygaagcaagaagtttatttgataatgcaaccaaatcaatcggtagactagcbggcaatgatgaaagcttaaatcttaatttaaaagatatgytttctgaagtatttaagccrcatactaaaaacgaagcagatgaaatatttatwgcgggtactgctaaaactacgccagcaatttgtgacatatcagaagaatgggggaagccatggctcttttctcgagtattcatcgctttcacagtaacatttattggattatgggtcatggcagcratttttaataacactaacgcgattccgggtctcatttttataggggctttaacagtaccattatcgggtttgttcttyttttatgaatcaaatgcgtttaaaaatattagcatttttgaagttattatcatgttctttattggcggcgtattttcattactaagtacgatgktattatatagatttgtcgtttttagtgatcaattcgaaaggtttggttctttaacatttttcgatgcatttttagtaggattagttgaagaaactggaaaagcrctcattattgtttatttcgtcaataaattgaaaacaaataagattttgaatggattattaatcggtgctgctattggtgcagggttcgcagtttttgaatcagcaggttatattttgaatttcgctttaggrgaaaatgtcccattattagatattgtcttcacacgtgcgtggactgcgattggtggtcatttagtttggtcagcgattgttggtgctgcaatagttattgcgaaagaacagcatggctttgaattcaaagatatwtttgataaacgctttttaatattctttttatcagccgttgktttacatggcatttgggatacatctttaactrtacttggcagtgatacgttraaaatatttattttaatcgttattgtgtggatacttgtattcattttaatgggggcaggtttaaaacaagtgaatttactgcagaaagaatttaaagaacaacagaaaaaagtagacgaataa

SEQ ID NO: 1005 - DNA, 273 bp, Staphylococcus aureus
atttttggcactatattatatttaactttagcacttggattatcaacagcagcttatgcatctacagaatacgcagaaggaggcacttggagtcacggtgtcggcagtaagtatgtttggtcttattattatcatggtcataaaggacatggtgcaacagctattggaaaatatagatcatttagtggttatacaagagctggtgtaaaagcaaaagcatcagctactaaacataattgctgggtcaatagagcgtattataacatttattaa

SEQ ID NO: 1006 - DNA, 111 bp, Staphylococcus aureus
atgaaaaaagtttatataaaattaaaatatatcgttcgttatcatttagcgtttgtttttatttcaagcttttcgctaaatttttccaaacaaaaatatgttactgtaaat

SEQ ID NO: 1007 - DNA, 219 bp, Staphylococcus aureus
atgttaagtaaacattttatactttatcagaacaaaaaagacatgcatcaacatgtcagtgaaactaatccatattatcttaacaacgaaattgaatcgaacctgaaaaacgtatttacaaatcgcaactactctatccaaggcgaaatcgcaaaatctgatccccgaaataacatatctcgaaaaaaattccataattcaatcatcttcaataattaa

SEQ ID NO: 1008 - DNA, 1383 bp, Staphylococcus aureus
ttgaaaaacactttataccatcaactttatgaaaaattaaaaaaacaaataattgaaggtcaatttaaagaaggygataaattttattctaaaagacaattaagcaaacatttatctatyagccaaacaaccgtagarcatgcatatcaacttctattagaygaaggttacatttattcaagacctcgctctggatattttgtgtccgaaattgaatctttaacaattttaaacaatcaacctatcccytctctttttgatgatgattcatataaaccaaaagcgagtgatgaagcttatgattatgcttttaatttggatgaaatagatacgaaacatttccctatagaacttttcagaaagtattccaaagatctttatgatacaaatcatttaaatcaattacgtagaggacaytttcaaggagaattacatttrmgrtttcaactggcattttatttatttactaatcgtggygtaatttgtgatcctaatcaaattataattggytcatctaccgaacaattagtaaatcaattagtcgatttactttatacttcaacrtttattatcgaaaaacctagttatccaccaatcaaaaatattttagataaaaaacaagttgaatatgaacaaattgaagttgaagataatggaataaacgtagatgaagttattaaatcacaaaaaaatatagtatatataacgccttcccatcaatttccaactggatatgtratggayttaaaaaarcgaactcaattaatacaatgggctcaagaaaaagaagaacgatttattatagaagatgattatgattccgagtttagatatttcggyaaaccyattccagcaattcaaggtctatattcaagaggagaaaaagtgatttatatcagtacattttcaaagtctatttttcctagctgtcgwgttgcatatatggtgttaccctattctataatgaaaaaatatcattctcaaaatcacattgaaggcaacactgtacctgttcatatgcaaaaccttattgcaacgtttatatcttccggtggttttgaaaggcatttaaataaaatgagacgaatttatcgtagaaaactaacctatattttaaaaagattraaaccwtacaaagagcarcttgatattcaaggtgctgaaacrggtatgcattttacaattacagtaaaaaatggattaacattacaagagtgtcttgatagagcaaayaaagtaaagttaaaattacaagtttataattttgatgatgaycaagactataagaaaacccctaaatttatattaggctttggcggtatagacgatgatgctttaaaaccgcatgtagacgctctaataaaatcattaattataaagtaa

SEQ ID NO: 1009 - DNA, 810 bp, Staphylococcus aureus
atggatttaaaacatgccacaccatattctccaacaacagttcgtgtgaaagctggcgaatacagtgattgtcatgatgcggatctagttgtcatctgtgctggtgctgcacaaaaacctggagaaacacgtttagatttagtatctaaaaacttgaaaatattcaaatcaattgttggtgaagtaatggcatcaaaatttgatggtattttcttggtagctacaaatcctgttgatattttagcgtatgcaacatggaaattctctggtttacctaaagaacgtgttataggttctggtacaattttagactctgcacgctttagattattgttaagcgaagcgttcgatgttgcgccacgtagcgtcgatgctcaaattattggtgaacatggtgacactgaattaccagtatggtcacacgctaatattgcgggtcaacctttgaagacattacttgaacaacgtcctgagggcaaagcgcaaattgaacaaatttttgttcaaacacgtgatgcagcatatgacattattcaagctaaaggtgccacttattatggtgttgcaatgggattagctagaattactgaagcgattttcagaaatgaagatgcygtattgactgtatcagcattattagaaggcgaatatgakgaagaagatgtttatattggtgttccagcagtcatcaatagaaacggtattcgcaacgtcgtagaaatcccattaaacgacgaagaacaaagcaagttcgcacattcagctaaaacattaaaagatattatggctgaagcagaagaacttaaataa

SEQ ID NO: 1010 - DNA, 108 bp, Staphylococcus aureus
atgattgaaatggtagaaataattacaatggctactgcaattattgttggaattatatatttcagtttagtcatcatttatgctcccttgatttcaaattcatatcat

SEQ ID NO: 1011 - DNA, 1512 bp, Staphylococcus aureus
atgatatattcagtagggaataggttaggaaataaattaaccggaattgaaaaagcgatgattaatagacacaacttatttaaaaatcactcgataactagtaaattgatttttgcatcgtggtcacctcgtttacattttaatgcaagtctatttcaaattgaagatgacgatatattaagcttatatgatgtgctacaagacagtataaatataaaaagcatccataaggactggatcactcattggactaaagagtgtaattatacactaaaatttattgaaaataccaatgatataaagatatatgaaaaaagcaactatagaatgtatgtccattttaatgatagtaattaccaacatttggattacataaatcattttgatgtaaatcaacgtaaaatacgtcgagatctatatgattcaagaggctttttaagttgttcaagaactttaacaacaaatcaaaaagtagtttgtgaacattattacactcctgaaggtactataaagttccaaaaattttttaatccagaacttgaaaattcacaatcacaacttattatttataacaccgattctcaacttaagtattttaataatgatcaggaattactagcatttgcaattgaaaaattgtataaaaatggagatattttcctgagtgataaaaatataaatactgcaccaatattcaataatactagtgaaacaatacctgttttagctgttttgcatagtactcatgtcwagaatattgacatggtatatgaatcggacatcaaaaatacttataaacatgtttttaacaatctaaatagatactctgggataattgtatcgactaaacagcaacaattggatatatcagctcgaataaataatgaaatccctgttcatactataccagtaggatatattgatgaacattttactaatttaaaaagaaataatcatagtataaataataataaaattatttccgttgcacgttattctcctgaaaaacagttgaatcatcaaattgaattagtttctaaattaattaaagaatttcctaacatccractacatttgtatgggtttggtaaagaagaagaaaaatacaagcaactaatcactgaatataatttagaaaacaatgtgtttttacgagggtttagaagaaatttaagtgctgagattcaagatgcttatatgtctctaattactagtaatatggaaggatttaatttaggtttattagaaactataactgaaggcatacctccagttggctataattcgaagtatggtccttccgaattaatattaaataatgaaaatggttatttaattaacaaaaatgataaagatgaattatataatcgagtgcgaaacctattattagataagactttaagagatactttttctcaagaatgtatcaagcactctaaagctttttcaagtaaaattgttatgaagttatgggaagatagattttctacaattaattcaagttatgaatag

SEQ ID NO: 1012 - DNA, 936 bp, Staphylococcus aureus
atgaaaagaaagattattatggattgtgatccaggacacgatgatgcaatagcattaattttagcgggggcaattgacagtccactagagatattagctgtaacmacagtcgcaggtaatcaatcagttgacaagaayacgacaaacgccttgaacgtattrgatattatgggacgccaagatatagyagtagcgaaaggtgcggataggccgttaattaaacyagytgcctttgcttctgaaatacatggggaatctggattagatggtccgaaactaccgtcgacaccatcacgtcaagcagttgcaatgccagcatcagatgtgattatwaacaaagtgatgacgagtgatacacctgtaacaattgtagcgacaggtcctcttacgaatgtagcaacggcattgattcgtgagccaagaatcgctgagcatattgaatctattactttgatgggtggtggtacatttggaaattggacgcctacagcagaattcaatatttgggtagatgctgaagcagcgaagcgtgtttttgaaagtgggattactataaatgtgtttggtttagatgtaacacatcaagttttagccgayrawcacgtgattgaacgctttgaaagtatcaataatcctgttgcacagttcgtcgtagaattattgcaattctttaagaagacatacaagactcactttaatatggayggtggtccaatacatgatgcttgtacaattttgtatttgttacaaccagaattgtttacaatggtacccgttaatatcgacattgaacatcaaagtccactaacttatggcactatggctgtmgatttaaatcatgttacaggtaagcctgccaatgcytattttgctacagcagttgatgttgaagaagtgtggaacttgatagaycataagttacgtacatacgaataa

SEQ ID NO: 1013 - DNA, 1215 bp, Staphylococcus aureus
atgcatattctaattgggattatcggaattatcttctttttagcacttgcgtttctatttagctcagacaggaaaaatattcgctggaaatatgtaggaattttacttgcaattcagcttatctttgcatttatcttgcttaaaactacaatgggaatcaaggttattggtggtatttcraacggttttaactacttattattaaaagcwgcagatggtgttaactttgtattcggtggtattcaatatatcgatcctaagcaaccaccattcttcttcagtgtattattacctatcgtatttatttcagcgattatcggtatccttcaatacacaaagattttacctttaatcattaatgttttaggattcttaatttctaaaattaatggtatgggacgtttagaatcatacaatgcagttgctgcagcaattttrggacaatctgaagtatttatttcaattaaaaaacaattaccatacatacctaagcaacgtttatacacattaacagcttcagcaatgtcgactgtttctgcttcaattatcggtgcatactttaccttaattgaacctaaatatgttgtaacggctgttgtcttaaacttatttggtggtttyatcatcgcttcaattattaacccttataaagttaatgaagaagatgacaaattattagttgaagaaactgaagaaagacaacaatcattcttygaaatgctaggagaatatattttagatggatttaaagtagctgtcattgtaggygcaatgytaatcggwtacattgcyattatcgctctattaaatggaattgtaagcaatatctttagtacagtttcaggtggcgctatttcttgggatttccaaacattaattggttttgtctttgcaccatttgcattcttagtmggtgtgccatggcaagatgcagttcaagccggttcagttatggcracaaaactattatctaacgaatttgtagcaatgcaagcacttggtaaacttagtgatttatctgaacacgcaaaaggtgttacatctgtattcttagtatcatttgctaactttagctctatyggtattatttcaggtgckattaaatcacttaatgacaaaaaaggagatacagttgcccgctttggtttgaaaytattattcggtgcaacactagtatctttcatttcagctgcaatcgctggattctttatttaa

SEQ ID NO: 1014 - DNA, 222 bp, Staphylococcus aureus
ttgaacgagaattcaaaaacactatatcgtgacttagttgaagaaaaaataataccagagataaaagaagatggagatagcgatttaacaatagaagaaatagatttaattggtagtcatttagataaagaaatcgaagattgtgctcaaattagaaaacagacccgtaaaaaagaactgaaagatgagacagtagatgctcatctttttttagaacttttt

SEQ ID NO: 1015 - DNA, 183 bp, Staphylococcus aureus
ttgattatctttcgttttaaagttaatgctttctttccagtcaaactgtgcttgatgatcaggttttgtctcgaatcttgttgtatctttaggcgacatctattgataacatttcataatataaggagtaaattcatcatgtttaagtatataagctctaaatgtataatatgcacaggttaa

SEQ ID NO: 1016 - DNA, 111 bp, Staphylococcus aureus
atgatgtacatgctcattttgraaatatgtgttcaaagtgtgtacatcggtgtgacgattgatgataaattgagctcagatgctcaaaggagratcgaacatgaacgggga

SEQ ID NO: 1017 - DNA, 1176 bp, Staphylococcus aureus
gtgttagattggttycaactagcaaataataaagaaaataaaacaattcaactcagacgttatttacaccaatatcctgagttatcttttgaagaatttcaaacacatgattatattgttaaccaattaagccagttatcttgtgatattgaaactcctatcggccgcaatggtatcaaagccacatttaaaggyttgggcacaggacctaccattgcattaagagctgactttgatgcgttacctgtcgaggaattaaacgatgtgccttataagtctaaaaatccaggatgtatgcatgcgtgtgggcatgatggtcatacagcaattttacttacygtagcagarattttagatgaacataaacatttattagaaggtaatgttgtattaatattccagtacggtgaagaaatcatgccaggtggttctcaagaaatgatwgatgctggatgtctggaaaatgtagatagaatttacggtacacatttatggagtggttatcctactggaactattcattcrcgtgcgggggcaatcatggcctctccagatgaatttagygtcacawttaaaggtcgtggyggtcatggtgccaaacctcatgaaaccattgacccaatagtaatcatggcagagttcattttaagtgcacaaaaaataatttcacgtacgatygatccagttaaacaagctgtactttcatttggaatgattcaagcaggyaccacagatagcgttattcctgatcaagcattttgtaaaggtacagttmgwacwttygaytcrrawatacagaatcatgtmatgsayaaaatggataagctwytacaaggtttrgcaatwgcaaatgayattramtatgayttgaattatattaaaggrtayttgcctgtccataayaacgagaaagcatatcaagttattaaagaagcaacaaatgacttacatgtacgctttaatgaatcagatttaatgatgattggagaagatttttcacattatttgaaagtacgaccaggtgcattctttctgactggttgyggtaatgaaagtaaaggtattacagcgccacaccataatcccaaatttgatattgatgaaaaatcattaaaatacgctgtagctgtatttttraaaatcatwgaattagagcaagtatttaaaacaaattaa

SEQ ID NO: 1018 - DNA, 198 bp, Staphylococcus aureus
ttgagtatactaacaattattttaatagcactattagtcatcctcctttttagagttggactttctattttgcgatttttaatttatgtcggacttgttttattatgtatttacttaggatatcaaggtttaatttggttgctcgatttttttcaaataaatagtgggtttttaccgcactttcaatttaacaattaa

SEQ ID NO: 1019 - DNA, 177 bp, Staphylococcus aureus
atgccaaactcgcatcactcatttaatggaagcagcacgtcttcacataaagtaccggttccttacgctatgcatgttgccccactttgcataaagtacttatcgttaactcaacgcaagttgttcctattcacaaaaagcacatacagttatctgcatggagcacattttcattga

SEQ ID NO: 1020 - DNA, 2097 bp, Staphylococcus aureus
atgaacggggataatcagcaaatactcagagaaattgtattgaatcctactattcatggtaaagaacttgaatcgatatttggtttgtctcgtagacaactaggatatcgcattcaaaaaatcaatttgtggcttgaacaagagggttatccaaaacttgaaagaacaagccaaggaaattttattgtaagttctgaaatcatgacgttattcaarcgagatgtatcrgagcagcaaatgttaaacggcaacaatgtcatttttagcatagaaacacgtcgttattatttaatgctcatgctttttagtaaggaaaaygcaatgtctctaaaccatttttcaattgatttacaagtcagtaaaaatactgtcattcacgatataaatcatgtgaaagagcaattggaaratcatggtttgtcacttaagtattctcgaaarcatggttatgaaattgttggtgatgaatttgaagttcgccgtttcttcattaagttgattgatcaaaggttraatcatgatattactaaaagtgaagttttaaaggcgctcaacttaacattcgaagatatcgcatatcaaaaagacaaratcaaacaggtagaacaatttttgaagagtcgctttatagacaaatcactkagttcattgccttaygtcctttgtgtgattcgtagacgaattcaaagtggtcatgtgatkaatccattaaatattaattatcagtatttgagggatacgaaagaatatcaagcaacggagattatgacgcaacwtgagcckgatttgccagaagcggaaaagttatatttgacrytacacttactttcaacaagtgtgcaatggactgatttgcargaatcagatarcatatcgaatttaacgatggcyatygmtcaaatgattcaccattttgaacaaatyacttttattaacattgaagataaggagaaattatcacagcaactcttgttacatttaacgcctgctttttataggattaaatataacttaacggatcgtgatgaattaataaatcctttacaaggaaattatcaatccttatttcatatggtgaaacaatcatgtcaatcgttaactgaatatttcggaaaatcrttgcctgataatgaaatagcatatttaaccatgttgttyggaggtagtttgagacgtcaagatgaaaacttcgatggcaagataaaagctattatcgtgtgtacacaaggyacgtcagtatcacaaatgatgttatacgagttgcgaaacttatttccagaaattattttcttagatgcgatttcacttagaacatttgaaaattacacattagattatgacatcgtcttttcaccaatgtttgtcytaacacataaaaaattatttatcacaaaagtagctttatctgaaaatgagcaaygaaagttacgtaaagaagtgatgaagtacattaataaggaatcggctgacattgataaggaaataaacaagttaatggcattaattgaacgcacwacgacagttaatgacattacagaactacgtgatggtttagaagattttattgcsaattataattcaatttcaaccattaatggatcgattgtcacacaaaataagacattagatttagctgacttgataccrgcaaggcacgtgaaaagaatrcatcatgttgaaaatattgatgaagctattgctaaagcaagtgatgtgttagttgctaatcattttattgatattaaatatattcatgagatgcaacaggyatttgatgattcgtatatggttatcatgcaaaatattgctattccacatgcatactctgaaaagcatgtacataaaacagcgatgagtatgttgatattacaagaaccaatatacatgtcagatggcacagcaatccatattattgtacctattgctgctgttgataaagtgacacacttaagagcgttactacaattgagagatgtggcgcaaracaatgacgcaattaagcgcatcatacaaagtcgcaaaaattctgatgtaaatgagattttaaaaaattattcaaataaagaagcgagggaaaatggatgggacagcaattag

SEQ ID NO: 1021 - DNA, 663 bp, Staphylococcus aureus
atgaataattacggtattccacaaaatgccattataaccattgcaggtacagttggtgttggraaatcaacactaacgcaagcacttgcagataaattaaactttaaaacgtcttttgaaaatgtcgaacataatccatatttagataaattttayagcgattttgaacgwtggagtttccatttrcaaatttayttcttagctgaacgytttaaagaacaaaagcgtatgtttgaatatggtggtggctttgtccaagatcgatcaatttatgaagatgttgatatttttgcaaaaatgcatgaagaagaaggcacaatgagtaaagargatttcaaaacatattcagacttatttaatgccatggtcatgacaccttattttcctaaaccwgatgtaatgatttatttagaatgtaactatgatgaggtcattgatcgtattattgaacgyggtcgcgaaatggaaattaatacagaccctgaatactggaaaaagctatttaaacgctatgacgattggattaatagctttaatgcatgtccwgtkgtacgtatcaatattaatgaatatgatatccataaggaccccgaatctttaaatcctatgataracaaaattgctcgaattattcaaacatatcgacaagtagatacacgataa

SEQ ID NO: 1022 - DNA, 93 bp, Staphylococcus aureus
atggataaaattaagtgcatacttaatcgaattatcagttttcttttaattgttcacagcacgttcctttttatttttaaagtcgagtgttaa

SEQ ID NO: 1023 - DNA, 174 bp, Staphylococcus aureus
ttgatcggaatttttgttgcaatatacggtatgaagcgagcaacatattggttaaacttattgattttatttaccaatattttttattttctacacttctgtgttttacttttgttaaaatatataggatttaaattatttatttatkwakgrtgtgtattgttatttacctaa

SEQ ID NO: 1024 - DNA, 129 bp, Staphylococcus aureus
atgttgtttattctttattacagagtgaatcggattggtgaaaatcgaaattttgagatttttaccaattcgatttttttcatagaaattaaaaaagccaacaaggctcttgaaaccttgttggcgtaa

SEQ ID NO: 1025 - DNA, 192 bp, Staphylococcus aureus
attattgataagtattatcctatcctcgaaaaattactttcagacactagtgaacaaaaattttactataagcgtatactttggcaatattcgaaggaaaaacatggattaacctgtgcatattatacatttagagcttatatacttaaacatgatgaatttactccttatattatgaaatgttatcaatag

SEQ ID NO: 1026 - DNA, 156 bp, Staphylococcus aureus
ttgttttgcaaatattttcacaataaaattttaaaaatcctaaaacaatttttttgttttactttttcaaaatatctatactgtcacattgatgacactttatttaattttgtcacatttattttgacaaagttgatttttgtttatattgagtaa

SEQ ID NO: 1027 - DNA, 150 bp, Staphylococcus aureus
ttggagttgcgtttttggaatttggagtttggttttcggaattcgacatttggaattcagaattataatgagtggaaaattttaattattgcgtgtttaatgacttggttttgtagcgatttttatttgatgaattgtttttttgtttaa

SEQ ID NO: 1028 - DNA, 120 bp, Staphylococcus aureus
atgatattttcgcaaaatatatttcgtcgtcccaccccaacttgcattgtctgtagaaattgggaatccaatttctctttgttggggcccctccccaacttgcacattattgtaagctga

SEQ ID NO: 1029 - DNA, 468 bp, Staphylococcus aureus
atgggacagcaattagtgcataaagaaaatataatgctcaatttgtcggcaactgataaagaatcygtattgtcacaaatgtcagatgtgttatttcaaaatgggttcgtraagtcaacgtttaaagatgcagtcatcgacagagaaaaagartttgctactggtttaccaacrcatctatgttcggtygctataccgcatacagatgtcgaacatattaaccatagaacgataggtgtggctgttctagaaaaagargtgccgtttattgaaatgggaacacttgatcaacagacagaagtgaaaatcgtttttatgttagcratggataaagtagatgatcaacttaagytgttacaacagttgatgcaaatttttcaaagtgaagaaaaattggagcagattctrcgaacgaaagatgaaacrattttagcaacactaatcaatgattatttgraatataactaa

SEQ ID NO: 1030 - DNA, 618 bp, Staphylococcus aureus
atgaacaaaccttttatagcaattgaaggtcctattggcgtaggtaaatcttcacttgcacacaaattaagtcaaactttagatttttatgaagaaaaagaaatcatcacagaaaatccatttttatcagacttttatgaagatatctctaaatggagttttcaaactgaaatgttctttttatgcaatagatataagcaatttcaagatgtaacacaactaaatcaaggtgtagttagtgattatcatatacataaaaataagatatttgctaaaaatactttgagtyctgttgaatttcagaaattcagtaaaatttatgatattttaactgaagatatgattatgccgaatatgattatctttttagatgcagaccttgatgtgttaaaatctagaattgctaaacgtaaccgtagttttgagcatcaaatagaagatgaatatctgttaaagttaaaaaaagattatcgtgagtattatgagtccttacaaagtaatggttcaaatgtagttttaatcgatacaacttctattgattttctwaaaaatgaacaagattacgaagatatattacatattatattacctatgataggagatattaccaatgaataa

SEQ ID NO: 1031 - DNA, 192 bp, Staphylococcus aureus
ttgttccattgtaatctccctttcgttaatcatatttatatttttaattattgttaccgttataatttacaagattcattatcaagccacttcatttcaatcgtcattcactttggaaaatggactttatatttcatcactagtaaaatgaaaacccgctacaagtacacatctatatggagactcatttga

SEQ ID NO: 1032 - DNA, 255 bp, Staphylococcus aureus
ttgtcaccttttttattgttgcgcgttcgtaaccaatgtgcaaaaaacgcaacaagacagccgcttaaagctgaagtcatgatgttaattaataaattgaacatccatcatacacctcctctctgcgttaaagtaacgcccgagatgttaggcgaccattatattatatcatttatttattatatttcacgcaatattaaagttcgagtaaagcgttttttagtggtttacgctactttaattactatcttttaa

SEQ ID NO: 1033 - DNA, 234 bp, Staphylococcus aureus
ttgttaagaagtctatgyaaacawaatagaattttaatcaatgctattaaggtgggaattgaaatgaaatataaaattagtttggcttataatttagcaattataatagggtcgctaattatattatgtatactaatatctagaggttatgatatwtatgtaatcttgattccaattttgactattttagctagtttaatcaatttawtttgtgatattaaaaagcataaatga

SEQ ID NO: 1034 - DNA, 279 bp, Staphylococcus aureus
atgaaacaagtattagtagcgtgtggtgcaggtattgcaacgtcaacagtagtaaataatgcaattgargaaatggcaaaggaacacaatattaaagtagatattaaacaaatcaaaattacagaagttggaccttatgaagacactgcagatttattagttacaactgcaatgacaaaraaagaatataaattcccagttatcaacgcacgtaatttcttaactggtattggtattgaagaaacaaaacaacaaatcttaacagagttacaaaaataa

SEQ ID NO: 1035 - DNA, 1491 bp, Staphylococcus aureus
atgaattattttgtaggtaatagtttaggtgttaatttaactgggatagaraaagcaattattaatcgtttaaatttatttaaagaaatgggaagaccagyrcaatgtgtatttctgtcatggaatagatatttatatagaaatgcccaaaattatattactagytctgactatatyaatatgtatgatttcttccaagaagcaacatatttagaacgcaatgaaccatttgactggttgtcrtattggactgatgaatgtcattatactttaaaacatgttgaaaatagtcatgactttagaatatatgatcaagagcgtttcttaatgtatgcccattttcaagatcctaaatatcgtatattagattatgtraatcattttgatagtcaaagacgaaaagtaaaacgtgatttttatgatgtgcgtggctttttaagttgtagtaggattcttgttgataaacaacaaacattatgtgaatttttctataatccagaaggtgacacaaaattagaaaagtatttttcttacaargatggcaaaccagaagtacaaaaaattattgtttactatgctaacaaacaatatttctttaataatgaaacggaattaggcgcatttttcattaaacaactatatcaacatggggatttatttttcagtgaycgtaatgtgtayacagcacctattttcaacttaacrcctgagtcaatcccagtagtagctgtgcttcacagtacacacattaaaaatattgatgcattagattcatcgccatttaaaaatgtmtataaagcgatgtttgaaaatttatctcgatatcgtgcmattatcgtttctactgagcagcaaaaattagatrttgaaaaacgtattaaccatactattccarttgttaatattcctgtcggctatagtgaaacaattgatacaccagtccaaacattagatcagcrcagtgttaaattaatttccgttgctcgttattcacctgaaaaacaattacatcaacaaattgaattarttaaacgcttagtmycktaygtmccraaartagarcttcatatgtatggttttggttctgaaagtaaaaaattaaatgaattgatacaaaaatayggattggaaaatcatgtttayttacgyggctttttaagcaatctaraccaagaatayagcgatgcytayttragtttaataacragtaacatggaaggtttctckttagcgctacttgaatctttagcacatggtgttccagttattagttatgatattaaatatggwcctrrygaaytrattackycwgatttcaatggttatttaattactaaaaatgatgaagatgccctatttgataaagtaaaatatgtgattgatcatcctgaagtacarcaacgactgtcaaaaggtagtttrgcaaaagcrcaacaatatagtaaagcgtcgttaattaaacaatgggaccaatttgttcgtctwatataa

SEQ ID NO: 1036 - DNA, 359 bp, Staphylococcus aureus
ggggacgttcatggattcgacaggggtcccccgagctcattaagcgtgtcggagggttggcttcgtcatcaacacacacagtttataataactggcaaatcaaacaataatttcgcagtagctgcctaatcgcactctgcatcgcctaacagcatttcctatgtgctgttaacgcgattcaaccttaataggatatgctaaacactgccgtttgaagtctgtttagaagaaacttaatcaagctagcatcatgttggttgtttatcacttttcatgatgcgaaacctttcgataaactacacacgtagaaagatgtgtatcaggacctctggacgcgggttcaaatcccgccgtctcca

SEQ ID NO: 1037 - DNA, 72 bp, Staphylococcus aureus
ctccttgtggtgtaatggataacacgtaagattccggttcttaagataggggttcaattcccttcaaggagg

SEQ ID NO: 1038 - DNA, 89 bp, Staphylococcus aureus
ggaaacgtactcaagttggctgaagaggcgcccctgctaagggtgtaggtcgcgaaagcggcgcgagggttcgaatccctccgtttccg

SEQ ID NO: 1039 - DNA, 75 bp, Staphylococcus aureus
tccacagtagctcagtggtagagctatcggctgttaaccgatcggtcgtaggttcgagtcctacctgtggagcca

SEQ ID NO: 1040 - DNA, 74 bp, Staphylococcus aureus
gtcctggtagctcagctggatagagcaatggccttctaagccatcggtcgggggttcgaatccctcccaggacg

SEQ ID NO: 1041 - DNA, 1260 bp, Staphylococcus aureus
atgagttacttcactgattttgtaaggggatttttagatttaggtgcaactgttattttaccggttgtcatattcttgcttggcctattctttaggcagaaaattggagcggcatttaggtctggtttaacaataggtgtggcttttgtagggattttcttagtcatcgatttattagttaaaaatttagggccagcagcacaagcgatggttaaaaatttaggcgtcagtctgaatgtgattgatgtaggttggccagcaacatcatctatcgcktgggcatcatctgtcgcagcatttattattccactcggaatcatwgttaacgttgtattgctagtaactaaagtgacaaagacgatgaatgtagatatttggaatttttggcattatacgtttacagcagcaatggtttatgccgtatcaggcagtatttggcaagcgttattagcagcagttattttccaarttatctgtttgaaagtagcagattggacagcaccgatgatgagtgagttctttgatttaccaggtgtatcgattgckacaggaagyacratttcttatgcaccaggtatttacttagttaaattgttacaaaragtacccggtctgaataagttagatgctgatcctgaaacaattcaaaaacgttttggcgcatttggagagtctatmtttgtcggmttaattttaggtttaggtattggtgtgttagcaggttacaaacctggagacatcattaatttaggaatgtcaatggctgcagtaatggtattaatgcctagaatggtaaaaatcttaatggaaggtttaatgccagtttcagagtctgcaagaacatggctaaataaacgttttggcgaacgtgaaatttatattggattggatgcggctgtagcattaggtcatccagcrgttatttcgacagcattaattttagtacctatcactgttttattagccgttattttaccaggaaaccaagtaytaccttttggtgacttagcaackataccatttgttgtcgcgtttattgttggtgcagcaagaggaaacattattcattctgtcattgtgggyacgattatgattgcaatttcaytatatattgcaacagacgtagcaccyattttcacagatatggcgaaaggtacgaatgtacaaatgccaaaaggttcatctgaaatttcaagtattgatcaaggtggtaatatcgttaactatcttatctttaaactatttagtctattcaattaa

SEQ ID NO: 1042 - DNA, 879 bp, Staphylococcus aureus
atgactgaatttgatttatcgacacgagaaggtcgttggaaacactttggttccgtagatcctattgaaggcacgaaacctactactaagaacgaaatgacagayttacaaagtacacataaagatttyttatttgaaatagaagaagttggtattaaaaacttagtgtaccctgtacttgttgaccagtatcaaacagctggcacatttagtttttcaacaagtttaacaaaagacgaaaaaggtattaatatgagccgtatwatygaaagtgttgaaaagcactatgataatggtattgaacttgaatttaatacactttatcaggtgttaygcactttacaaacgaatatgaaacaaaatgcggcaggcgttgatgtttctgggaaatggttctttgaycgctatagtccaaccacaaatattaaagcagttggtaatgccgatgtcacttatggattagcaattgacggtgataaagttacacgtaaagaacttactattgaagcaactgtcacaacgctatgcccttgttcaaaagaaataagtgartattcagcgcacaaccaacgtggtgttgtcactgttaaaacatatattaataaagatcaaracatagttgatgactataaaaayaaaattttagatgcaatggaagctaatgcaagttcaattctataccctattttaaaacgtcctgatgaaaaacgtgtgacagagcgtgcatatgaaaatccacgytttgtcgaagacttaattcgtttaattgccgcggacttagttgaatttgattggttagamggtttcgatatcgaatgtcgtaaygaagagtctatccatcaacatgatgctttcgctaaattaaagtatcgcaaataa

SEQ ID NO: 1043 - DNA, 89 bp, Staphylococcus aureus
ggagagttgtccgagttggccgaaggagcacgcctggaaagtgtgtaggcgccacaagcgtctcgagggttcgaatccctcactctccg

SEQ ID NO: 1044 - DNA, 74 bp, Staphylococcus aureus
gcgggtgtagtttaatggcaaaacctcagccttccaagctgatgttgtgggttcgattcccatcacccgctcca

SEQ ID NO: 1045 - DNA, 76 bp, Staphylococcus aureus
gcggytgtggtgaagtggttaacacatcggattgtggttccgacattcgagggttcgatccccttcagccgcccca

SEQ ID NO: 1046 - DNA, 73 bp, Staphylococcus aureus
ggttcagtagctcagttggtagagcaatggattgaagctccatgtgtcggcagttcgactctgtcctgaacca

SEQ ID NO: 1047 - DNA, 74 bp, Staphylococcus aureus
ggcggcatagccaagtggtaaggcagaggtctgcaaaacctttatcaccggttcaaatccggttgccgcctcca

SEQ ID NO: 1048 - DNA, 75 bp, Staphylococcus aureus
tgggctatagccaagcggtaaggcaacggactttgactccgtcactcgttggttcgaatccagctagcccagcca

SEQ ID NO: 1049 - DNA, 84 bp, Staphylococcus aureus
ggaggggtagcgaagtggctaaacgcggcggactgtaaatccgctccttcgggttcggcagttcgaatctgcccccctccacca

SEQ ID NO: 1050 - DNA, 74 bp, Staphylococcus aureus
ggacctttagctcagttggttagagctaacggctcataaccgttcggtcgcaggttcgagtcctgcaaggtcca

SEQ ID NO: 1051 - DNA, 77 bp, Staphylococcus aureus
ggcggtgtagctcagctggctagagcgtacggttcatacccgtgaggtcgggggttcgatcccctccaccgccacta

SEQ ID NO: 1052 - DNA, 82 bp, Staphylococcus aureus
gcgggtgtggcggaattggcagacgcactagacttaggatctagcgccttacggcgtgggggttcgactcccttcacccgca

SEQ ID NO: 1053 - DNA, 86 bp, Staphylococcus aureus
gcggtcgtggcggaatggcagacgcgctaggttgagggcctagtgggagaaatcccgtggaggttcaagtcctctcggccgcatca

SEQ ID NO: 1054 - DNA, 1056 bp, Staphylococcus aureus
gtgaaagctttagtaaaaacaagagaaggacatggcaacttagaacttcttgataaagaagttgcaacaccgctagatgataaagtaaagattaaagtacattatgcaggaatttgtggcacagayattcatacttatgaaggkcattataaagttaattttccagtgacattaggtcatgaattttctggtgaaatcgttgaagttggagcagacgttaaagattttaaagttggtgaccgtgtcacwtctgaaackacattctatgtttgtaatgagtgtgaatactgtraatcaaaagactataatttatgcaaccatcgaaaaggtattggaacacaagttgatggcgyatttactaattatgtcattgcacgtgaagaaagtttgcatcatattccagaygaagtrtcgtatcagtctgcagctatgacagaaccattagcatgtgcacatcatggcgtttctaagattcaagtsaaytcwggcgatgtagcagttgtaatgggacctgggccaatcggattacttgtagcacaagtgttraaaagtaaaggcgcaactgttgtggtaactggattggacaatgacaaagtcagattagataaagcagaagcattgcacatggattatgtagtcaatttacaacaaacagacttaaaaacgtatatcaatggaattacagacggwtacggtgcagatgttgttgttgaatgttcaggtgcagttccagcagcacgacaaggtttrgatattwtacgcaaaaaaggtttctacagtcaaataggtatttttaaggatgctgaaattmcatttgatatggaaaaagtgattcaaaaagaaataacagttgttggtagtagaagtcaaaagccrgcagattgggaaccttcattgcaacttatggcggatggtttagtaaatgctgaagctttggtgacaaaaatatatgatatttcgaaatgggacgaggcgtatcaacatttaaaatcyggcgaaggtattaaagyattacttaagccgctcgatttagatgaaaatgaaggagagaattaa

SEQ ID NO: 1055 - DNA, 666 bp, Staphylococcus aureus
atgactgacgaaagacatgtattagtaatatttccacatcctgatgatgaaaccttctcatctgcaggcacattagcaarttatatccaaaaaggcayacctgtaacatatgcatgtttaaccctaggacaaatgggcagaaatttaggtaatcccccatttgcaacacgcgaatcattaccaagtattcgtgagcgtgaactagaagaagcttgtaaagttatyggtattactgatttaagaaaaatgggtttacgtgacaaaactgtcgaatttgaaccctaygaacatatagatggtatgattaaatctttaatcgatgatacaaatccatcattgattatttcattttatcctggatatgcagtacatcctgaycacgaagcaacagcagacgctgtaattcgaacggttgaacgcatrcctaaagaagaacgccctcgtttaactttagttgcgttcagtaatgatgcaaccgaagcwcttggagaacctgatatycaaaatgatattacagattttaaagaacttaaaattaaggcatttgaagcacatgcttctcaaacaggtccatttttaaaacaattagcaagtcctgaaatcgatggtaaacaacacagctttttaacagtcgaaccatattggacatatcactttaaatcttaa

SEQ ID NO: 1056 - DNA, 363 bp, Staphylococcus aureus
gtgttggaaccaattaaagaacaagaagttatagatttacttgcttcttttgaacataaacctgtgtatctgcatgttgaaacgacaaatggggcctatgcgaaccatttcgatcaacgtgtttttaatgctggtacwtttttaagaaacatacaartaacatatacrcatgcacaactaaaaggtggtaataaagaaccttatcgcattggtcttaaactatcaaatggtggttgggtttatgtacaaggtctaacgcattttgarrtcaatgarcatgatgaatttttaattgcaggttttaattacgaaggtcaactcgctgcagcacttcaaattagtgagcgaccatttaatttatag

SEQ ID NO: 1057 - DNA, 1044 bp, Staphylococcus aureus
gtgaaagcwttgaaattatatggcgtrgaagatttacggtatgaggataatgaaaagccagtcattgaaagtgcgaatgacgttattrttaaagtacgagcgactggmatatgtggttcagacacgtcacgatacaaaaaaatggggccatacattmaaggtatgccatttggtcatgaattttcaggtgtwgtagatgccattggaagtgatgttacgcatgttaatgtrggcgacaaagtgacaggttgcccagcmataccttgttatcaatgcgagtattgtttraaaggtgaatatgcacgatgtgaaaagttrttcgtyattggctcatatgaacctggatcgttcgcggaatatgtcaaattgccagcgcaaaatgttttaaaggtwccagacaatgttgattacattgaagcagcaatggttgagccatcagccgttgttgcgcatgggttttataaatcgaatatacaacctggtatgactgttgcagtaatggggtgtggcagtataggwttgttagctattcaatgggcacgaatatttggtgctgcrcatatcatcgctatagatatagatgcgcataaactagatattgcwacatcattgggcgcacatcaaacmatcaattcaaaagaagaaaatcttgagaaattcatcgaaaatcattacgccaatcaaatcgatwtagctatagaatcatcaggtgctaaagttacgattggtcaaatattgacgctacctaaaaaaggtggcgaggtggtattactcggaataccatatgatgatattgagattgatcgcgttcattttgaaaaaattctgcgtaacgagttgacagtatgtggctcttggaactgtttgtccagtaattttccgggsaaagagtggacggcaaccttacattatatgaagacgaaagatattaatgtaaagcctattatttctcattttttaccgttagaaaaaggcccrgagacatttgataaattagttaacaagaaagaacgatttgataaagtcatgtttacgatttattag

SEQ ID NO: 1058 - DNA, 168 bp, Staphylococcus aureus
atgattatttatcgacagtatcamcatgaaggcgcaccagtttatgaaattataaccaaaacgtttcagcatgtttcaattaaatgtgacgattcatttagtgatactgaaatattcaaattgctctctttattacaagacgatatagatcatatgaaagttagttaa

SEQ ID NO: 1059 - DNA, 675 bp, Staphylococcus aureus
atgggraacgtgccattaccaaaacaatttttagatattgataataaaccgattttaatycatacaattgagaagttcattttagtgagtgaatttaatgagattattatcgcaacgccagcacagtggatttcscatacrcargatattttaaaaaaatataacattacagatcaacgtgtcaaagtagttgcaggtggtacggatcgaaaygaaacaattatgaacattatcgacyatattcgcaatryrmakggwatyaayratgatgatgtgattgtaactcatgatgccgtaagaccatttttaactcaacgtattattaaagagaayattgaagtagcagmaaaatatggtgcagtagatacagtcattgaagcaattgatacgattgtaatgtctaaagataaacagaacatacacagtatccctgtaaggaatgaaatgtatcaaggccaaacaccacaatcatttaatattaaattattacaagatagttatcgygccttaagtagtgmacaaaaagaaatcttatcagatgcatgtaaaatmattgtcgaatctggacatscagttaaattggtacgyggagaactatacaacattaaagtgacaacaccgtatgatttaaaagtagcaaatgccattattcaaggtgatattgccgatgattaa

SEQ ID NO: 1060 - DNA, 831 bp, Staphylococcus aureus
atggctttaaagaaagttttaacaattgccggttctgacacaagtgctggcgcaggtatgcaagcagatttgaaaacgttccaagaattagatacgtatggcatggtcgctttaactgccatcgttactatggataaagatacatggtcacacgatgtyacaccattaccwatggaygtatttgaaaarcaacttgaaacggctttatcaatcggacctgatgctattaaaacaggtatgttaggtactgaggagataatcaaacgtgctggagaagtatatgaggcatctaatgcacaatattttgtagtagatcctgtcatggtttgtaaaggcgaagatgaagtgcttaaycctggaaatactgaggcgatgattaaatatttactacctaaagcaacggtagtgacrccaaacttatttgaagcgggtcaattatcaggattaggtaaattaaattcaattgaagatatgaaaaaggctgcaacaattatctttgataaaggcgcacagcatgtcatcattaaaggtggcaaagctttagatcaagataaatcgtatgacttatactatgatggtcaaacattttatcaactaacwacagacatgttccaacaaagttataaccatggtgctggttgtacatttgctgcggcaacaactgcatatttagctaacggtaagtcaccgaaagaagctgtgattagcgcgaaagctttcgtcgcttctgctattaaaaacggttggaaaatgaatgattttgttggtcctgtggatcacggtgcatacaaccgtattgaacatatcgatgttgaagtaacagaggtttaa

SEQ ID NO: 1061 - DNA, 1284 bp, Staphylococcus aureus
atgtcatcaatcgtagtagttgggacacaatggggagacgaaggaaaaggaaaaataacggatttcttggcagaacagtcagatgttatcgcgcgtttttcaggtggtaataatgcaggccataccattcaatttggcggagaaacatataaattacatttagtaccatctggtatcttttacaaagacaaattagcggtaatcggtaacggwgtcgttgttgatccagttgcactattgaaagaattagacggattaaatgaacgtggcattcctacaagtaatttacgtatatctaatcgtgcgcaagtgattttaccatatcacttagcacaagatgaatatgaagaacgtttacgyggtgayaataagattggtacaactaaaaaaggtatcggtccagcatatgtagacaaagttcaacgtatcggtattcgtatggcagatttacttgaaaaagaaacattcgaaagattattaaaatcaaacattgaatataaacaagcatatttcaaaggyatgtttaacgaaacatgyccatcatttgatgatatctttgaagaataytatgcwgcaggtcaacgtytaaaagaatttgtaacagacacatcaaaaatcttagacgatgcatttgtagcagatgaaaaggtacttttcgaaggtgcgcaaggtgtaatgttagatatcgaccatggtacatatccattcgttacatcaagtaatccaattgcaggtaacgttactgttggtacaggtgtaggtcctacattcgtttcraaggtaattggtgtatgtaaagcttatacatcacgtgttggtgatggtccattccctactgaattattcgatgaagatggacatcatattagagargttggtcgtgaatacggtacaacaacaggacgtccacgtcgtgtaggttggtttgaytcagttgtattacgtcactctcgtcgtgtaagtggtattacagatttatctattaactcaatygatgttttaacaggcctagacacagtgaaaatctgtacagcttatgaattagacggtaaagaaattactgagtacccagcaaacttagatcaattaaaacgttgtaaaccaatctttgaagagytaccaggttggacagaagacgtaacaartgtgcgtactttagaagaattacctgaaaatgcacgtaaatatttagagcgtatttcagaattatgtaatgtacaaatttctatcttctcagttggtccagatagagaacaaacaaayctattaaaagaattgtggtar

SEQ ID NO: 1062 - DNA, 1038 bp, Staphylococcus aureus
ttgaaacacctaactataaagttaacttacatagatgatacacacaacgcttcattaccagcaatgattaatgctataaaagcatttaatactcaaacaaaattttttaaaggtaataaaattattgcgattgggcaaattagtgacttaggtaagcactctaaatcattgcatttgcaattagttgatgttctagaaaatagtaatgcagattatattctatgtatggatgatgctttaaagagtgtcgttacaggagtaaaaagcaaaaatataacatggtattctaatagacatctattagaaaaagatttattgtacctaaataaaccagattcattaactctattaaaatcatcagcaggtggtacagaatttccaaaattagcaaaagaattacctgagaaattaaataaatataatattaataattcgaacacttctttatttgatggtcaatccttgaacggtcgcagttatatgattattgatgaaaattataatgtcattgaatctcataacagagaacattcaggtacaattgaaggcttaggccctatctttaattatttaaaagctatagatgataatgtatcagaagatactatttttattgctaactgggcaacaaataacaaactttattatgaaggaaaagaaacgacaacttacgaattgatgaaagccatgcttaattcacctatgtatacaccttcttatgaattatctaagtatttatttgaaaacggtccaaagcgcgatgaatatatcaattcaaaaatagaacatttaagtctttcaaattctgtagcaataaatttaactggacgtcatactatgagagaacgacaaaacttcactgttgacgacttatttaaaattttaaaagcatataaaaataccctatttaaatttactaacgaaataattattggcaggaaatataatagcggtattataaaagataaagataaatttattatatttacctcttacccaaacttaaatgaaattaaaaataaactaaataataaataa

SEQ ID NO: 1063 - DNA, 1026 bp, Staphylococcus aureus
atgattaatcaagtatatcaactcgttgcaccgagacagttcgacgtcacatataataatgttgatatttatggtaatcatgtcatygtaagacctktatacttgtctatttgtgcagctgatcaaaggtattacacaggtcgaagagatgaaaatgtactrcgcaaaaaattrccaatgtcaytagttcatgaagctgttggtgaagttgtattygatagtaaaggvgtatttgaaaaaggtacgaaagtagtaatggtrccgaatacacctacagarmaacaysayrtkatygcsgagaattacytrscctctagttattttagatctagtggttatgatggttttatgcaagactacgttgtgatggcacatgatcgtatcgttccgctgcctaatgmcattgatttgagtacgatttcatacacagagttagtgtcagtaagttatcatgctatacaacgatttgaacgtaaatctatacctttgaaaamcagctttggtatttggggtgatggtaacttaggttatattactgctattttgctrcgtaagttgtacccagaagctaaaayttatgtatttggtaagacagactataaattaagtcatttttcatttgtagatgacatctttacagtaaatcaaataccagatgatcttaaaattratcatgcatttgaatgtgttggaggtaaaggaagtcaagttgcacttcaacaaatagttgaacatatttcaccagaaggcagtattgctttgttaggcgtaagtgaattacccgtggaagtgaatacacgattagtacttgaaaaaggattaacrttgattggtagtagtcgaagcggctctaaagattttgagcaagttgttgatttatatcgtaagtacccagacatwgttgaaaagttagcmttattaaaaggacatgaaattaatgtatgtacgatgcaagatatcgtccaagcgtttgaaatggatttatcgacatcttggggaaaaacagtattgaaatggacgatttaa

SEQ ID NO: 1064 - DNA, 1824 bp, Staphylococcus aureus
atggtagtagataatttttcgaaagatgataacttaatcgagttacaaacaacatcacaatataatccggttattgacacaaacatcagtttctatgaatcagatagaggaactggtgttttaaattttgcagtaactaagaataacagacccttatctataagttctgaacatgttaaaacatctatcgtgttaaaaaccgatgattataacgtagatagaggcgcttatatttcagacgaattaacgatagtagacgcaattaatgggcgtttgcagtatgtgataccgaatgaatttttaaaacattcaggcaaggtgcatgctcaggcattctttacacaaaacgggagtaataatgttgttgttgaacgtcaatttagcttcaatattgaaaatgatttagttagtgggtttgatggtataacaaagcttgtttatatcaaatctattcaagatactatcgaagctgtcggtaaagattttaaccaattaaagcaaaatatggctgatacacaaacgttaatagcaaaagtgaatgatagtgcgacaaaaggcattcaacaaatcgaaatcaagcaaaacgaagctatacaagctattactgcgacgcaaactagtgcaacacaagctgttacagctgaattcgataaaatagttgaaaaagagcaagcgatttttgaacgtgttaacgaagttgaacaacaaatcaatggcgctgaccttgttaaaggtaattcaacaacgaattggcaaaagtctaaacttacagatgattacggtaaagcaattgaatcgtatgagcagtccatagatagcgttttaagcgcagttaacacatctaggattattcatattactaatgcaacagatgcgccagaaaagacggatataggcacgttagagaagcctggacaagatggtgttgatgacggttcttcgttcgatgaatcaacttatacatcaagcaaatctggtgtgttagttgtttatgttgttgataataatactgctcgtgcaacatggtacccagacgattcaaacgatgagtacacaaaatacaaaatctacggcacatggtacccgttttataaaaagaatgatggaaacttaactaagcaatttgttgaagaaacgtctaacaacgctttaaatcaagctaagcagtatgtagatgataaattcggaacaacgagctggcaacaacataagatgacagaggcgaatggtcaatcaattcaagttaacttaaataatgcgcaaggcgatttgggatatttaactgctggtaattactatgcaacaagagtgccggatttaccaggtagcgttgaaagttatgagggttatttatcggtattcgttaaagatgatacaaacaagctatttaacttcacaccttataactctaaaaagatttacacacgatcaatcacaaacggcagacttgagcaacagtggacagttcctaatgaacataaatcaacggtattgttcgacggtggcgcaaatggtgtaggtacaacaatcaatctaactgaaccgtacacaaactattctattttgttggtaagtggaacttatccaggtggcgttattgagggattcggactaaccgcattacctaacgcgattcaattgagtaaagcgaatgtagttgactcagacggcaacggtggcggtatttatgagtgcttactatccaaaacaagtagcactactttaagaatagataacgatgtgtactttgatttaggtaaaacatcaggttctggagcgaatgccaacaaagttactataactaaaattatggggtggaaataa

SEQ ID NO: 1065 - DNA, 3468 bp, Staphylococcus aureus
gtgacggaatataaaattaaagcgactattgaagctagtgtagccaaattcaaaaggcaaattgatagtgcggttaagtctgtgcaaagatttaaacgagtagcagatcaaactaaagatgttgaattaaacgctaacgataaaaatttacaaaaaactatcaaagttgctaaaaagtctttagatgcctttagtaacaaaaatgtaaaagctaaattagatgctagtatacaagatttacaacaaaaggtactagaatcgaattttgaactagacaaactaaactctaaagaagttacaccagaagttaagttgcaaaaacaaaagttgattaaagatatcgctgaaacagaagctaaattatcagaattagaaaagaaacgtgtcaatattgacgtcaatgcagataacagtaaattcaatcgagtgttaaaagtatctaaagctagtctcgaagcattaaataggtctaaagccaaagctattatagacgtggacaatggtgttgctaactctaaaatcaaacgtactaaagaagaacttaaaagtattccgaacaaaactagatctcgacttgatgtagatacagggctttctataccaactatttatgcgtttaaaaaatcattagacgcattgccgaacaaaaaaacaacaaaggtagatgtcgatactaatggtttaaagaaagcttatgcctacataataaaagcaaatgacaattttcaaagacagatggggaatttagctaatatgttccgtgtgttcggtactgtaggttctaatatggttggtggattacttacatcatcttttagtatcttaatacctgtaatagcgagcgtagtacctgtagtatttgcgctattaaacgctatcaaagtgttaactggtggtgtacttgctttaggtggtgccgtagcaatagcgggagcaggatttgtagcgtttggcgcaatggctatcagcgctataaagatgcttaatgatggcactttacaagctagctcagcaacaaacgaatacaaaaaagcgttagatggcgtaaagtcagcatggactgatattataaagcaaaatcaatccgctatcttcacaactcttgcaaatggtttaaatactgttaaaactgcaatgcagagcttacaaccgttttttagtggtatttcaagaggaatggaagaagcgtctcaaagcgtgcttaaatgggctgaaaatagcagtgtagcttcaagattctttaatatgatgaatacaacgggtgtttcggtatttaacaagctattaagtgctgcaggtggttttggtgacggattagtcaatgtattcacgcaattagcaccactgtttcaatggtcggctgattggttggatagattaggtcaatctttctctaactgggctaatagtgcagctggagaaaattcgataactcgttttattgaatacacaaaaacaaacttacctatcattggtaatattttcaaaaatgttttcgttggaattaacaatttgatgaatgcattcagcggatcatcaactggcatattccaatctcttgaacaaatgacagctaagtttagggaatggtctgaacaagtaggacaatctcaagggtttaaagactttgtcagttatatacaaacaaatggaccactaataatgcaattgattggaaacatcgcaagaggattagttgcattcgcaacagcaatggctcctatagctagtgcagtattacgcgttgcagttgcaataactggttggatagctaacttgtttgaggcgcatccagctacagcacaattagttggtgtcattataactttagttggtgcatttagatttttaataccgattattcttgctgtatctaactttatgggtggcggattaataggtagaatcattgcattagtaagtaagttcggtttattaagagcgggattaacaattttaaaaggtgcgttcatgttattaaaaggaccattaaaaattatatcagttatattccaattgttattcggtaagattggattaattagaaatgctatcacaggactagtaactgtgtttggtattttaggcggtccaataacaatagtaattggtgtaattgctgcattaatagctatattcgttttattgtggaataaaaatgaaggattcagaaactttattataaatgcttggaatgcgataaaaacgtttatggttaatgtttggaatgtattaaaagctgtagcttcggttgtatggaatgctattttaacagctatcactacagcagtatcgaatgtttacaattttataatgattgtttggaatcaaatagtcgcttatttacaagggctatggaatggaattatcgctattgcaacaacagtatggaaccttttagttacaatcattacaactgttttcacgacgataatgacaatagttatgacgatatggacagctatttggacgttcttaagtacaatctggaatacgataattacaatcgctactacgatttggaatttgttagtcactgtaataactacagtgtttaccacaattatgactatcgcaataacaatttggaacgctatttggacgttcttacaaacgttgtggaacactatagttactgtggcaactaaggtttggaacgctatcactacagctatatctactgcgttacaagcggcatggagttttatttctaatatatggaatacgatttggagtttcttatctggtatattaacgacaatttggaataaagttgtaagcatattcacacaagttgtttcaactatatcagacaaaatgtctcaagcttggaacttcattgtcactaaaggtatgcaatgggtatctactataacaagtacgctaattaactttgttaatagagttgttcaaggattcgttaatgttgtaaacaaagttagtcaaggtatgacaaatgcagtaaataaagttaaaagctttgtggatgactttgtatcagcaggtgctgatatgatccgtggtttgatgagaggtattggtaatatggctagagacttagctgaaaaagcagctagtgtagcaaaaggtgctttaaatgcagccaaaagagcgctaggtattcactcaccttcacgtgaattcatggatgttggtatgtattcaatgttaggtttcgttaaaggtatagataatcattcaagtaaagttatccgtaatgtttctaatgttgcagataaagtagttgatgcatttcaacctacattaaacgcacctgacatttctagtattacaggaaacttaagtaatttaggtggaaatataaatgcgcaagtacaacacacacattctattgaaacatcaccgaacatgaaaactgttaaagttgaattcgatgtcaataacgatgcgcttactagtattgttaacggcagaaatgctaaacgcaattctgagtattacttataa

SEQ ID NO: 1066 - DNA, 711 bp, Staphylococcus aureus
atgcttgctgctcgcatactattagaatctggtgcagaaggtacgcgtgtagaagataccatgacacgtattgcaaaaaaacttggttacagtgaaagtaacagctttgttacaaacactgtcatccagtttacgttacattcggaatcgtttcctagaatatttagaattacctctcgagatacaaacttaataaaaatttckcaagctaataaaatttcgcgtcaaattacaaayaatgaaatttctttagccgargcaaaaacrcaacttgaaaaaatatatgttgcyaagcgtgacagcagtcttccctttaaaggttttgctgcagcaatgattgcaatgagtttcttatatttacaaggtggtagattgattgatgttttaactgcgatattagcaggtagtctaggatacctagtcactragattttagatcgyaagttacaygcacagtttatcccagaattcattggttcattagttattgggattatcgccgttattggacatacacttatyccaacaggtgacttggcaastattatcattgcrgcagtcatgcctattgttcctggtgtattaataacaaacgcaatacaagatttatttggtggrcacatgttgatgttcacaacgaaatcattagaagcattggttactgcgtttggcatcggtgctggcgttggtagcgtattaattttagtatag

SEQ ID NO: 1067 - DNA, 1542 bp, Staphylococcus aureus
atgaaaatagacggtaatacatttmtatgtagattcaaygtcgcaatattagacgatgggtattatttaccaatggataaatatttatttgtttatcatgaccagttagagtatattggacaacttaatccaaatattattgatcaagcttatgcggcattaaatgaagagcaaattgaagaatacaatgagctgactacacaaaatggaaaagyraactatktrttagcswaygawgctaaagttttccgyaaaggtggcgtatcacaacatacggtytataccattactccrgaaatagcaagtgacgttaacgaatttgtatttgatattgamatcaccttacctcaagagaaatcaggggtcattgcgacaagygcacactggmttcataaacaaggycataaagcttcatttgaaagtagaagtttcttatttaaagctatttttaatattacaaagttactacatattaaaagaagcaaaacaatattattcacatcagattcrcgtccgaatttatcaggkaayttyaartatgtatatgatgagttactacgccaaaaagtagattttgattatgatattaaaacggtatttaaggmgaatattacggatagacgyaaatggagagacaagtttagattgccatatttacttggtaaggchgattatatttttgtygatgatttccatccattaatttatacggttcgctttagaccatcacaagaaattattcaagtgtggcatgcygttggtgcytttaaaacagttggctttagtcgtacaggtaaaaaaggtggtccrtttatygattcattaaaycatcgtagytayacraaagcwtatgtwtcatcagaaaccgatattccattttatgctgaagcatttggaattagagaagaaaatgttgtaccaacaggtgtaccacgtactgatgtactatttgatgaagcttatgcaacacaaattaaacaagagatggaaratgaattrccamttataaaaggtaagaaagttattctattcgcaccgacatttagaggtaatggtcacggtacggcacattatccattttttaaaattgattttgaacgtttagcaagataytgcgagaagcataatgcagttgtgttattcaaaatgcatccgttcgtaaaaaatagactyaatatttcacgtgaacatagacaatactttatcgatgtgtcagatyatcgtgaagttaacgatattctctttgttacagacttgttgattagtgattattcatctttaatatatgaatatgcagtatttaaaaarccratgattttctatgcatttgacttagaagattayattacgacgcgtgatttctatgaaccatwtgaatcatttgttccaggtaaaattgtacartcctttgatgcattaatggatgctttggacamtgaagattatgaggttgaaaaagttgtrccattcttagataaacattttaaatatcaagatggtcgctcaagtgaacgtttagtcaaagatttgtttagacgctaa

SEQ ID NO: 1068 - DNA, 636 bp, Staphylococcus aureus
atggaggtatatctcatggaagaaaataaacttaagtttaatttgcaattttttgcagaccaatcagatgatccggacgaaccaggcggagatggtaaaaaaggaaatcctgataagaaagaaaatgacgaaggtactgaaataactttcacgccagagcaacaaaagaaagttgatgaaatacttgaacgtcgtgtagcccacgaaaagaaaaaagctgatgagtatgcaaaagaaaaagcagcagaagctgctaaagaagctgctaaattagcgaaaatgaacaaggatcaaaaagatgaatatgaacgcgaacaaatggaaaaagaactggaacaattacgttcagaaaaacaattaaacgaaatgcgttcagaagcacgaaaaatgttgagtgaagcggaagttgattcatcagatgaggttgtcaatttagttgtaacagatactgctgaacaaactaaattgaatgttgaagctttttctaatgcagtaaaaaaagcggttaatgaagcggttaaggttaacgctagacaatcgccattgactggtggagattcatttaatcactcgactaaaaataaaccgcaaaacttagctgaaatagctagacaaaaaagaattattaaaaattaa

SEQ ID NO: 1069 - DNA, 1170 bp, Staphylococcus aureus
atgattaaaamtacaattaaaaaattgatagaacayagtatatatacgacttttaaattactatcaaaattgccaaacaagaatctaatttattttgaaagctttcatggtaaacaatacagcgacaaycccaaagcattatatgaatacttaactgaacatagcgatgcccaattaatatggggtgtraaaaaaggatatgaacacatattccaacagyacaatgtaccatatgttacaaagttttcaatgaaatggtttttagcgatgccaagagcgaaagcgtggatgattaacacacgtacaccagattggttatayaaatcaccgcgaacgacgtacttacaaacatggcatggcacgccattraaaaagattggtttggatattagtaaygttaaaatgctaggaacaaatactcaaaattaccaagatggctttaaaaaagaaagccaacgktgggattatctagtgtcacctaatccatattckacatcgatatttcaamatgcatttcatgttagtcgagatargattttggaaacaggttatccaagaaatgataaattatcacataarcgcaatgatactgaatatattaayggtattaagacaagattaaatattccattagataaaaaagtgattatgtaygcgccaacttggcgtgacgatgaagcgattcgagaaggttcatatcaatttaatgttaactttgatatagaagctttgcgtcaagcgctggatgatgattatgtyattttattacgcatgcattatttagttgtgacacgtattgatgaacatgatgattttgtgaaagacgtttcagattatgaagayatttcggatttatacttaatcagcgatgcgttagttaccgactactcatctgtcatgttcgacttcggtgtattaaagcgtccgcaaattttctatgcrtatgacttagataaatatggcgatgagcttagaggtttttacatggattataaaaaagagttgccaggtccaattgttsaaaatcaaacagcactcattgatgcattaaaacaaatcgatgagactgcaaatgagtatattgaagcacgaacggtattttatcaaaaattctgttcattagaagatggacamgcgtcacaacgaatttgccaaacgatttttaagtga

SEQ ID NO: 1070 - DNA, 753 bp, Staphylococcus aureus
atgagtcaagcagccgaaacattagatggttggtatagtctacatttattttatgcagttgattgggcatcattacgtmtagttccaaaggacgaacgcgatgcacttgtcactgaatttcaatcatttttagaaaatacagcaactgtaagatcatcaaaatctggtgatcaagctatttataatataactggtcaaaaagcagatttgttattatggttcttacgtcctgaaatgaagtctttaaatcatattgaaaatgaatttaacaaattgcgcattgctgacttcytaatccctacatattcatatgtatcagtcattgaattgagcaattatttagctggtaaatctgatgaagatccttatgagaaccctcatatcaaagcaagattatacccagaattaccacattctgattatatttgtttctatccaatgaacaaacgtcgtaatgaaacttataactggtacatgttaactatggaagaacgccaaaaattaatgtatgaccatggtatgattggtagaaaatatgctggcaaaatcaaacaatttattactggttctgtaggktttgatgatttcgaatggggcgtaacattgttctcagaygacgtattacaattcaaaaaaattgtatacgaaatgcgctttgatgaaacaacagcacgatacggtgaattcggtagtttctttgtaggacatmttattaacacaaacgaattcratcaattctttgcgatttcttaa

SEQ ID NO: 1071 - DNA, 207 bp, Staphylococcus aureus
atggagatgccaaagaaaacggtaacgattgatgtagatgaaaacttattagtagtagctagtaatgaaatatcagaactattatatgaatatgacagtgagttaatgtcagctgatgaagatggcgataatagagatatcraagaaaaaagagacgcattaaaacaagctatacaaattatcgataaattaacatggggtgtttag

SEQ ID NO: 1072 - DNA, 783 bp, Staphylococcus aureus
gtgagtaaaataaaaaaaacaacatttatactactttcatttattgccctaacgttgataacaagtccatttgtaaattgtagcgagaaaagcgaagaaataaatggaaaagatttacaaaaaaagtctgaattgcagggaactgctttaagcaatcttagacaaacctattatcataatggaagtgctataattgaaaataaagagagtaatgatcaatttttaaagaacactatattgtttaatgatttttttacaggtcatcaatggtataatgatttattagtagaccttggttcaaaagacaccgccaatatatacaaagggaaaaaagtggatttatatggtgtttattatggttatcaatgtactgggggtacaccattcaaaacagcttgtatgtatggcggtgtaacgttacatgataataatcaattggaggaagaaaagaaagtaccgattaacttatggatagatggtaaacaaaatacagtacctttgggaacggttaaaactaataaaaaagaagtaactgttcaggagctagaccttcagtcaagacattatttacatgaaacatataatttatataacacagatgcatttaatggaaaaatacaaagaggattaattgagtttcacccttcttctggtgattcggttggttatgatttatttggtgctcaaggacaatatccagatacacagttgaggatatatagagataataaaacgattaagtctaaaaatatgcatattgatatatatttatatacaacttga

SEQ ID NO: 1073 - DNA, 258 bp, Staphylococcus aureus
atgagtgtaatcagtaacagaaaagtagatatgaatgaaatacaagacaatgttaagcaaccagcgcactacacatacggcgacattgaaattatagattttatcgaacaggttacggcgcagtatccaccacaattagcatttgcaataggtaatgcaatcaaatatctatctagagcaccgttgaaaaacggacacgaggatttagcaaaggcgaagttttatgtccaaagagcttttgacttgtgggagcaatga

SEQ ID NO: 1074 - DNA, 921 bp, Staphylococcus aureus
atgacgaatgaattactattaaaaaacaataaaatgggcgacaacgttctatctagagttaagacattagaagcacaaggagatttacagtttcctgcaaactattcgcctgagaatgcaatgaagtcagcaatgttacaactgcaagaattaaaaggatctaaaaaagatggttataaaccagcgctggaatttgcaacttcaaccagcatagcaaacgccttaatggacatggttgtacaaggtttaaatcctgctaagaatcaaggctatttcattatgtatggcgataaggttcaattccaaagaagttaccacggaacaatggcagtaactaaacgtgtagcaggcgcagaagaaattaatgcagaagtcatatttgaaggtgacgaagttaagtataaaactaaaaacggaaaaattgttgaacttgaacatacacagtcttttggtaacagaaacacacaaaacattatcggtgcatatgcaacagttgtatttaaagatgaaagtagaaattacactgaaatcatgacatttgaagagattgaagaagcgtggaagcaatcacaaatggtttataacggtgtatttaaagaagacggtacacacagaagattccctcaagaaatggctaaaaagactgtaataaaccgtgcatgtaaaaagattttaaacagcacggatgacgctagtcttttatcaaatcaaattaaagaatctgaacaacgtcaacgcaaagaagtattggatgcagaagttgaagaaaatgcaaatcaagaacaattggattttgaaccaccagtttttgaagaagcacaatacacagaattagaaaatgaaaaacctattgatgtatctgactttgaagaaataaaagaacctgcaacagaaaaagaaagcgaagaagagccattttaa

SEQ ID NO: 1075 - DNA, 717 bp, Staphylococcus aureus
atgaaatacgctggtattctagctggaggtataggctcaagaatgggtaacgtacctttacctaaacaatttttagatttagacaacaaaccgattttaatccatacattagaaaaatttattttaattaatgattttgaaaaaattattatcgcgacgccacaacaatggatgacgcatacgaaagatacacttagaaaattcaaaatttctgatgaaagaattgaagtcattcaaggtggtagcgatcgtaacgatacaattatgaatatcgttaaacatattgaatcaacaaatggtattaacgatgacgatgtcattgtgacacatgatgcagttagaccatttttaacgcatcgtattattaaagaaaatattcaagctgctttagartacggtgcagtagatacagtgattgatgctatagatacgattgttacatctaaagataatcaaacgattgatgcaattccagtgcgtaatgaaatgtaccaaggtcaaacacctcaatcgtttaatattaatttattaaaagaaagctatgcacagttgagtgatgagcaaaagagtattttatctgatgcttgtaagattattgtagaaacaaacaaaccggttcgacttgtaaaaggtgagttatataacattaaagtaacaacaccttacgatttaaaagtagcgaatgctattattcgaggtggtattgccgatgattaa

SEQ ID NO: 1076 - DNA, 1323 bp, Staphylococcus aureus
atgaaaacatatgatttaattgtaataggatttgggraagctggtaaaactttagcsaaataygctgcatcaacaggtcaacacgtcgcagttatcgaacaatctycgaaaatgtatggmggcacttgtatmaayrtaggatgtatwscttcraagacacttgtacatgatggattagaaggcaaatcytttgaagcaagttataaccgtaaaaacgatgttgtcaatgcgctaaacaataaaaattaccayttattagcagacgayaryaacattgatgtaytggattttaaagcgcagtttaaatctaatactgaagtgaatttattagatcarcatgrygatatcgycgatagtattactgcacctcatatcattattaatacyggtgctacctctrtyattcctaacatwaaaggccttgatcaagctaaacaygtcttcgattcracaggtttattaaacattarctatcaacctaagcayctcgttattgtaggtggcggttatatygccttagaatttgcttcaatgtttgcgaatttaggtagtaaggtwacagtattagaacgtggygaatcatttatgccacgygaagatcaagatgtcgttgcayatgstattactgacttagaaaataaaggcattrcattgcatacaaatgttgaaacgactgaattgtcatctgacratyatcatacaacwgtccrtacyaaygttgryaactttgaggctgatgcagtacttttggctatcggrcgcaaaccgaatacrgmyttagcwttagaaaatactgatatcgaattaggygayagaggcgaaattaaagtcaatgctcawcttcaaacawctgtrccrcatatttatgctgcaggtgatgttaaaggcggacttcaatttacgtatatatctttagaygattatcgaattatcaaatcakckttatatggtaatcagtcacgtacgactgacaatagaggyrgcgtgccttatacagtatttatagatccaccattatcacgtgttggattaactagyaaagaagctgccgctcaacattatgattacactgarcatcaacttttagtaagtgctatacctcgtcayaaaattaacaatgatccaagaggtttatttaaagtagtcattaataatgaaaataatatgattttaggtgctacattatatggtaagcaatctgaagaattaattaatataattaaacttgcgattgatcaaaacattccatataccrtattacgagataatatttatacrcatcctacgatggccgaatcatttaatgatttatttaatttctag

SEQ ID NO: 1077 - DNA, 186 bp, Staphylococcus aureus
atgcaacaacaagcatatataaacgcaacgattgatataagaatacctacagaagttgaatatcagcattacgatgatgtggataaagaaaaagatacgctggcaaagcgcttagatgacaatccggacgaattactaaagtatgacaacataacaataagacatgcatatatagaggtggaataa

SEQ ID NO: 1078 - DNA, 1026 bp, Staphylococcus aureus
atgattaatcaagtatatcaattagttgcacctagacaatttgaagttacgtataacaacgtagatatttacagtgactatgtcattgtacgtcctttatatatgtcaatttgtgctgccgatcaaagatattatactggtagccgtgatgagaatgtcttatctcagaaattgccaatgtctttaattcatgaaggtgttggtgaggtcgtatttgacagtaaaggtgtgtttaataaaggtacaaaagtagttatggtaccgaatacrccgacagaaaaagacgatgtcattgctgaaaactatttaaaatcgagctacttcagatcaagtggacatgatgggtttatgcaagattttgtgttgctaaatcatgatagagctgtaccactacctgatgatattgatttaagtattatttcatatacagagcttgtaacagtaagtttgcatgctattcgtcgttttgaaaagaaatctatttcaaataaaaatacatttggtatttggggtgatggtaacttaggttacattacagccattttattacgtaaattatatccagagtctaaaatatatgtctttggtaaaacagattataaattgagtcacttctcatttgttgatgatgtcttctttattaataaaatacctgaaggcttaacatttgatcatgcatttgagtgygtkggtggkcgyggtagycaatcagcmataaatcaaatgatygattayatttcaccagaaggaagcattgcactgttaggtgtaagtgagttcccagtagaagttaatacacgtctmgtattggaaaaaggactaacgttgattggtagtagtcgaagtggttcaaaagatttccaagatgttgtagacttatacattcaatacccagatattgtagataaattagcgttgttaaaaggtcaagaatwtgaaattgcaacaattaatgatcttacagaagcttttgaagcagacctrtctacatcttggggtaaaacagtattaaaatggattatgtaa

SEQ ID NO: 1079 - DNA, 441 bp, Staphylococcus aureus
ttgaatttagaatttaacattgccgtrcatgtattarcttttttaactaagcatcattcagaaaaattcaatagtagttcattagcwgaattaacttgtttaaatcctgttcaattacgmcgcgtgacgactcaacttgtcgatttaaaaatgattracacaatacgrggtaaagatggyggttatttakcaaatgatcrwagygctgatgtctcwytagcaacattatataaacattttgtcttagagaaagaacaycacacacgwctatttactggcgacgaaggyagtcactgtcaaattgctcgtaatattgcaactacyatgtcacattatsarcaagacgaacagaatawcattattaatttttataawgraaaaacaatcaaagatgtcattgaagacattcaaaaggaggatttatgtcatgaaaacatatga

SEQ ID NO: 1080 - DNA, 691 bp, Staphylococcus aureus
atgcaatacattacaagataccagaaagacaatgacggyacttattccgtcgttgctactggtgttgaacttgaacaaagtcacattgacttactagaaaacggatatccactaaaagcagaagtagaggttccggayaataaaaaactatctatagaacaacgcaaaaaaatattcgcaatgtgtagagatatagaacttcactggggmgaaccrgtrgaatcaaytagaaaattattacaaacagaattggaaattatgaaaggttatgaagaaatcagtctgcgcgactgttctatgaaagttgcaagggagttaatagaactgattatagcgtttatgtttcatcatcaaatacctatgagyrtagaaacragyaagttgttaagygaagataaagcrytattrtattgggctacaatcaaccgcaactgtgtaatwtgyggaaagcctcacgcwgacytrgcrcattatgaagcagtmggmagagghatgaacagaaacaaratgaatcactacracaaacatrtrttagcrytrtgtmgmsaacaycayaaysarcarcaygcrattggygttaagtcgtttgatgataaatatcacttgcatgactcgtggmtaaaagttgatgagaggctyaayaaaatgctgaaaggagaraamaakgarkagaagtatcgtggataaaact

SEQ ID NO: 1081 - DNA, 780 bp, Staphylococcus aureus
atgactgaamaaactaatcaagatgtcgatatyttaacgcaactaggtgtaaaagacatcagcaaacaaaatgcaaacaagttttataaatttgcgatatacggcaagttcggkactggtaaaactacgtttttaacaaaagataacaaygccttagtactagatataaatgaggacggaacaacggtaacagaagatggggcagttgtgcagattaagaattayaagcattttagtgcagtgattaaratgytrcctaaaattattgaacaactmagagaaaacggaaaacaaattgatgttktagtgattgaaacaatccaaaagytacgtgatatcactatggacgacatcatggacggwaaatyaaagaaaccracatttaatgattggggcgagtgtgctacacgcattgtaagtatttatcgttatatttctaaattacaagaacattatcaattycatcttgctataagyggacacgagggmattaacaaagacaaagatgatgagggwagyactatcaatccaacaatcacgatagaggcacaagaycaaataaaaaaagcrgtcatcagtcaatctgaygtgttagcaagaatgacaatagaagaacatgagcaagacggcgaaaaarcttatcaatatgtwcttaacgctgaaccatcaaayttattcgagacaaagataagacactcaagcaacatyaaaattaacaacaaacgtttcattaatccaagtattaacgaygtwgtacaagcaatyagaaatggwaaytaa

SEQ ID NO: 1082 - DNA, 537 bp, Staphylococcus aureus
gtgaatgatttacaagagagagaattagaaacattcgaacaagacgaccgattcaaagtaactgatctagacagtgctaactgggtttttaagaaactggatgcaatcacaactaaagagaatgaaatcaacgatttagcaaataaagaaattgaacgcataaacgaatggaaagataaagaagtagaaaaattacagagtggcaaagaatatttacaaagccttgtaattgaatattacagaatacaaaaagaacaagatagcaaattcaagttgaatacaccttacggaaaagtgacagccagaaaaggttcaaaagtcattcaagttagcaatgagcaagaagtcattaaacaacttgagcaacgaggttttgacaactatgtaaaagtaactaaaaaacttagccaatcagacattaagaaagatttcaatgtaactgaaaacggcacattgattgacgcaaacggcgaagttttagagggtgctagcattgtggagaaaccaacgtcatacacggtaaaggtgggagaatag

SEQ ID NO: 1083 - DNA, 984 bp, Staphylococcus aureus
atgaaaaaagtaagtgttataatgccaacattcaataacggcgaaaaattacatagaaccattagttctgtattaaatcaaacaatgaagagtactgattacgaattaattattattgatgatcattcaaatgacaatggtgagactttgaatgttataaaaaaatataaaggattagttcgttttaaacaattaaaaaagaatagtggaaatgctagcgtacctagaaatacaggcttaaaaatgagcaaagctgaatatgtattctttttagattctgatgatttacttcacgaaagagcactagaagatttatataattacggcaaagaaaataatagcgatttaataattggaaaatatggagttgaaggtaaaggaagaagtgttcctaaagctatatttgagaaaggaaatgtagcgaaagctgatattattgataatagtattttttatgctttatcagtactaaaaatgtttaaaaaaagtgttatagataaaaacaagataaaattcaaaacattctctaaaactgctgaagaccaattatttactatagaatttttgatgaattcgaaaaattactcgataaaaaccgactatgaatactatattgtagtcaacgatttcgagtctagcaatcatttgtcagtaaataaaagtacaggaaatcaatattttgctactataaacgaaatttataaagctatttataaaagtccaatttataaaaaccaagaaaaaagacaccaacttgccgggaagtatacaactagacttttaagacacggtcagaaaaagaattttgcaaatagtaaaatgaaatatgaagataaaatcgaatggttaaacaacttttctaaaacaattaataaagtacctagagactcagataaatatgtcacacaaatattcaacttaaaattagaagcaataagacaaaacgatttattagctgtgatgattgcagataagctattatag

SEQ ID NO: 1084 - DNA, 243 bp, Staphylococcus aureus
atggaaaactttaattataataacataaaaaaacttgttcttgaaaatgttgatatagataaagtaaaagaagtatacaaagattatgaattacttaattatacaataaaaaaccaaacactttacatgaacgattatgaagttgctaaagtttctgaaaaacatctaaacgaaaatattaataatctaagaggcacggttaatctagacgaaaaatgtattttgtcactaacctatctataa

SEQ ID NO: 1085 - DNA, 450 bp, Staphylococcus aureus
atgaacgcactatacaaaacaaccctcctcaccacaatggcagttgtgacgtggaaggtttggaagattgaacgaaatacgagaaagcctgtaatcaatagaaatgattttagtaaagagtctacagcagaaacgattgagcgacacagtgatcctgattcaggaataaaactacttaaggcattttccgacttcactaaacaagctgaaaagcaaaaacctacactaggagaagtttatagacggaacaaacctgaattaccaaccgttactttagacgaaaacggactgtttataaatgattttagggtgccttatgtacttgaggaaggggttaacgtaaagaaatctatgaacaacctatataaggtcagtttggactttttcgctaaaagtattattgcagataattacgaagcagataacccagagaatcaacagttattttaa

SEQ ID NO: 1086 - DNA, 1689 bp, Staphylococcus aureus
ttggttaaaagtaagatatatatagataaaatctattgggarcgtgttcarttattcgttgaaggacatagtgaaaacctagatttagaagatagtaattttgtattaagaaatttaactgagacacgtacaatgaargcgaatgatgtcaaaatagatgggaatcaattcgtttgtcgtttcaatgtagctatcttagataatggttattacttacctgaagataagtacttattagtgaatgagcaagaacttgattatattgcacagttaaacccagatgtgattaatgatgcatatcaaaatctaaagccagaacaagaagaagaatacaacgaattagaaacacaaaatggtaaaatcaatttcttattgcagacttacctaaaagaatttagaaaaggcggcatttcraagaaaacggtttatactgttacacctgaaatttctagcgatgttaatgaatttgtccttgatgttgttgtaacgactccggaagttaaaagtatttatatcgttcgtaaatataaagaattacgtaagtatttccgcaaacaatcatttaatacaagacaatttatttttaaagcgatatttaatacgacgaaatttttccacttgaaaaaagggaatacggtgttgttyacatcagactctagaccaacgatgtctggaaactttgaatacatctataacgaaatgttacgtcaaaatttagataaaaagtatgatattcacactgtttttaaagcgaatattacagatagacgtggcatcatcgacaagtttagattgccatatttacttgggaaggcagactacatctttgttgatgactttcacccattgatttatacagtgcgttttagacgttctcaagaagttattcaagtatggcatgccgttggtgcctttaaaacagttggctttagtcgtactggtaaaaagggtggaccatttattgattcattaaatcatcgtagctatacaaaagcttatgtatcatctgaaaccgatattccattctacgctgaagcatttggtattaaagagaaaaatgtagtgcctacaggtgttccacgtactgatgtactatttgatgaagcttatgcgacacagatcaaacaagagatggaagatgaattaccaattattaaaggtaagaaagtcattcttttcgcaccaacatttagaggtagtggtcatggtacagcacattacccatttttcaaaattgatttygaacgtttagcaagatattgcgaaaaaaataacgcggttgtattatttaaaatgcatccatttgtgaaaaatagacttaatattgcagacaaacataaacaatattttgttgacgtttctgactttagagaagttaatgatatactgttcataacagatttattaattagtgactattcatctttaatatatgaatatgcagtatttaaaaagccaatgattttctatgcatttgatttagaagattatattacgacgcgtgatttttatgarccatatgaatcatttgttccaggtaaaattgtgcaatcatttgacgcattaatggacgccttggacaatgaagattatgaaggagaaaaagtcattccattcttagataaacattttaaatatcaagatggycgatcaagtgagcgtttagtcagaaatttatttggtagctaa

SEQ ID NO: 1087 - DNA, 375 bp, Staphylococcus aureus
atggcaattacaaaaatcaatgattgctttgagttgttatcaatggtcacttatgctgacaaattaaaaagtttaattaaaaaggaattttcaattagctttgaagaattcgctgtattgacatacatcagcgaaaacaaagagaaagaatactatyttaaagatattattaatcatttaaactacaaacaaccacaagttgttaaagcagttaaaattttatctcaagaagattacttcgataaaaaacgtaatgagcatgatgaaagaactgtattaattcttgttaatgcacaacaacgtaaaaaaatcgaatcattattgagtcgagtaaataaaygaatcactgaagcaaacaacgaaattgaactataa

SEQ ID NO: 1088 - DNA, 1723 bp, Staphylococcus aureus
atgaaattttcagtaatagttccaacatacaattcagaaaagtatataacagaattactyaatagccttgcgaaacaagattttccgaaaactgaatttgaagtggttgtagttgatgactgttcaacagatcaaacgttacaaatagttgaaaagtatcgcaataaattgaacttgaaagtaagtcaactcgaaacaaattctggtggtccaggtaaacctagaaatgtggcgttaaaacaagcagaaggtgaatttgtattatttgtggactccgatgactatataaacaaagagactttaaargatgcagcagcatttattgatgaacatcactcmgatgtcttattgattaaaatgaaaggtgttaatggtcgtggtgtaccacaatctatgtttaaagaaacagcacctgaagttactttgttaaattcaagaattatctatactttaagcccgactaaaatctatagaacarcattactaaaagataatgacatttattttccagaagaattaaagagtgcagaagatcaattatttacaatgaaagcatatttraatgcaaatcgaatcagtgtgttaagtgataaagcgtattattatgctacaaagcgtgaaggtgaacatatgagtagtgcgtatgtttcacctgaagacttttaygaagtcatgagattgattgctgtagaaatattaaatrcagatttagaagaagcycataaaratcaaatcttagcagaatttttaaatcgtcattttagtttttctcgtacgaatggcttctcacttaaagttaaactwgaagakcaaccrcaatggattaatgctctaggagactttatacaagcagttccagaacgtgtagatgcattggtgatgagtaaattacgaccattgttgcactacgcgagagcgaaagatatagacaactatagaactgtrgaagaaagttaccgtcaaggtcaatactaccgttttgatattgtagatggtaaattaaacattcaattcaatgaaggcgaaccatactttraaggcattgatatcgctaagccaaaagtgaaaatgacagcatttaaatttgataatcataaaattgttacagagctaacgytaaatgaatttatgattggcgaaggacattatgatgtcagacttaaattacattcacgaaacaagaagcacacaatgtatgtacctttaagtgtcaatgcgaataaacaatatcgttttaacattatgttagaagatattaaagcgtatttacctaaagaaaaaatttgggatgttttcttagaagtccaaataggtacggaagtatttgaagtgcgtgttggtaatcaacgtaataaatatgcwtatactgcagaaacaagtgcattaattcatttraataatgatttttatagattaacaccgtatttcacaaaagactttaataacatttcgttatactttacagctattacattaacggattcaatctcawtgaagttaaaaggtaaaaacaaaatcattttaactggtctggatcgtggttatgtatttgaagaaggtatggctagtgtcgtrctaaaagacgacatgrtkatgggaatgttaagccaaacrtcagaaaacgaagtksaaatcttacttagyaaagatattaaraagcgagacttcaaaaatattgttaagttaaayactgcacatatsacttayycrctaaaataaataa

SEQ ID NO: 1089 - DNA, 120 bp, Staphylococcus aureus
atgctgatatttttgactaaaccaaatgctaacccagaaatacaatcactgtgtctaatgaataatttgttttataaacacttttttgtttacttctcatttttaattagttataattaa

SEQ ID NO: 1090 - DNA, 705 bp, Staphylococcus aureus
atgaaaatgrcagcaattgcgaaagcaagtttagcattaggtattttagcaacaggaacaataacgtcattgcatcaaactgtaaatgcgagtgaacatraagcaaaatatgaaaatgtgacaaaagatatctttgacttaagagattactatagtggcgcaagtaaggaacttaaaaatgttactggttatcgttatagcaaaggtggcaagcattaccttatctttgataaamatmraaarttcacwagartacaratwtttggtaaagatatwgaaagatttaaagcacgyaaaaatccgggattagacatatttgttgttaaagaagcrgaaaaycgyaayggcacagtgttttcatatggtggtgtcactaagaaaaatcaagacgcttattatgattatataaacgcaccaagatttcaaatcaagagagatgaaggtgacggtattgctacgtacggtagagtacactacatttataaagaagagatttcacttaaagaactcgactttaaattgagacagtatttaattcaaaattttgatctgtataaaaagtttcctaaagatagtaagataaaagtgataatgaaagatggcggctattatacgtttgaacttaataaaaaattacaaacaaatcgcatgagtgaygtcattgacggtagaaatattgaaaaaatagaagccaacattagataa

SEQ ID NO: 1091 - DNA, 696 bp, Staphylococcus aureus
atgaaattaaaaacgttagctaaagcaacattagtattgggattgttagctactggtgtaataacaacagaaagtcaaacagtaaaagcggcagaatcaactcaaggtcaacacaattataaatcgttaaaatactactatagcaagccaagtatagagttaaaaaatcttgatggtttgtatagacagaaagtgacagataaaggagtatatgtttggaaggatcgaaaagattattttgttggcttgcttggtaaagatattgaaaaataccctcaaggtgagcatgataagcaagatgcatttttagtcatcgaggaggaaactgttaatggaagacaatattcaattggtggtttaagtaagacaaatagtaaagaatttagtaaagaagtcgatgttaaagtaacaagaaaaattgatgaatcatcggaaaagtctaaagatagtaaatttaaaattactaaagaagaaatctcgttaaaagagttggactttaaattaagaaaaaaattgatggaagaagaaaaattatatggtgctgttaataatagaaaaggtaaaattgtagttaaaatggaagatgataagttttatactttcgaacttacaaaaaaactacaaccgcatcgcatgggtgacacgatagatggtaccaaaatcaaagaaattaatgttgagctagaatataaataa

SEQ ID NO: 1092 - DNA, 696 bp, Staphylococcus aureus
rtgaaattaaaaacgttagctaaagcaacattggcattaggcttattaactactggtgtgattacatcagaaggccaagcagtbcamgcaaaagaaaagcaagagagagtacaacatttatatgatattaaagacttayatcgatactactcatcagaaagttttgaattcagtaatattagtggtaaggttgaaaaytataacggttctaacgttgtacgctttaaccaagaaaawcaaaatcaccaattattcttatyaggwaaagataaagakaaatataaaraaggcmttgaaggcmarratgtctttgtggtaaaagaattaattgatccaaacggtagaytatctactgttggtggtgtrackaagaaaaataacmaatcttctgaaactaatacacmtttatttrtwaawaaagtgtatggcggaaatttagatgcatcaattgamtcattttyaattaataaagaagaagtttcactgaaagaacttgatttcaaaattagamarcawttagttraaaawtatggtttatataaaggtacgactaaatacggtaagatcactwtcaatttgaaagasgagaaaaagsaagwaattgatttaggtgataaaytgcaattcgagcrcatgggygatgtgttgaatagtaaggatattmawaakatwgmagtgactwtkaawcaaatttaa

SEQ ID NO: 1093 - DNA, 699 bp, Staphylococcus aureus
atgaaatttacagygatagctaaagcgatatttrtattaggaatattaacaacaagtgtaatgataacagaaaatcaatcggttaatgcaaaaggaaagtatgaaaaaatgaaccgtttatatgatacaaacaagttacatcaatactattcaggacctagttatgagttaacaaatgttagtggccaaagtcaaggttattatgactctaacgttttgctttttaaccaacaaaatcaaaagttccaagtrtttttattgggaaaagatgaaaataaatacaaagaaaaaacacatggtttagatgtctttgcggtaccrgaattagtagatttagatggaagaatatttagtgttagtggtgtaacraagaaaaaygtaaaatcaatatttgagtctctaagaacgccgaacttactagttaaaaaaatagacgataaagacggtttttctattgatgaatttttctttattcaaaaggaagaagtrtcattgaaggaacttgatttyaaaataagaaaactgttrattaaaaaatacaaaytgtatgaagggkcagctgataaaggtagaattgttattaatatgaaagatgaaaataagtatgaaattgatttaagtgataaattagrtttcgagcgtatggcagatgtcattaatagtgaacaaattaaraacatcgaagtgaatttgaaataa

SEQ ID NO: 1094 - DNA, 1755 bp, Staphylococcus aureus
gtgctatcgctaacaatgttattacttgagcgtgtaggtttaattattattttggcctatgtgttgatgaatattccatattttaaaaacttaatgaatcgtcgacgtacatggaaagcacgttggcaattatgtattattttcagtttgtttgccttaatgtctaatttaactggtatcgtcatcgatcatcaacatagtttgtcaggaagtgtgtacttccgtttagatgatgatgtatctttagctaacacacgtgtattaacgataggtgtcgcaggattagttggtggcccttttgtaggtctatttgttggcgttatttcaggtattttcagagtgtatatgggtggggcggatgcacaagtttatcttatmtcatctatatttatyggtataattgctggttattttggcttacaagctcaaagacgcaagcgttacccgagtattgcraaaagtgccatgattggaattgttatggaaatgattcaaatgttgagcattttaacattttcccacgacaaagcatatgcggttgacctcatatcattaattgcactaccaatgattattgttaatagcgtyggkmcggcgatttttatgtctattatcattycaacattaaagcaagargascaaatgaagsctgtycaaacacatgaygtmctgcaattgatgaaccagacattsccgtattttaaagaaggattgaatagagaatcggcacarcaaattgcgatgattattaaaaatttaatgaaagtatctkccgtagcaattacaagcaaaaatgaaatyttatcgcatgtaggtgsaggtagtgatcatcacataccaacaaatgaaatattaacaagtctgtctaaagatgtattgaaatcaggraagttgaaagaagtkcatactaaagaagagattggttgtagtcatccgaattgcccgcttagagcagctatcgtgataccacttgagatgcatggttctatcgtcggtacattgaagatgtattttacaaaccctaatgatttaacttttgtggaacgtcaacttgcagaaggattggcaaatatttttagtagccaaattgaacttggtgaagccgaaacgcaaagtaagttattgaaagatgctgagattaagtcattacaggcacaagtgagtccacattttttcttcaattcaattaacmcgatytcagctttagttagaataaatagcgaaaaggcmcgagagttactattagaattgagttattttttcagagcgaatttacaaggctcwaagcaacatacgattactttagataaagagttaagtcaagtgcgtgcatacttatcactcgaacaagcacgttatccaggaagatttaatatcaatattaatgttgaagacaaatatcgcratgtgcttgtaccaccatttttaattcaaattttagttgaaaatgcyatcaaacatgcgtttacgaatcgaaagcaaggtaacgatattgacgtgtcagtgattaaagaaactgcaacacatgtacgtattattgtacaagataatggtcagggtatttctaaagataaaatgcatttgttgggagaaacatctgtagaatcagartctggaactggtagtgctttagaaaatttaaacttacgcctaaaaggattatttggaaaatccgcwgcattacaatttgaatcgacatcgagcggtaccactttttggtgtgtacttccttatgaaagacaagaggaggaataa

SEQ ID NO: 1095 - DNA, 894 bp, Staphylococcus aureus
atgcttattcctatccaaacatctgtcaattcaagactatcactgtatactaaatcrcctttctatacwtcattyatttcattttcagtwggwacwatwtgyttaatyrtyttaaatatywttatmaatccwgamgtatttactattcacttttwyartaatcaawcattyaactayacwtggktmgtyggyggwttrctyggkgttrgctwtttaactggcaatttattgttattgccaaaattaggtgcaacattaactgtaattgcaacagttgcgggtcaaattattatgggtgtcattattgatacatttggmttatttggygctacaattcatgattttaatttaattaaagcaattggagtattgttactcattrtcggyatcgtcataatgaatcaatttaacaagaataatttattactaactgatcaaaagtatttaytgttttggcttctmttaggatttatttttggtttctttccacctattcaaacgacaattaayagtkywttagcwagtcatactcattcaccagcctttgcatcattagtatcatttacaattgggtcaatarcgctattgattttaaccgctatttttaatmgttctttaaaactaaaaacaagtcatttaaaattcggtaaattaaarcctatctattttactggcggtatactwggyatggcttttgtaacakctaayatwatyttaatgccycatwtrggtgcagcattaacaacacttattggkatgtttggycaratwctwatgggcataytsatwgatcactttgsmytatttggttcacctaaaatagcwatgacatcmagaaaaactatwggyctrttrtgtatwttgacaggsattatayttttaagattattttaa

SEQ ID NO: 1096 - DNA, 741 bp, Staphylococcus aureus
atgaaagcattaatcatagatgatgagccattagcacgtaatgaattaacatatttattaaatgaaattggtggttttgaagaaattaatgaggcagaaaatgtaaaagaaacattggaagcactactgatmaatcaatatgacattatatttttagatgtcaatttaatggatgaaaatggkatcgaattaggagctaarattcaaaagatgaaagagccacctgcgattatttttgcaactgcacatgaccaatacgcagtacaggcatttgaattaaatgcgacagactatattttgaaaccgtttggtcaaaaacgtattgaacaagcagtcaataaagtkcgtgcgactaaagccaaagatgataatarcgcaartgcaattgcgaatgatatgtcggcgaattttgatcaaagyttacctgttgaaatwgacgataaaattcacatgttaaagcaacaaaatattattgggattggcacacataatggtattacaaccatacatacaacgaatcataaatacgaaacaacagagccattgaatcgttatgaaaaacgattgaatcccrcttatttyatacgtattcatcgttcatatattattaayacgaaacacattaaagaagtgcaacaatggtttaactayacttatatggtaatattgacaaatggtgtcaagatgcaagttggacgttcatttatgaaagattttaaagcgtcgataggrttactttaa

SEQ ID NO: 1097 - DNA, 114 bp, Staphylococcus aureus
atgggcattgcacctgaagttgttatgtggcgagatgttggggatatagatggtgttgtatgtggcgagatattggcgcacgtatacagcgttgaaccagraawtttaatgtag

SEQ ID NO: 1098 - DNA, 702 bp, Staphylococcus aureus
atggctagaaaagttgttgtagttgatgatgaaaaaccgattgctgatattttagaatttaacttaaaaaaagaaggatacgatgtgtactgtgcatacgatggtaatgatgcagtcgacttaatttatgaagaagaaccagacatcgtattactagatatcatgttacctggtcgtgatggtatggaagtatgtcgtgaagtgcgcaaaaaatacgaaatgccaatwataatgcttactgctaaagattcagaaattgataaagtgcttggtttagaactaggtgcagatgactatgtaacgaaaccgtttagtacgcgtgaattaatcgcacgtgtgaaagcgaacttacgtcgtcattactcacaaccagcacaagacactggaaatgtaacgaatgaaatcacaattaaagatattgtgatttatccagacgcatattctattaaaaaacgtggcgaagatattgaattaacacatcgtgaatttgaattgttccattatttrtcaaaacatatgggacaagtaatgacacgtgaacatttattacaaacagtatggggctatgattactttggcgatgtacgtacrgtcgatgtaacgattcgtcgtttacgtgaaaagattgaagatgatccgtcacatcctgaatatattgtgacgcgtagaggcgttggatatttcctccaacaacatgagtag

SEQ ID NO: 1099 - DNA, 1053 bp, Staphylococcus aureus
atgtcattaacaattaaagaacttcataatattttaggaggtaatctccttgatgctgaaggtaaagaggacaatgttataaataattttgagaattggttcccctttattcataataaaagcacagcctacatatcgcccaataagcatacatggagacgttttggtagagatgcaaacgcaaaagaaggtaatgaatatataaagaaggataaggaagatttaggattaattattactgaaacctatgttcctgacatgaagtttaaaactcctcaattagttatcaatgattctgcaaacacactaactaaattagctgaagaaatgagactacagtataaacaccctgttgttgctataacaggatcaatgggaaaaagttcaactagaatgctgataagtgctggtcttaaagattattatcctcttcaaaatagatttaataataacataagatccgcagtatatttattattatgcaaaatgattagacaaccaaattttgctgttttagaagtatcattaaacgcattaaatgcagttggtaattcatcatatttaataaaaccaaatattgctatagttactggtataggtgctgctcatatgtctacatttaaagatattctaaatattgtagaagtgaaagcaagtatttttgatggtttaactcctgagggagtagcaataattaataaagatacattacattcagatatattaatcgaacgcgccaaacaaaatacaagtaatgttattacttatagtacacatgactctagcgcaacaatttgtcctaaatctattcaatatagtaaaggctatacagttataacaattgattttaacggacaaaaatatacttatagaattaattcaataagtgacggtatggttgaaaactctctagccacatttgctacattatcgcatttagatataccactagaaagagccttagagaacttaagtacatttaaaccatttgaaaaagttttaaacctaaaagaagttgaaacacctaactataaagttaacttacatagatga

SEQ ID NO: 1100 - DNA, 444 bp, Staphylococcus aureus
atggtcgtgaaacaacaaaaagacgcatcaaaaccagcacacttttttcaccaagtcattgtaattgctttagtactctttgtatcgaaaataattgaatcatttatgccaattcctatgcctgsatcagtaatcggtttagtattattatttgtattattatgtactggtgctgttaagttaggcgaagtcgaaaaagtaggaacgacactaacaaataacattggcttactcttcgtaccagccggtatctcagttgttaactctttaggtgtcattagccaagcaccatttttaatcattggactaataatcgtctcaacaatactattacttatttgtactggctatgtcacacaaattattatgaaagttacttcgagatctaaaggtgacaaagtcacaaaaaagatcaaaatagaggaggcacaagctcatgattaa

SEQ ID NO: 1101 - DNA, 351 bp, Staphylococcus aureus
atgaaaattagaaaatctatacttgcgggaactttagcaatcgttttagcatcaccactagtaactaatctagataaaaatgaggcacaagctagcacaagcttgccaacatcgaatgaatatcaaaacgaaaagttagctaatgaattaaaatcgttattagatgaactaaatgttaatgaattagctactggaagtttaaacacttattataagcgaactataaaaatttcaggtcwaaaagcaatgtatgctcttaagtcaaaagactttaagaaaatgtcagaagcaaaatatcaacttcaaaagatttataaygaaattgacgaagcactaaaaagtaaatattaa

SEQ ID NO: 1102 - DNA, 468 bp, Staphylococcus aureus
atcctggcaattgataycctttttgcccttcactcgatamatatatctcaacaacatagaaatattacagtcgctacaccgcatcttaaatggtgtggttatttttattggaagtgtgtatcaggtatcagtaatgttaaaacaccagctaaaaatgaaaagaattcaccagtgccagcaggttatacactcgataaaaacaatgtaccgtataaaaaagagactggttattacacagttgccaatgttaaaggtaataacgtgagggatggctattcaactaattcaagaattacaggtgtattacccaataacgcaackatcaaatatgacggcgcatattgcattaatggctatagatggattacttatattgctaatartggacaacgtygttatatagcgacaggagaggtagacaaggcaggtaatagaataagyrgttttggtaaktttagygcastttga

SEQ ID NO: 1103 - DNA, 492 bp, Staphylococcus aureus
atgctcaaaagargtttattatttttaactgttttattgttattattctcattttcttcaattactaatgaggtaagtgcatcaagttcattcgacaaaggaaaatataaaaarggcgatgacgcgagttattttgaaccaacaggcccgtatttgatggtaaatgtgactggagttgakrgtaaarraaatgaattgctatcccctcrttatgtcgagtttcctattaaacctgggactacacttacaaaagaaaaaattgaatactatgtcgaatgggcattagatgcgacagcatataaagagtttagagtagttgaattagatccaagcgcaaagatcgaagtcacttattatgataagaataagaaaaaagaagaaacgaagtctttccctataacagaaaaaggttttgttgtcccagatttatcagagcatattaaaaaccctggattcaacttaattacaaaggttrttatagaaaagaaataa

SEQ ID NO: 1104 - DNA, 756 bp, Staphylococcus aureus
atgaaaacatacagtgaagcaagagcaaggttacgttggtatcaaggtagatatattgattttgacggttggtatggttaccaatgtgcagatttagcagttgattacatttattggttgttagaaattagaatgtggggaaatgcaaaagatgcaatcaataacgattttaaaaacatggcaacagtatatgaaaacacaccatcgtttgttccacaaataggtgatgtggctgtatttaccaaaggaatatataaacaatacggtcatattggtttagtgtttaatggtggtaatacaaaycaatttttaattttggaacarractatgacggtaacgcaaatacgcctgcaaagttacgttgggataattattacggctgtactcactttattagacctaagtataaaagtgagggcttaatgaataagatcacaaataaarttaamccacctgctcaaaaagcagtcggtaaatctgcaagtaaaataacagttggaagtaaagcrccttataaccttaaatggtcaaaaggtgcttattttaatgcgaaaatcgacggcttaggtgctacttcagccactagatacggtgataatcgtactaactatagattcgatgttggacaggctgtatacgcgcctggaacattaatatatgtgtttgaaattatagatggttggtgtcgcatttattggaacaatcataatgagtggatatgkyatgagwgattgattgtgaaagaagyrttttaa

SEQ ID NO: 1105 - DNA, 255 bp, Staphylococcus aureus
atgattaattggaaaattagaatgaaacaaaaatcattttgggtagcgatattgtcagctatctttttatttgctcaaaacatcgcmaaagctattgggtatgatatycaagtttatacagagcaattaacagacggtttaaacgctatattaggatttyyagtattaactggtgtgattcaagacccgactactaaaggtataggtgatagscaccaagctttagaatatgaagaaccaagaagaaaatactag

SEQ ID NO: 1106 - DNA, 153 bp, Staphylococcus aureus
atgcaggataacaaacaaggattacaagctaatcctgaatatacaattcattatttatcacaggaaattatgaggttaacacaagaaaacgcgatgttaaaagcgtatatacaagaaaataaagaaaatcaacaatgtgctgaggaagagtaa

SEQ ID NO: 1107 - DNA, 99 bp, Staphylococcus aureus
ttgaagacaattcagcgtattatacgtggaacatgtttgtgggaagtagcttttttatatrtgaagtttgattcaagtgramtsgatgygcagtttgaa

SEQ ID NO: 1108 - DNA, 702 bp, Staphylococcus aureus
atgattaaccacttagcactaaayacaccttacttcggaatactgttatccgttataccatttttcttagcraccatattatttgaaaaaacwaatcgtttcttcttattcgcaccgctatttgtcagtatggtatttggtgtggccttcctctatttaacaggmattccgtataaracttacaaaataggtggagacattatttacttcttcttagaaccrgcaacaatctgttttgcgattccgttatataaaaagcgtgaagtgcttgttaaacattggcatcgtatcatmggaggtattggtatcggtacagttgtagcgttattaattattttaacttttgcgaagttagcacaatttgccaatgatgttattttatcaatgktacctcaagcagcaactacagcgattgcgttaccagtatcagctggtatcggtggtataaaagaattaacatcattagcagttattttaaatggtgtcattatttatgccctaggtaataaattcttraagcttttccgaattactaaccctattgcccgaggattagcacttggaacaagtggtcacacattaggtgtagcaccagccaaagaattaggacctgtagaagaatcaatggcaagtatagctttagtgttagttggtgtagttgttgtagcagttgtgcctgtctttgtagcaatattcttctaa

SEQ ID NO: 1109 - DNA, 930 bp, Staphylococcus aureus
atgaaaaaattagtacctttattattagccttattacttytagttgctgcatgtggtactggtggtaaacaaagcagtgataagtcaaatggcaaaytaaaagtagtaacgacgaattcaattttatatgatatggctaaaaatgttggtggagacaacgtcgatattcatagtattgtacctgttggtcaagatcctcatgaatatgaagttaaacctaaagatattaaaaagttaactgacgctgacgttattttatacaacggattaaatttagagactggtaacggttggtttgaaaaagccttagaacaggctggtaaatcattaaaagataaaaaagttatcgcagtatcaaaagatgttaaacctatctatttaaacggtgaagaaggcaacaaagataaacaagatccacacgcatggttaagtttagataayggtattaaatacgtaaaaacaattcaacaaacatttatcgataacgacaaaaaacataaagcagattatgaaaagcaaggtaacaaatacattgctcaattggaaaaattaaataaygacagtaaagacaaatttaatgacattccaaaagaacaacgtgccatgattacaagtgaaggtgccttcaagtacttctcaaaacaatacggtattacaccaggttatatttgggaaattaacactgaaaaacaaggtacaccwgaacaaatgagacaagctattgagtttgttaaaaagcacaaattaaaacacttattagtagaaacaagtgttgataagaaagcaatggaaagtttatctgaagaaacgaagaaagatatctttggtgaagtgtacacagattcaatcggtaaagaaggcactaaaggtgactcttactacaaaatgatgaaatcaaatattgaaactgtacacggaagcatgaaataa

SEQ ID NO: 1110 - DNA, 3786 bp, Staphylococcus aureus
gtgatacatgttttagattttaacgacaagattatagatttcctttctactgatgacccttccttagttagagcgattcataaacgtaatgttaatgacaattcagaaatgcttgaactgctcatatcatcagaaagagctgaaaagttccgtraacgacatcgtgttattataagggattcaaacaaacaatggcgtgaatttattattaactgggttcaagatacgatggacggctacacagagatagaatgtatagcgtcttatcttgctgatataacaacagctaaaccgtatgcaccaggmaaatttgagaaaaagacaacttcagaagcattgaaagatgtgttgagcgatacaggttgggaagtttctgaacaaaccgaatacgatggcttacgtactacgtcatggacttcttatcaaactagatatgaagttttaaagcaattatgtacaacctataaaatggywttrgatttttatatwgagcttagytctaataccgtcaaaggtagatatgtrgtactcaaaaagaaaaacagcttattcaaaggtaaagaaattgartatggtaaagatttrgtygggttaactaggaagattgatatgtcagaaatcaaaacagcattaattgctgtgggaccygaaaatgacaaaggraagcgtttagagytagttgtgacwgatgacgaagcrcaaagtcaattcaacytacctayscgytatatttggggratataygaaccwcaatcagatgatcaaaatatgaatgaaacacgrttrmgttctttagccaaaacagagttaaataaacgtaagtcggcagttatgtcatatgagattacttctactgatttggaagttacgtatccgcacgagattatatcaattggygatacagtcagagtaaaacatagagattttaacccgccattgtatgtagaggcagaagttattgcygaagaatataacataatttcagaaaayagcacatatacattcggtcaacctaaagagttcaaagaatcagaattacgagaagagtttaacaarcgattraacmtaatacaycaaaarttaaacgayaatattagcaatatcaayactatagtwaaagatrttgtagatggtgaattagaatactttgaacgcaaaatwcayaaaartgatacaccgccagaaaatccagtcaatgataygctttggtatgatacaagtaaccctgatgttgctgtcttgcgtagatattggaatggtcgatggattgaagcaacaccaaatgatgttgaaaaattaggtggtataacaagagagaaagcgctattcagtgaattaaacaatatttttattaatttatctatacaacacgctagtcttttgtcagaagctacagaattactgaatagcgagtacttagtagataatgatttgaaagcggacttacaagcaagtttagacgctgtgattgatgtttataatcaaattaaaaataatttagaatctatgacacccgaaactgcaacgattggtcggttggtagatacamaarctttatttcttgartatagaaagaaattacaagatgtytatacagatgtagaagatgtcaaaatcgcyatttcagatagatttaaattattacagtcacaatacactgatgaaaaatataaagaagcgttggaaataatagcaacaaaatttggtttaacggtgaatgaagatttgcagttagtcggagaacctaatgttgttaaatcagctattgaagcagctagagaatccacaaaagaacaattacgtgactatgtaaaaacatcggactataaaacagacaaagacggtattgttgaacgtttagatactgctgaagctgagagaacgactttaaaaggtgaaatcaaagataaagttacgttaaacgaatatcgaaacggattggaagaacaaaaacaatatactgatgaccagttaagtgatttgtccaataatcctgagattaaagcaagtattgaacaagcaaatcaagaagcgcaagaagctttaaaatcatacattgatgctcaagatratcttaaagagaaggaatcgcaagcgtatgctgatggtaaaatttcggaagaagagcaacgcgctatacaagatgctcaagctaaacttgaagaggcaaaacaaaacgcagaactaaaggctagaaacgctgaaaagaaagctaatgyttatacagacaacaaggtcaaagaaagcacagatgcacagaggaraacaytgactcgctatggttctcaaattatacaaaatggtaaggaaatcaaattaagaactactaaagaagagtttaatgcaaccaatcgtacactttcaaatatattaaacgagattgtycaaaacgttacagatggaacaacaatcagatatgatgataacggagtggctcaagctttraatgtggggccacgtggtattagattaaatgctgataaaattgatattaacggtaatagagaaataaaccttcttatccaaaatatgcgagataaagtagataaaaccgatattgtcaacagccttaatttatcaagagagggycttgatatcaatgttaatagaattggaattaaaggcggtracaataacagatatgttcaaatacagaatgattctattgaactaggtggtattgtgcaacgwacttggaraggsaaacgwtcaacmgaygatatwttyacrcgwctkaaagayggwcayctaagrtttagaaataayaccgcwggcggttcactttatatgtcacattttggtatttcracwtatattgatggwgaaggygaagacggwggttcatcyggtackattcaatggtgggataaaacttacagtgatagyggyatgaatggyataacaatcaattcctatggtggtgtcgttgcactaacgtcagataataatcgggttgttctggagtcttacgcttcatcgaatatcaaaagcaaacaggcaccggtgtatttatatccaaacacagacaaagtgcctggattaaaccgatttgcattcacgctgtctaatgcagataaygcttattcgagtgayggttatattatgtttggttctgatgagaactatgattacggtgcgggtatcaggttttctaaagaaagaaataaaggtcttgttcaaattgttaatggacgatatgcaacaggtggagatacaacaatcgaagcagggtatggcaaatttaatatgctgaaacgacgtgatggtaataggtatattcatatacagagtacagacctactgtctgtaggttcagatgatgcaggagataggatagcttctaactcaatttatagacgtacttattcggccgcagctaatttgcatattacttctgctggcacaattgggcgttcgacatcagcgcgtaaatacaagttatctatcgaaaatcaatataacgatagagatgaacaactggaacattcaaaagctattcttaacttacctattagaacgtggtttgataaagctgagtctgaaattttagctagagagctgagagaagatagaaaattatcggaagacacctataaacttgatagatacgtaggtttgattgctgaagaggtggagaatttaggattaaaagagtttgtcacgtatgatgacaaaggagaaattgaaggtatagcgtatgatcgtctatggattcatcttatccctgttatcaaagaacaacaactaagaatcaagaaattggaggagtcaaagaatgcaggataa

SEQ ID NO: 1111 - DNA, 3783 bp, Staphylococcus aureus
gtgatacatgttttagattttaacgacaagattatagatttcctttctactgatgacccttccttagttagagcgattcataaacgtaatgttaatgacaattcagaaatgcttgaactgctcatatcatcagaaagagctgaaaagttccgtgaacgacatcgtgttattataagggattcaaacaaacaatggcgtgaatttattattaactgggttcaagatacgatggacggctacacagagatagaatgtatagcgtcttatcttgctgatataacaacagctaaaccgtatgcaccaggcaaatttgagaaaaagayaacttcagaagcattgaaagatgtgttgagygatacaggttgggaagtttctgaacaaaccgaatacgatggcttacgtactacrtcatggacttcttatcaaactagatatgaagttttaaagcaattatgtacaacctataaaatggyattggatttttatatagagcttagttctaataccgtcaaaggtagatatgtggtactcaaaaagaaaaacagcttattcaaaggtaaagaaattgagtatggtaaagatttggttgggttaactaggaagattgatatgtcagaaatcaaaacagcattaattgctgtgggacccgaaaatgacaaaggaaagcgtttagagttagttgtgactgatgacgaagcacaaagtcaattcaacttacctacccgttatatttggggaatatacgaacctcaatcagatgatcaaaatatgaatgaaacacggttgcgttctttagccaaaacagagttaaataaacgtaagtcggcagttatgtcatatgagattacttctactgatttggaagttacgtatccgcacgagattatatcaattggtgatacagtcagagtaaaacatagagattttaacccgccattgtatgtagaggcagaagttattgccgaagaatataacataatttcagaaaatagcacatatacattcggtcaacctaaagagttcaaagaatcagaattacgagaagagtttaacaarcgattgaayataatacatcaaaagttaaacgataatattagcaatatcaacactatagttaaagatgttgtagatggtgaattagaatactttgaacgcaaaatacacaaaagtgatacaccgccagaaaatccagtcaatgatatgctttggtatgatacaagtaaccctgatgttgctgtcttgcgtagatattggaatggtcgatggattgaagcaacaccaaatgatgttgaaaaattaggtggtataacaagagagaaagcgctattcagtgaattaaacaatatttttattaatttatctatacaacacgctagtcttttgtcagaagctacagaattactkaatagcgagtacttagtagataatgatttgaaagcggacttacaagcaagtttagacgctgtgattgatgtttataatcaaattaaaaataatttagaatctatgacacccgaaactgcaacgattggtcggttggtagatacacaagctttatttcttgagtatagaaagaaattacaagatgtttatacagatgtagaagatgtcaaaatcgccatttcagatagatttaaattattacagtcacaatacactgatgaaaaatataaagaagcgttggaaataatagcaacaaaatttggtttaacggtgaatgaagatttgcagttagtcggagaacctaatgttgttaaatcagctattgaagcagctagagaatccacaaaagaacaattacgtgactatgtaaaaacatcggactataaaacagacaaagacggtattgttgaacgtttagatactgctgaagctgagagaacgactttaaaaggtgaaatcaaagataaagttacgttaaacgaatatcgaaacggattggaagaacaaaaacaatatactgatgaccagttaagtgatttgtccaataatcctgagattaaagcaagtattgaacaagcaaatcaagaagcgcaagaagctttaaaatcatacattgatgctcaagatgatcttaaagagaaggaatcgcaagcgtatgctgatggtaaaatttcggaagaagagcaacgcgctatacaagatgctcaagctaaacttgaagaggcaaaacaaaacgcagaactaaaggctagaaacgctgaaaagaaagctaatgcttatacagacaacaaggtcaaagaaagcacagatgcacagaggaaaacattgactcgctatggttctcaaattatacaaaatggtaaggaaatcaaattaagaactactaaagaagagtttaatgcaaccaatcgtacactttcaaatatattaaacgagattgttcaaaatgttacagatggaacaacaatcagatatgatgataacggagtggctcaagctttgaatgtggggccacgtggtattagattaaatgctgataaaattgatattaacggtaatagagaaataaaccttcttatccaaaatatgcgagataaagtagataaaaccgatattgtcaacagccttaatttatcaagagagggtcttgatatcaatgttaatagaattggaattaaaggcggtgacaataacagatatgttcaaatacagaatgattctattgaactaggtggtattgtgcaacgtacttggagagggaaacgttcaacagacgatatttttacgcgactgaaagacggtcacctaagatttagaaataataccgcaggcggttcactttatatgtcacattttggtatttcaacatatattgatggagaaggcgaagacggaggttcatccggtactattcaatggtgggataaaacttacagtgatagcggtatgaatggcataacaatcaattcttatggcggtgtagtcgctttaacatctgactacaatcgaattattatcgattcatatgcttcagctaatattgaaagtagagaagcgccgatatatttatctccgaacaccaaaaataaacctggtttaaaccgattcgcattcacattatcaaacgctgatagtgcatacgaaactgacggttatatcatgtttgrttcagatgaaaactataagtacggtgctggattaagattttctaaacgtagcaataaaggattggttcaagtcgttaatggtgactatgctacaggcggagacactacaattgaatcaggtatgggcaaattcaacttagttaaacgaagagatggaaatagttacgttagcattcaaagttatgatttattggcggtaggttctgataatgctggcgatagagtcgcttctaattctatttataagcgtacttattcagcacctgctaacttacacattacttctgctggaacaattgggcgtgctacttctgccaaaaagtataaaatttcaatcgaaaaccaatacatcaatgaagacgatcagttcagtcattcaaaagagattttaaagcttccaattcgtacatggtttgacaaatatgaatcggaaataatggctaaagaattggaaagtggtaaaaagttatctgatgatacttttaaacttagtcgacatactggcttaatagcggaagaggttgaagaattaggatttaatgaatttgttatttatgatgacaacggagaaatcgaaggtatcgcatacgatagactttgggttcatttaatacctattattaaaaaccagcaatcaaaaatcgaaaaactggaggaattaataaatgaatga

SEQ ID NO: 1112 - DNA, 3783 bp, Staphylococcus aureus
gtgatacatgttttagattttaacgacaagattatagatttcctttctactgatgacccttccttagttagagcgattcataaacgtaatgttaatgacaattcagaaatgcttgaactgctcatatcatcagaaagagctgaaaagttccgtgaacgacatcgtgttattataagggattcaaacaaacaatggcgtgaatttattattaactgggttcaagatacgatggacggctacacagagatagaatgtatagcgtcttatcttgctgatataacaacagctaaaccgtatgcaccaggcaaatttgagaaaaagacaacttcagaagcattgaaagatgtgttgagcgatacaggttgggaagtttctgaacaaaccgaatacgatggcttacgtactacgtcatggacttcttatcaaactagatatgaagttttaaagcaattatgtacaacctataaaatggtattggatttttatatagagcttagttctaataccgtcaaaggtagatatgtggtactcaaaaagaaaaacagcttattcaaaggtaaagaaattgagtatggtaaagatttggttgggttaactaggaagattgatatgtcagaaatcaaaacagcattaattgctgtgggacctgaaaatgacaaagggaagcgtttagagctagttgtgacagatgacgaagcgcaaagtcaattcaacctacctatgcgctatatttgggggatatatgaaccacaatcagatgatcaaaatatgaatgaaacacgattaagttctttagccaaaacagagttaaataaacgtaagtcggcagttatgtcatatgagattacttctactgatttggaagttacgtatccgcacgagattatatcaattggcgatacagtcagagtaaaacatagagattttaacccgccattgtatgtagaggcagaagttattgctgaagaatataacataatttcagaaaatagcacatatacattcggtcaacctaaagagttcaaagaatcagaattacgagaagagtttaacaagcgattaaacctaatacaccaaaaattaaacgacaatattagcaatatcaacactatagttaaagatgttgtagatggtgaattagaatactttgaacgcaaaatacacaaaagtgatacaccgccagaaaatccagtcaatgatatgctttggtatgatacaagtaaccctgatgttgctgtcttgcgtagatattggaatggtcgatggattgaagcaacaccaaatgatgttgaaaaattaggtggtataacaagagagaaagcgctattcagtgaattaaacaatatttttattaatttatctatacaacacgctagtcttttgtcagaagctacagaattactgaatagcgagtacttagtagataatgatttgaaagcggacttacaagcaagtttagacgctgtgattgatgtttataatcaaattaaaaataatttagaatctatgacacccgaaactgcaacgattggtcggttggtagatacacaagctttatttcttgagtatagaaagaaattacaagatgtttatacagatgtagaagatgtcaaaatcgccatttcagatagatttaaattattacagtcacaatacactgatgaaaaatataaagaagcgttggaaataatagcaacaaaatttggtttaacggtgaatgaagatttgcagttagtcggagaacctaatgttgttaaatcagctattgaagcagctagagaatccacaaaagaacaattacgtgactatgtaaaaacatcggactataaaacagacaaagacggtattgttgaacgtttagatactgctgaagctgagagaacgactttaaaaggtgaaatcaaagataaagttacgttaaacgaatatcgaaacggattggaagaacaaaaacaatatactgatgaccagttaagtgatttgtccaataatcctgagattaaagcaagtattgaacaagcaaatcaagaagcgcaagaagctttaaaatcatacattgatgctcaagatgatcttaaagagaaggaatcgcaagcgtatgctgatggtaaaatttcggaagaagagcaacgcgctatacaagatgctcaagctaaacttgaagaggcaaaacaaaacgcagaactaaaggctagaaacgctgaaaagaaagctaatgcttatacagacaacaaggtcaaagaaagcacagatgcacagaggaaaacattgactcgctatggttctcaaattatacaaaatggtaaggaaatcaaattaagaactactaaagaagagtttaatgcttctaaaagaacactatcaagattgttagcagacatcactgtaaatgctatgaaaggcatctatttaaggtatgacgaaaatggggcgattacttcacatactattgataaagatggcgtgaaaattagtggcgataaagttgatataacagcgaatagagaatttaatgtagtcgcaaataatattaataacaaagttggtaaaaatgacattgttaatagcctaaacttatcaaatgaaggtcttgacatcaatgtgaatagaattggtattaaaggcggaaatgctaaccgttatgtacaagttcaaaatgattttattgaacttggcggaatcgtacaacgaacttggaaaggcaaacgatcaaccgatgatatattcacacgtcttaaagatggacatctaaggtttagaaataataccgcaggcggttcactttatatgtcacattttggtatttcaacatatattgatggagaaggcgaagacggaggttcatccggtactattcaatggtgggataaaacttacagtgatagtggtatgaatggcataacaatcaattcttatggcggtgtagtcgctttaacatctgactacaatcgaattattatcgattcatatgcttcagctaatattgaaagtagagaagcgccgatatatttatctccgaacaccaaaaataaacctggtttaaaccgattcgcattcacattatcaaacgctgatagtgcatacgaaactgacggttatatcatgtttggttcagatgaaaactataagtacggtgctggattaagattttctaaacgtagcaataaaggattggttcaagtcgttaatggtgactatgctacaggcggagacactacaattgaatcaggtatgggcaaattcaacttagttaaacgaagagatggaaatagttacgttagcattcaaagttatgatttattggcggtaggttctgataatgctggcgatagagtcgcttctaattctatttataagcgtacttattcagcacctgctaacttacacattacttctgctggaacaattgggcgtgctacttctgccaaaaagtataaaatttcaatcgaaaaccaatacatcaatgaagacgatcagttcagtcattcaaaagagattttaaagcttccaattcgtacatggtttgacaaatatgaatcggaaataatggctaaagaattggaaagtggtaaaaagttatctgatgatacttttaaacttagtcgacatactggcttaatagcggaagaggttgaagaattaggatttaatgaatttgttatttatgatgacaacggagaaatcgaaggtatcgcatacgatagactttgggttcatttaatacctattattaaaaaccagcaatcaaaaatcgaaaaactggaggaattaataaatgaatga

SEQ ID NO: 1113 - DNA, 1491 bp, Staphylococcus aureus
atgcaagatacaattcaaatagacaataaaacmattgratggytrgttgtrcaaagagggttygagataccctcttttaattttgttactgaaaaagaaarygtraaaggtagarcrggwtctattgytaarrmtcgttatytaaatgatatcgaatttgawttaccwytaatwattmgaaaygaarwmttgkcrccaggtggasaaaaaacrcaygaygatatattrgaagmrttrgtyrarttyttyratattramratttaamrcckaaaaaacttaaattcaaatctcaaammtggtattggtttgcataytttgatggwccattaaaattaccgaaaaacccaagaggttcagtgaagttcactatmaaagtagtrytaacagayccttayaaataytcrgtaacwggaaayaaaaayacygcgatttcagaccaagtttcagttgtaaatagtgggactgctgacactcctttaattgttgaagcccgagcaattaaaccatctagttactttatgatcactaaaaatgatgaagattattttatggttggtgatgatgaggtaaccaaagaagttaaggattacatgcctcctgtttatcatagtgagtttcgtgatttcaaaggttggactaagatgattactgaagatattccaagtaatgayttaggtggtaaggtcggyggtgactttgtgatatccaatcttggcgaaggatataaagcaactaattttcctgatgcaaaaggttgggttggtgctggcacgaaacgagggctccctaaagcgatgacagattttcaaattacctataaatgtattgttgaacaaaaaggtaaaggtgccggaagaacagcacaacatatttatgatagtgatggtaagttacttgcttctattggttatgaaaataaatatcatgatagaaaaataggacatattgttgttacgttgtataaccaaaaaggagaccccaaaaagatatacgactatcagaataaaccgataatgtataacttggacagaatcgttgtttatatgcggctcagaagagtaggtaataaattttctattaaaacttggaaatttgatcacattaaagacccagatagacgtaaacctattgatatggatgagaaagagtggatagatggcggtaagttttatcagcgtccagcttctatcatagctatctatagtgcgaagtataayggttataagtggatggagatgaatggattaggttcattcaatacggagattctaccraaaccgaaaggcgcaagggatgtcattatacaaaaaggtgatttagtraaaatagatatgcaagcaaaaagtgttgtcatcaatgaggaaccaatgttgagcgagaaatcgtttggaagtaattatttcaatgttgattctgggtacagtgaattaatcatacaacctgaaaacgtctttgatacgacggttaaatggcaagatagatatttatag

SEQ ID NO: 1114 - DNA, 1485 bp, Staphylococcus aureus
atgatagacactattaaagtgaacaacaaaacaattccttggttgtatgtcgaaagagggtttgaaataccctcttttaattatgttttaaaaacagaaaatgtagatggacgttcggggtctatatataaagggcgtaggcttgaatcttatagttttgatatacctttggtggtacgtaatgactatttatctcacaacggyattaaaacacatgatgacgtcttgaatgaattagtaaagttttttaactacgaggaacaagttaaattacaattyaaatctaaagattggtactggaacgcttatttygaaggaccaataaagctgcacaaagaatttrcaatacctgttaagttcactatcaaagtagtactaacagacccttacaaatattcagtaacaggaaataaaaatactgcgatttcagaccaagtttcagttgtaaatagtgggactgctgacactcctttaattgttgaagcccgagcaattaaaycatctagttactttatgatyactaaaaatgatgaagattattttatggttggtgatgatgaggtaaccaaagaagttaaggattacatgcctcctgtttatcatagtgagtttcgtgatttcaaaggttggactaagatgattactgaagatattccaagtaatgayttaggtggtaaggtcggcggtgaytttgtgatatccaatcttggcgaaggatataaagcaactaattttcctgatgcaaaaggttgggttggtgctggcacgaaacgagggctccctaaagcgatgacagattttcaaattacctataaatgtattgttgaacaaaaaggtaaaggtgccggaagaacagcacaacatatttatgatagtgatggtaagttacttgcttctattggttatgaaaataaatatcatgatagaaaaataggacatattgttgttacgttgtataaccaaaaaggagaccccaaaaagatatacgactatcagaataaaccgataatgtataacttggacagaatcgtygtttatatgcggctcagaagagtaggtaataaattttctattaaaacttggaaatttgatcacattaaagacccagatagacgtaaacctattgatatggatgagaaagagtggatagatggcggtaagttttatcagcgtccagcttctatcatagctatctatagtgcgaagtataayggttataagtggatggagatgaatggattaggttcattcaatacggagattctaccraaaccgaaaggcgcaagggatgtcattatacaaaaaggtgatttagtraaaatagatatgcaagcaaaaagtgttgtcatcaatgaggaaccaatgttgagcgagaaatcgtttggaagtaattatttcaatgttgattctgggtacagtgaattaatcatacaacctgaaaacgtctttgatacgacggttaaatggcaagatagatatttatag

SEQ ID NO: 1115 - DNA, 4530 bp, Staphylococcus aureus
atgggagaaagaataaaaggtttatctataggtttggatttrgatgcagcaaatttaaatagatcatttgcagaaatcaaacgaaactttaaaactttaaattctgacttaaarttaaccggyaacaacttcaaatataccgaaaaatcaactsatagttacmaacaaaggattaaagaacttgayggaactatcayaggttataagaaaaaygttgatgatttagccaagcaatatgrcaaggtatctcaagaacagggygaaaacagygcrgaagctcaaaaattacgrcaagaatataacaaacaagcaaatgagctgaattwtttagaaaragaaytrsaaaaaacawcrrctgagtttgaagagttcaaaaaagcycaagttgaagctcaaagaatggcagaaagtggctggggraaaaccagtaaartttttgaaagtatgggacctaaattaacaaaaatgggtgatggtttaaaatcyattggtaaaggtwtgatgattggtgtwacygcacctgttttaggtattgcagcagcatcaggaaaagcttttgcagaagttgataaaggtttagatacagttacccaagcaacaggagcaaccggcggagagcttaagaagttgcagaattcatttaaagatgtttatggcaactttccagmagaygctgagactgtaggcggtgttttaggggaagttaacacaaggttaggtttcactggcaaagaacttgagagtgccacagagtcattcttgaaatttagtcacataacaggttctgamggcgtacaagccgttcaattaattacgcgtgcaatgggtgatgcaggtattgaagctgatgagtatcaaagtgtacttgatatggtagcgaaagcagcacaggctagcggtataagtgttgatacattagctgatagcattactaaatacggtgctccaatgagggctatgggctttgagatgaaagaatcaatcgctttattctctcaatgggagaaatcaggtgttaatactgaaatagccttcagtggtttgaaaaaagctatatccaattggggtaaagckggtaaarayccaagagaagaatttaagaagacattagcagaaattgaaargacrccggatatagctagcgcaacaagtttagcgattgaagcatttggtgcaaaagcaggtcctgatttagcagatgctattaaaggyggtcgytttagttaycaagarttyttaaaaactatcgaagattcscaaggmacrgtmaatcaracrtttaaagattctgaaagtggctccgaaagatttaaagtagcaatgaataaaytwaaattagtaggtgctgatgtatggrcttctattgaaagtgcgtttgcwccagtmatggaagaattaatcaaaaagctatctrtagcrgttgattggttttcmartttaagtgatggwtctaaaagrtcrattgttatwttcggtggtattgctgctgcaattggtcctgtagtttttggattaggygcattyataagyacarttggcaaygcagtaactgtattagcyccaytattagctrgtattgyaaaggctgryggattrattagttttttatcractaaagtrcctatwttaggaacwgtcttcacrgcwttaactggtccaattggyatygtrttaggtgtwytggctggyttagcagtcgcatttacaatwgcttataagaaatctgaaacwttyagaaattttgttaatggtgcaattramagtgttaaacaaacrtttagtaatttyattcaatttatycaacctttcattgattcygttaaaaacrtctttaaacaagcgrtwtcagcaatmgttgatttygctaaagatatttggagtcaaatyaatggattctttaatgaaaayggaatttcyattgttcaagcrcttcaaaatatatgcaaytttatyaaagckatatttgaatttatywtaaattttgtaattaaaccaatyatgttygcratytggcaagtgatgcaatttatttggccggcggttaaagcyttrattgtcagyacttgggaraatatmaaaggwgtratacaaggdgctwtwaatatyathytrgstwtwatyaarktsttytcwagtytwttyacwggwraytggcgagghgtttgggaygsbattgtdatgatwctdaaaggyastgtkcarttaatwtggaatttaatwcaaytrtggtttgtaggyaaratwctwggygttgttagrtactttggyggattgctwaaaggwttaatadchrktathtgggdygywatmawargyrtwttcavdaaatcwttatcdgcaatttggaatgcracraaaagtatttttggwttcttatwyaatagtgtyaaatcwattttcackaatatgaaaaaytggttatctartacktggartartatcmrwassaatacsrtmggmaargckcaktcrttatttaskggygtmarrtcwaaattyacwartttatggaatgcgacgaaagawatwtttabtaawttaagaaattggatgtcaaayatytggaaytcyattaaagataayackgtaggwatwgckrgycgyttatggrrtarrgtrcgtrrmatytttrsaaryatgcgtgacggyttamaawstatyatyrgyaaaattaaarrtcatatcggyggtatggtagaygctrttaaaaraggwcttaataaattaatygamggtttaaactgggtcggtggtaagttgggyatggayaaaatacckaagttacayactggtacwgarcayacrcatactactacaagattagttaagaacggtaagattgcrcgkgayacrttcgctacrgttggrgataarggamgyggaaatggtccraatggtttyagaaaygaaatgattgaattccctaatggyaaacgkgtamtyacrccwaatacagatackacdgcktayttacctaaaggytcaaaagtatayaacggbgcacaaacttattcaatgttaaayggaackcttccragatttagywtaggtactatgtggaaagatattaartcyggtgcatcatcrgcatttaactggacaaaagatmaaataggtaaaggtaccaaatggcttggcgataaagttggcgatgttttagattttatkgaamatccaggmaaacttttaaattatatacttgaagcttttggaattgatttcaattctttaactaaaggwatgggaattgcaggcgacataacaaaagctgcatggtctaagattaagaaaagtgctactgattggataaaagaaaatttagaagctatgggcggtggcgatttagtcggyggaatattagaccctgacaaaattaattatcattatggacgtaccgcagcttataccgctgcaacyggaagaccatttcatgaaggtgtcgattttccatttgtatatcaagaagttagaacgcckatgggtggyagacttacaagaatgccrtttatgtctggtggttatggtaaytatgtaaaaattactagtggcgttatcgatatgctatttgcgcatttgaaaaactttagcaaatcaccacctagtggcacgatggtaaagcccggygatgttgttggtttaactggtaataccggatttagtacaggaccacayttacattttgaaatgaggagaaayggamgmcattttgaccctgaaccatatttaagraatgcwaagaaaaaaggwagrttatcaatwggtggyggygrygctacttctggaagtggygcaacttatgccagycgagtaatccgacaagcrcaaagtattttaggwggwcgttataaaggtaagtggattcatgaccaratgatgcgmgttgcaaarcgygaaagyaactaycartcaaatgcagtgaataaytgggayatwaatgctcaaagaggagacccrtcwagaggattattccaaatyatcggctcaacttttagagcwaacgctaaacgwggrtayactaaytwtaataatccrgtwcatcaaggtatytcagcaatgcagtacattgttagacgmtayggttgggrtggwtttaarcgtgckggtgattacgcatatgctacaggyggaaaagtttttgatggttggtataacttaggtgaagacggtcatccagaatggrttattccaacagatccagctcgtagaaatgatgcaatgaagatkttrcattatgcagcwgcrgaagtwagagggaaaaamgcragtaaraataarcgwcctagycaattatcakasttaaaygggtttgatgayccwagcttattattgaaaatgattgaacaacagcaacaacaaatagctttattactgaaratagcrcaatctaacgatgtgattgcagataaagattatcagccgattattgacgaatacgcttttgataaaaaggtgaacgcgtctatagaaaagcgagaaaggcaagaatcaacaaaagtaaagtttagaaaaggaggaattgctattcaatga

SEQ ID NO: 1116 - DNA, 4651 bp, Staphylococcus aureus
atgcctaatcctataggtaatatggtcataaaggttgatttagatggttctggattcaatagaggtgtgacaggtttaaataggcaaatgaaaatggtttcgcgtgagctttcggctaatttatcacaattttctagatatgataattcattagaaaagtcgaagataaaagtcgaaggtttgagtaaaaaacaaaaagttcaagcccagattactaaagagctgaaagatagttatgacaaacttagtaaagaaactggtgaaaacagtgcaaagacacaagctgcggctgctaaatacaatgaagcttacgctaaattaaaccaatatgagcgagagttaaaycaagccacacaagaattaaaagacatgcaaagagagcagaaagcattaaatactgcaatgggaaaacttggtaccaactttaataattttggtcctaaacttcaagaaattggtaacagtatgaaaaatgtaggccgtaacatgactatgtatgtaactgcgccggtggttgctgggtttgctgtagcagctaaaaaaggtattgaattcgatgacagtatgagaaaagttaaagcaacttcaggtgctactggggaagagtttgaagctttgaagaaaaaggctcgcgaaatgggtgcaacaacaaaatttagtgcatcagattcggctgaagcattaaattacatggcacttgctggttgggattctaagcaaatgatggaaggtttaagcggagttatggatttagcggcagcatctggcgaagaactggragcagtaagtgacattgttacagatggactaacggcattyggtttaaaagcaaaggatagtggtcatttwgcggacrttttagcacaaactagctcgaaggcaaatacggatgtyagaggrctcggagaagcttttaaatatgtcgctcctgtagcaggtgcgttaggttacacgattgaagatacatctattgcgataggtttaatgagtaatgctggtatcaaaggtgaaaaagcaggtacagcgttacgaacaatgttcaccaatctttcaagtccaactagagctatggggaatgaaatggaacgcttaggaatatctattacagatagtaatgggaaaatgattcctatgcgaaagcttttagaccaactgagggaaaaatttaaacatctttcaaaagaccaacaagctagttctgcagctacaatatttggtaaagaagcgatgtcaggagcattagcgattataaatgcttctgatgaagactatcaaaagttaaccaaatctatagattcatctaccggcgcatctaaaagaatggccgatacaatggaatctggtttaggtgggaaattaagaactttaaggtcgcaattagaagaactagccytaacgatttatgacagaatagaaccagcactaaagattatagtaagtgcttttagcaaagtagtgacatgggttactaaattaccaacgtcaattcaattagcggttgttgrgtttggattatttgyagcagttttaggtcctttagtttttatgttcggtttatttatcagcgtgatggggaatgcaatgacagttttaggacccttgttaataaacgttaataaagctrgtggtttattcgcgtttttaagaactaaaatcgcatcacttgttaaactatttccgattttaggtgtgtcgatatcaagtttaacgttrcctataacattaattgtaggtgcattagttggtattggcatagctttctatcaagcttataaacgttcagaaacttttagaaatattgtaaatcwggcaatctctggtgtagcaaacgcatttaaagcagctaaactagcgttacaaggtttctttgatttattcaaaggtgatagtaaaggcgcggttaccctagagaagatatttccacccgaaactgtagcaggaatacaaaatgtagttaatacgattagaacaactttctttaaagtagttgatgcaatcgttggtttcgccaaagagataggcgctcaattagcctctttctggaaagagaacggctcagaaataacacaagctttgcaaaatatagctggtttcattaaagcaacctttgaatttatttttaactttattattaaaccaatcatgtttgcgatttggcaagtgatgcaatttatttggccggcggttaaagctttgattgtcagcacttgggaaaatatcaaaggtgtaatacaaggkgctwtwaatatwatayttggstattatyaarktsttytcwagtytwttcacwggwaaytggcgaggygtttgggacggyattgtratgatactraaaggyactgtgcagttaatttggaatttaatacaactgtggtttgtaggtaagattctaggtgttgttagatactttggtggattgcttaaaggtttaatatccggtatctggggtgttatcaaaggtattttcacaaaatcattatctgcaatttggaatrcaacgaaaagtatttttggtttcttatacaatagtgttaaatctattttcactaatatgaaaaactggttatctagtacgtggaataatatcaaaagcaataccgtcggcaaggctcattcgttatttacgggtgtaaggtctaaattcacaagtttatggaatgcgacgaaagatatatttactaaattaagaaattggatgtcaaacatctggaactctattaaagataacackgtaggtatagctggtygyttrtgggataragtrcgtaayatcttyggaarcatgcstgacggtttaaaatctatcattggtaaaattaaagatcatatcggyggtatggtagaygctrttaaaaraggwcttaataaattaattgaaggyttaaactgggtcggtggtaagttrggtatggayraaatacckargttacacactggtacwgarcayacrcatactactacaagattagttaagaacggtaagattgcrcgkgatacrttcgctacrgttggggataaaggacgtggaaatggtccraatggtttyagaaatgaaatgattgaattccctaatggyaaacgkgtamtyasrcctartacagayackacwgcktayttacctaaaggytcaawagtatayaacggygcacaaacttattcaatgttaaayggaacgcttccragatttmrywtmggtactatgtggaaagatattaaatcyrgtgcatcatcggcatttaactggacaaaagatcaaataggtaaaggyacaaagtggcttggcgataaagttggtgatgtcatggactttatcgataatccaggcaaacttttaaattatgtacttcaagcgtttggagttgatttcagttctctaactaaaggtatgggtattgctggcgatataacaaaagctgcatggtctaagattaagaaaagtgcaatcaagtggcttgaggatgctttcgcagagtcgggtgatggcggtgtattagatatgartaaattacgttacttatacggtcacactgctgcttatacacgagaaaccggacgcccattccatgaaggtctggattttgattacatttacgaacctgttccatcaaccattaatggtagagcacaagttatgcctkttcataatggtggttatggaaaatgggtgaaaattgtaaagggcgccttagaagttatttatgcacatttatctaaatataaagttaaaactggtcaacaagttagggtcggmcagactgttggtatatcggggaatacggggtttagtacaggacctcacttacattatgagatgcgttggaatggaagacatagagacccgttaccgtggttaagaaagaataatgggggcggcaaaagtacacccggtggtaatggtgcagctaatgctagacgagctattaaggctgctcaaaatattttaggaggaaggtataaggcgagttggattactaacgagatgatgcgtgttgcgagtcgtgaatccaattatacagctaatgcagtcaataattgggatagcaacgcaagagctggtataccttcaagaggtatgttccaaatgatagatccttcatttagagcgtacgcaaagtcgggttacaataatcctctcaacccaactcatcaagctatatcggctatgagatatattgtgggtaaatgggtaccaagaacaggctcatggagagctgcgttcaaacgcgctggtgattacgcatatgctactggtggcaaagtctataacggattgtaycacttaggggaagaaggatatccagagtggataatacctactgatccaagtagagcgaacgaagcacacaaattattagctttagctgctaacgatattgataaccgctctaaaaataagcgaccaaacaacttaccaaatccaagtataagtaatagtgatacaaactatattcatacattggagaataaactrgatgcggttattaattgtttggttagtttggttgagtctaatcaagttattgcagataaggattacgaaccagttattaataagtatgtgtttgaagatgaggtaaataattctatcgataaacgagagcgtcacgaatctacaagagttagatttagaagaggaggcacgataatctaa

SEQ ID NO: 1117 - DNA, 120 bp, Staphylococcus aureus
ttgatagaaaaaggcatggatgcagaaaaagtggctaacatgccgatacacttctttttagacattgtcgaatcgaagattgaaacaaagcgaactgcgaaaagttttaaagatattttt

SEQ ID NO: 1118 - DNA, 447 bp, Staphylococcus aureus
atggaacgtacatcaattgaattaattacaggatttacaaaaacaggaaagccgcaatatcaaaagtatttagcgaasscgattattactttgtttgaaacaattcaaggttcaaaattaggtttgaaacttaacaaagcctttaagggggctgattttaaagatctaacagaagaagaatttaataacttaagtgtgacagaacaggaagaatacaaaaacaagcaagaagaatacgaaaacaacatsgctgtacaaatggaagtattagaagaagttttggatttcatcgttgaagcttttgataatcaatttaccagtatagmacttcaaaaaggattaccaaatggtcaagaaggtattgaaaagattggacagttaattggacgaattacaggtggggaacctagcgatacaaaaaagttcgtgacagagaatcagaaataa

SEQ ID NO: 1119 - DNA, 96 bp, Staphylococcus aureus
gtgaattggattatcgaattagatctatggttatggtgtgttggtgctattaatttgataaatgcggttaatgactatgcaaatgaaattcttttg

SEQ ID NO: 1120 - DNA, 954 bp, Staphylococcus aureus
atgattgaaaaattgaaacaagcaccaagatttttaaaattaaacttacaacattttgcagatacaggagtttcgggtatcgcaattggggtatcaaacttttattatgcacctattttaaaagatacagaaaatgaatgggaaactggagctggcacacgtattcgtttcttaaaagaaattgaagtagaccgtccacaagataccgaggaagattatggggatgatatggtcgcagcaactgctgtatctaatggyaaactaagtgttaagacaacatttgttactgttcctgctgacgataaggcgttcttgaatggcgctaaaaaaggtgtaggtggttataaatatggagctaaggatatcccgccagatgtagcgattgtatttgaaagacgtaatcatgatgagtcttcagaatgggttggcttgttcaaaggtaaattcactcgttcaagcatcaaagggcaaacaaaacaagataaagttgaattccagaatgacgacgtagaaggcaattttattgatcgtttgtttgatgagagctcgcatgttactggctatgataaaaaaggaagcactacagggcgcgattatgtattcatggaaacatttggtaaaacttatgatgaattcatgtctagtcgaggagaacaawatatggaacctgtagaaaaagaaatgaaaaaaacagaaaaagttgaagtcacttctgtaaacgtcactgatgaacaagttacagttaaagttgatgctactaaacaactatcagccacaaccgaaccatctggacagaaagtaacttatgcagtgactgaggggcaaasgtatgctagcgtaacatcaactggcctcgttaaaggtttggcggaaggtaatgcgaccgttacagcgactgcaggaaagcaaactgatactgtgcaaattacagtacaatctaatttagaaatgtaa

SEQ ID NO: 1121 - DNA, 381 bp, Staphylococcus aureus
atgattaatgttaccaaattaattagaaacgctattattgcaaataacattacagatgaagtgaatgtgtttaactacactatagatgaccattttcacgaaaaaactgacaagcctattattcgyatatatcccttaccgttcaatcytgacacatacgctgatgataacgagatttcaagagaataccattaccaaattgatgtttggtggtctcaagatgaaccgaacgagcaagyagaaaaaattgttgagttactcaaagtgataaattttcaatgttattacagagaaccgttatacgagagtgacgtcatgtcattcagacatattataagagcaaaaggctcgattttatcaatgaaattggaggaaaattaa

SEQ ID NO: 1122 - DNA, 378 bp, Staphylococcus aureus
atgggggcaagaattgaaagtaataacatcgaacaaggtttgaaaaatgcagttttaaaaatgaatttaaatagtaatgtaattgtcaaagctggggctatgtcattagtcccgcttttaaaaagtaatacaccttttgcgaatactaaaaagcatgctcgcgatcacatagctgtttctaatgtgaaaacagacagacacacaagtgagaaaatygttacaattggttacgctaaaggcgtctcacatcgtattcatgcaacagaatttggaacaatgtaccaaaaaccacaattgtttataacaaaaacagaaaagcaagggaaaaacaaagttttaaaaacaatgcttgatactgctaagaggttgcaaaaatga

SEQ ID NO: 1123 - DNA, 342 bp, Staphylococcus aureus
gtgaaaatgatgaaatttaattccaataaattaaatgaacgtatagatttttgtgaagatgtaagcgagagagtgaacggaaatccgatgaaaccgaagacgaaaatattatactcttgtttcgcttgcattcaagaatctaaagaatccgacactcaaacgaatctcaatacaggtagcaaattcattaaaactattattatcagagatacacgaggtgattataaaccaacaaataagcattacgtcttgcatgaagggcaaagatttaacatcaaatatgtaaagccagattatcaagataaatcttatttgcgtatctatggcgaggtggtcatttaa

SEQ ID NO: 1124 - DNA, 333 bp, Staphylococcus aureus
atgcaattaacagctgaggaacttaagttattaaaaaagcattgcaaaatagatcacaattcagaggacgacttattagaaatatattactcttgggcattccrtgaaatagctagcgctgtyacggatraaccaagtaaatatattgattggtttaaaagtcatcctctatttgctcgtgctayataccctttagcaagttactattttgaaaaccgtattgcttatttggatagggatttatcgcttgcgccacatatggttttaagtacggtgcataaattgagaggttcatttgagcaatttttggagagtgaaaatgatgaaatttaa

SEQ ID NO: 1125 - DNA, 792 bp, Staphylococcus aureus
atgagcaataaatataaagaacaagcccaagacattcttacagctgtaggtggtgtcgaaaacattgttgatgcaacgtatgayacgaagtgcattacaattcatatgcaacatacaattccttctacagcaaatgaagtgaaacaaatagttgatgtgacatctgtagcagaaaatgatrcgcagttagtcataaaattaaatggaaatgtcgatgaagtgtatcagcaattacagcgattaattaagaatgctaatgtcgaagagagtgagaatactgacaatattaatagycaagatacaagttatayacctcaagtaaaagtaacaacaccaattttagtgaaagcaccaatcgctggtcgtcgtattttacttaaagaagtaagagattcaatttttagagagaaaatggtaggygaaggcttrgcaatcaaagctcatgaagaatccaaagtaatcgcaccgttcaatggtttaatatctatgattgtaccaactaagcatgcagttsgtattcaatcagaagacggtgtggacatagtcattcatattggcgtgaatacagttgacttggaaggtaaagggttcaagtgctttgtaaagcaaaatgatcrtgttgaagcagggcaaacgttgttrcaattcgaccagcaatatatacaacaacaaggctacaatgctgacgttattgtcgttattagcaactctgccgatttaggaaaagtagaactgacaatgaatgaaatcattacgactgaagatgttatttttaaaatatttaaaaactag

SEQ ID NO: 1126 - DNA, 837 bp, Staphylococcus aureus
atgttagagtttgtcgaacatttatttacatatcaattcttgaatcgagcattgataacttcaattattgtagggatagtttgtggtacagttggtagtttaattgtattacgtggtctttcattaatgggagatgcaatgagtcacgcagtattacctggtgttgccctatcattcttatttggtattccaatgtttgtaggcgcacttataactggtatgatcgcaagtatttttatcggttatatcacatctagtagtaaaacgaaacctgacgccgctattggaattagttttaccgctttcttagcttcggggattattattattagcttaataaacactacgacagatttgtaccatattctgtttggtaatttactggcaatcacaaatagtgcatttttaacaactatwgtgattggttcaatcgtccttattctaatcattattttctatcgtccattaatgatttctacattcgatccaacktttagtagaatgagtggtctaaatacgacgttattacattactttgtgatgttgttactctcattagtaacagtagcaagtattcaaacggtaggtattattcttgtagttgcattattaattacacctgcatctacagcatttttaattagtaaaaaactatactcaatgatgattatagcaagtttaataagtgtcataagttcaattgtcggactttattacagctatatttacaacattcctagtggtgcracaatcgtactttgtacgtttgtaatttatatcatcacattatttttcacaaaatttacgaatagaaagaaacgaggaagtttaacatga

SEQ ID NO: 1127 - DNA, 843 bp, Staphylococcus aureus
atgataagtcatatatttccattctattatcaagttgagggggtaatacttatgggcaataaatataaagattatgctcaagacatccttacagctgtggggggtgtcgaaaatattgttaatgtatcgtatgatacggtacgcatgaccattcatatgcatcatgcaattccttctactgctaatgaagtaacacaaatagatggcgtggcgtcagttgatgaaaatgaaacacagttagttatcgtatttaatgaagaagtaaaatatgtatatcaacaattacaattgttaatggacgacgccaagcatcaagaagatacgaatcatgatgctgtggatactcaagaaacagaacagaaagcgcaagcaaaagtgacaacaccaattttagtgaaagcaccaatcgctggtcgtcgtattttacttaaagaagtaagagattcaatttttagagagaaaatggtaggcgaaggcttggcaatcaaagctcatgaagaatccaaagtaatcgcaccgttcaatggtttagtatctatgattgtaccaactaagcatgcagttggtattcaatcagaagacggtgtggacatagtcattcatattggtgtgaatacagttgacttggaaggtaaaggattcgagtgctttgtaaagcaaaatgatcgtgttgaagcagggcaaacgttgttacaattcgaccagcaatatatacaacaacaaggctacaatgctgacgttattgtcgttattagcaattctgccgatttaggaaaagtagaactgacaatgaatgaaatcattacgactgaagatgttatttttaaaatatttaaaaactag

SEQ ID NO: 1128 - DNA, 159 bp, Staphylococcus aureus
atggcaatgtatgaagtgaagaaatcttatactgacttggaaaaaggccagtatttaaagtcaggtaaacgtgttgaaatgacagtaaaacgtgctgaatatgttaacaaaaagctgaaagagcatggagtaatacttgaaagagtaaaagaagaatag

SEQ ID NO: 1129 - DNA, 1248 bp, Staphylococcus aureus
atgaaaacaaaagaagagttacaatctgagatttcagacattaaaagacaaattgatttaaaggtgaagtatgcaacgagagcacttaataacgatgagttagaaaaagcagaaaaattagaacaagaaattactgatttacgttctcaaatccaagaaaaacaagaagaattagataagctaaaagaaaaagatrgaacttcagaaaacaatcaacaatcagtggaagtaaacgaagcamgtacttatcgaaaycaagcaaacattaatgatttaggtatttcgattcaaaacacaaaggtaacatcacaagaagttagagattttactgaatatcttgaaacacgcaatgatattcaaggtggttcgttaaaaacagactcaggatttgtagttattccagaggaaattgttacagatattttaaaattaaaagaggttgagtttaatcttgataagtatgtgacggtcaaacgtgttacaaatggttctggtaaatatccggtagtacgacaatcagaagttgcagcccttgaaaaagttgaagaattagaagaaaaccctgaattagcagttaaaccattcttccaattagcatatgacattaatacacaccgtggttacttccgaatttcacgtgaagcaatcgaagatgcaaaagtgaatgttttgcaagaattgaaactatggatggcgcgaactattgcagcaacacgaaacaaagcaattattgatgttatcactaaaggatcaacgggttctacaagttcaggttttgaaaaagaaggyaagaaattagaagttaaaaaagcaaaatctttagatgatattaaagatgctattaacctgaatgttaagccaaattacgaacataatgttgcgattgtttcgcaaactatgtttgcaaaattagacaaaatgaaagataagctaggaaactatttaatccagccagatgttaaagaaaaaacgcaacagcgtttattaggagctaaaatcgaaattttacctgatgaagtactagggcaaaaaggtaataacactttgattatcggtaacttaaaagatgcgattgttttatttgaccgctctcaataccaagcatcatggactgactacatgcatttcggagaatgtttaatgattgctgtacgtcaagactgtagaattctagattataaatcagcaattgtgattgaatatgatgatagtgaacgcggtgaaggcgatcttggcttagaagcataa

SEQ ID NO: 1130 - DNA, 93 bp, Staphylococcus aureus
ttgttcatgttgttaacaactcctataagattatatttaattgataataattatcaatatcaattattagtgttaattgtagcgcatcccaat

SEQ ID NO: 1131 - DNA, 597 bp, Staphylococcus aureus
gtggtgaggaaaatgagtaaggaaacgagagttggcaacattattgaggtacgctcaaatgataacaacgaaatggtcatagaggggtatgcgttaaagtttgacacttggtctgaaaatcttggtggattcaaagaaacgatttcacgtcgygctttagaaaacactgatttatctgatgtrcgttgtttagtagatcatatcccatcgcaaataattggtaggacaaaatcgggtactttggagctcgaaactgatgatgttggacttaaatatcgttgtaagttaccaaacacaacatttgcacgtgatttatatgagaacatgcgtgtaggcaacakmaatcaatgttcgtttggttttatgcttgacgataaaggcgatgaagtgcgttttgatgaacaagaaaacatttacaaacgtactttaacagcaattcgtgaacttacagatgtttctgtagtgacttatccggcttacaaagacactgatgttaaaccagcattacgtagtattgaaaccgttaaaaaagaacaacgtaaaaaagaattagaaataagactaaagaaacactctatattaaataatatttggtga

SEQ ID NO: 1132 - DNA, 1251 bp, Staphylococcus aureus
gtggggattttttataaaaatgaaaaacgagacttgcaatacaacgaagatgatttgcaaatgatggttcaaactttgccaggttttcaaggaacaaaattacgacaatataaagatatagaagcaattaggcatagcgacatctttackgcagttatgatgattgcttctgatttggcrcgcatgccaattagggtgacagtgaacggccaaattaattatagtgacaggattgttaatttgttaaatacacgtcctaacccaatgtataacggctatatattcaaattagtagtgtttgttagtgccttactaacatcgcacggctatattgaaattacacgtgataaaacaggagaacctatgaatttaacgttcagaaagacatccgaaatagaattgaaatcagacgcaagaggtcgactgtattattttcatcaaaggatagacagtaacggaaataatatagaacgtaatgttaagttygaggatatgctagacatcaaattttattcgttggayggtataaatggtttgtcactgttagacacattaagtcgcacgatagaatcagataacaatggaaaagatttccttaataatttcttgcgaaatggcacacatgctggtggtattttgaaaatgaaaggtgtattagataataaaaaagcaagagaccgtgccagagaagaattycacaaaagttttagtggaactaaacaagctgggaaagttgtcgtactcgatgaatcaatgacgtttgatcaattagaagttgatacagaagttttaaagcttatcagagaaaacaaatcatcaacaagagaaatagcaggtgtatttggtattccattgcataagttcggcatagaaacagcgaacatgagtatcacggatgctaatttagattacttatcaactttaaaaccttatattacatgcgtttgtgcagaattgaattttaagtttaatgatgaatatgtgaatcgtgaatttaaatttgataccactgaaatacgagttgttgatgaaaaaacacaagctgaaattgacaaaattaacattgattctggaaagatgaatatcgatgaaattagacaacgtgatggattagcgccaataccaggcggtaatggtagcattcacagagtcgatttaaaccatgtaaatattgaacttgtagatgagtatcagatgaataaatcgagagctactgataaaaaattgaaaggtggtgaggaaaatgagtaa

SEQ ID NO: 1133 - DNA, 1695 bp, Staphylococcus aureus
atgactgattatgttactaaatacgcaaaaaaggtagtttcaggagaaattttggcaagtttgaagaatattcaagtatgyaaacgtcacctatcttttatggagaacccgccgaatggttgccattgggataatcatttgtctaacaaagcaattaaatttgtggaaatgcttccagaccctaaaacaaaccagcccatgcctcttatggagtttcagaaattcattgttgggagcttatacggctggcgtagaggtcaatacagaatgtttactaaagcttatataagtatggctagaaarcaaggtaagtctctaatcgtatcgggaatgtccgttaacgaactgttgtttggacaataccctaaatttaatagacaaatttatgtagcttcatctacttataagcaagcgcaaacaatattcaagatggcaagccaacaagtaaacctaatgcgaagtaaaagcaagtttatccgtgaaaaaacagacgtaagaaagacagacattgaagatgtattaagtagttcagtgtttgcacctctttccaataacccagatgcggttgatggtaaagatcctacagttgctattttggacgaattggcaagtatgcctgatgatgagatgtactcaaggtttaaaacaggtatgacattacaaaaaaatcctttaaccctacttgtttcaacggccggagacaatttaaatagtcaaatgtaccaagagtataagtatattaaacgtattttaaatgaagaagtaagagctgataattactttgtatattgtgctgaaatggattcacaagaagaagttcaagatgaaacaaagtggattaaagcaatgccgcttttagaatcaaaagaacatagaaaaactatacttcaaaatgtaaaagctgatatacaagacgaattagaaaaagggacatcrtatcataagattttgattaaaaacttcaatttatggcaagcgcaaagagaagatagcttgctagatatttcagattgggaacaagtaataacgcctatgcctaatatcaatggtaaagatgtgtatataggtgtcgacttatcgagattggatgacttaacatctgtagggtttattttccctaacgacgataaaaaagtgtttttacatagtcattctttcattggattaagaacaaacttagaacaaaaatctaagagagacaaaataaattatgaattagcgattgaacgtggmgaagctgagactacacaatcagatagcggcatgattgattmtaaacaagttatcgattttatagtgaaatttataacgacgcatgacctgaatgtacaggctgtttgctatgacccttggaatgcgcaaagttttataacaacaatcgaatcaatggctttagattggccactcattgaagtgggacaaagttttaaggcgttatcacaatctattaaagaatttagaatgtgggttgcagatgaaagaatacagcataacgataatatgttacttacaacatcagttaataatgccgttttgattcgtgacggagaagacaatgtgaaaataaataaaaaaatgaatcgtcaaaaaatagatccgattatttcgattatcacagctttcactgaagctagaatgcacgaattccaagaaaattggacggagaaatatgaaagcgaagaattcggrttttaa

SEQ ID NO: 1134 - DNA, 468 bp, Staphylococcus aureus
atggcgggtagacctaagaagcttttgtcaaattcgaacaagaattatacaaaagaagaaattattgaaaaagagcgtcaagaagctcaattaaataaattttctaaaatcgatactgaaccaccgcactttttagatgaaatagcgaaacaagaatacttaagaatattaccgcacatgcaagaattgccaatttccaacttagataaagcacaattagcacaatattgtagtttttatagtgactttgttaaagcaagtttgattttagagcgcgaagacttgattttagaagacgacaaaggaaatcaaaaggttaatccggcgttcaacataaaggaaaaagcgggtattcgattgcaacaaacagctaatactttaggattaactattgatagccgattgcgtattatggttcctgatgaaaaagaagatgatgatccatatatggaatttgtgagtgattag

SEQ ID NO: 1135 - DNA, 354 bp, Staphylococcus aureus
ttgtctattatgaagcgatgtggtcatccaacatgtaatgtattgattaatcataatgaaagttattgtgataaacacaagcaatatgcaaatgaaaattacaatgatttgagacgtcgaaacgatccagagtatttaagattttataaatcgaaaacgtggcaaaacatgcgtcgaattgtattgttagaacatgattttatttgtgtttcttgtggcaatcaagcgactatggttgaccatattgtaccaacaaaaattgattgggcaagaagattagacaaaagtaatttacagcctttgtgtgatgcttgccataaccaaaagacaaaagaagatttgaagaaatattaa

SEQ ID NO: 1136 - DNA, 489 bp, Staphylococcus aureus
gtgagggtttttatttttataaacaagaggtggagaatggagatatcaaagtaccaagagatagctacacgtacacacaatgatgaattgaatttaaatgaatmtattacttgttacggcttaggtttaactcaatctacaggcaatgttacagatctaattaaacagcatatgttttgtaatgtaccgatagataaaggaattatgataaatgaacttagcgaassattgtggaatatagctaatcttactaacgtgttaggtattaacttggatgagatagctggtcatagtgttaacactatcttgatgaataaacctaatcagactatcaatttagacaatggtataaaacraggagacaaagtattgtttcaaggtagtaartatcttgttgatggatcgataggaaacttattgttaattagcaatgataaagatgatagacaagtaactgtgcaagatgttaagaaagtcgacaaggagtga

SEQ ID NO: 1137 - DNA, 471 bp, Staphylococcus aureus
atgtataacaggaaagaaatacgtgaaatgatagataactacaagtggatgaaraayataatagacagtaaagtctacgataacgaaagtacatcaattgcacaatayggttatcaatctgcgatgccaaaagctaaaggcacgactagcaataaagtgttagtgaaagttataaacaaaaacaaagcgcttagaaagtacgattacttgattaakaagatagcgttcattgatgaataygaagaatacatcacgaatgaaaaagattatcatattttacaaatgttaaaacaacgagaaagccataataggatyatgagyattcttgatataggcagagacaatttttattctagagtaaaagatatagtaaatatactttataacttgcaacaagaaaccgacaswtcgkacacatcgkacagttcggacacatcgtacarwtcgkacamatcgtacaswtcggactaa

SEQ ID NO: 1138 - DNA, 204 bp, Staphylococcus aureus
rtgatgtggattactatgactattgtatttgctatattgctattagtttgtatcagtattaatagtgatcrtgcaagrgagatacaagcrctcagatatatraatgattatctacttgatgaagtagttaaaactaarggatacaacgggttaraagaatacaggattgaattraagcgaatraataacgatattaaaaagtaa

SEQ ID NO: 1139 - DNA, 1437 bp, Staphylococcus aureus
atgacmaaattaccgcraaatttyatgtggggtggcgctcttgccgcmaatcaatttgaaggtggatatgawaaaggkggtaaagggttaagtgtaattgatgttatgacgagtggtgcacatggyaaagcacgtcagattacarartctatagaychmaatcactattatccaaatcatgaaggtattgatttttatcatcgttataaggaagatattgccttgtttaawgaaatgggattgaaatgtttacgtacgtcgattgcktggacacgtatctttccgaatggggatgaagatgtgccaaaygaagaaggactygccttttatgatcgtatctttgatgaattaattgcacaagrtattgaacctgttgtgacgttatcacattttgagatrccacttcatttagcgaaacattatggtggatttagaaatagagaagttgtcrattattttgtgcattttgcgcgtgttgtatttgaaagatataaagataaagtkacatattggatgacgtttaatgaaatwaataatcagatggacacatcaaatcctatctttttatggacgaattctggggtagcattgacagaaaatgataatcctgaagaagtcttgtatcaagtagcacatcatgaacttttagccagtgctttagcrgttcgtcttggtaaagagattaatccgaartttaagattggaacaatgatttcacatgtacccatttatccatattcgtgtcatccgaaagatatgatggaagcacaaattgcgaatcgcttacgtttctttttcccggatgtycaagtragaggttattatccaagctatgctaaaaaaatgttggcacgaaaaggatatgatkttggatggcaagaaggggacgacagtattttacagcagggcacggttgattatattggctttagttattacatgtctacggctgtaaaacatgatgttgatactacagttgaaaacaacatcgtcaacggtggtttgaatcattctgtggagaatccgcatatcgcaacgagtgattggggttgggcgattgatccagatggcttaagatatacattgaatgtgttatatgatcgttatcagttrccactttttattgtggaaaatggttttggtgcagttgatgaagtggtagatggacatattcatgatgattatcgcattgaatatttaaaagcacatattacagcagcgatagaagcagttgatcaagatggtgtagatttaatcggttatacaccgtggggaatcattgatattgtttcatttacaacyggtgaaatgaagaaacgctatggtttaatatatgttgatcgagataatgatggtcrtggcacgatggaacgcttgaaaaaagattcgttctattggtatcaacaagtgatagcatcaaatggagataaattataa

SEQ ID NO: 1140 - DNA, 744 bp, Staphylococcus aureus
ttgttagaaacaaaagatttaaatctgtttttaggtaataagcatgtacttaaaaacatttccttatcgataccagtacgcggcgaaataattggtatcatgggcccgaatggtgctggtaaatcttcccttatcaagtctttaattggtgaatttaatgctaccggtactaaattgttayataacaaacctatacaacaacaactgcaacatattacatatattccacaaaaagcacatattgatttagattttcctataagtgtggaacaagtgattttatcaggttgctacaaagaaattggatggtttagacgacctaataaatcagcaagggataaactcaaacagttattaagcgatttagaattagaatctttacgtcatcgacaaatttcagaattaagtggtggacaattacaacgtgtgctagtagcragagcattgatgtccgaaagtgaagtttattttctagatgagccgtttgtcggaattgattttagtagygaaaaattaatcatgacaaaaatcgagaacttaaaacaacaaggaaaacttattcttatcatccaccatgatytatcaaaagcaaagcaatactttgatcgcattattctattaaatcaaacattacgatactttggtgatagtgaagaggctatgagtgtcactcgcttaaacgaaacatttatgagtagcactgactgtagtgaccctagtcaaaggagcaatataacatgttag

SEQ ID NO: 1141 - DNA, 171 bp, Staphylococcus aureus
atgaaaaaatttaatgttcaaatcacatatacaggcatgattgaagaggctatcgaggctgaaagtttagaagaagcagaatttgaggctcatgatattgcgagaatggaagtgccatttgattgtgatgaatttgaaattaatgtagaggtggaacaggaaaatgaataa

SEQ ID NO: 1142 - DNA, 303 bp, Staphylococcus aureus
atgtctcgttcaaaaaaatacttttacttatctagcttaatgattattttaagctttttctttaatacaaataacgttttcctaagtggrytttttaattcttttattaaattaatacttttctgcagtgttattaactcaattgtactaatwttgtctataatttttgcagatcgttcaattaaatcactaaagcctgatgcagattggattagaattgcgagtaaaagtttgccttggattattctaatygttattttagtacatatcttttcrattgttcryacattcggttttatttaa

SEQ ID NO: 1143 - DNA, 753 bp, Staphylococcus aureus
atgaattatttatcmaacttttttaatacgacaattcaacttaatatatacattatcgttattgttgcagcttgttatattgctattcatcaatatagacataagcctgttttgaactatttagatgtcattttaaactatatccctgttttaacacatgaatttggtcatgtactgtttaataaactcgctggtggccgtgcaaaagatttagtcattgtaacaagyccacgagagcgacaacagacattacaacaaggattcgcaattacacaatctagacatctagcaggccaatggcttacaacgattggtggttatttwatgccacctattatgttattgatwggtytagcgtcgagccattatcagatacctagtttctttatatttacctatttattgatatttatttattttttaattttaacatctagaaaaggctcacccattgttgttataactttaatttctatcatgttgtattttatattaaaagatgaaaatatagtagaaattcaactacttgtcacaatgagttatcaatatattttaggtgtattattaggcgaagttctacaatctagttggacgattgctaaattgactttccagcgtccgagtccacagtgggatggtagtgcacttaaagaactcagtcatgtacctatcttcatttatagtacaatctggattatcttcaatctttatgcagtgaatattttactcaaatatactcacttgataaattaa

SEQ ID NO: 1144 - DNA, 780 bp, Staphylococcus aureus
atgaaaccactattcagygaaaagataaacgaaagyttgaaaaaatatcaacctactcatgtcgaaaaaggattgaaatgtgagagatgtggaagtgaatacgacttatataagttygctcctactaaaaaacacccgratggttacgagtataaagacggttgcaaatgtgaaatctatgaggaatataagcgaaacaagcaacggaagataaacaacatattcaatcaatcaaacgttaatccgtctttaagagatgcaacagtmaamaactacaagccacaaaatgaaaaacaagtacacgctaaacaawcagcaatagagtaygtacarggyttctctacaaaagaaccaaaatcattaatattkcaaggttcatayggaactggtaaaagccacctagcatacgctatcgcaaaagcagtyaaagctaaagggcatacrgttgcttttatgcayataccaatgttgatggatcgtatcaaagcgacatacaayaaaaatgcagtagagactacagacgarytagtcarattrytwagygakattgatttacttgtactagatgatatgggtgtagaraacacagaacayactwtaaayaaacttttcagcattgttgataacagagtaggtaaaaacaacatctttacaactaactttagtgataaagaaytaaatcaaaatatgaactggcaacgtatmaattcragaatgaaamamarwgcaagaaaagtaagagtaatcggagacgatttcagggagcgagaygcrtggtaa

SEQ ID NO: 1145 - DNA, 861 bp, Staphylococcus aureus
atgttaacatataaggtttttccatattttattcacccccaatctaacgcagtagcgataacaaaattataccagaaaggagataacgaaatggcaacatttagagtttacaaagaatcaggyaactttgtcacagtacacaaagattttatacatgattctaatataagttggaaggctaaaggtattctactttatttgttaagtcgacctgataactggcaaatttacgaaacagaactagagcaacattcaactgatggacttagcggtttaaagagtggaatcaaggaactggaagaaattggatayattcaacgtagtagaaaacgtgataaaagtggtaggttaaatggttatgagtacttagtatatgagcaaccgcaccacattcgattttccaacgttggaaaaaccgttaacggtaaaaccaacaatggaaaaaccgttaatggtaaatcgcatactactaataataatagtactaataatgatttaactaataataacaatactaataatgaaggaagtatattgtcgggcaacccgacggtgtcttccattccctataaagaaattatcgaatacttaaataaaaaagcaggaaagcattttaaacataatacagctaaaacaaaagattttattaaagcaagatggaatcaagattttaggttggaggattttaaaaaggtgattgatatcaaaacagctgaatggttaaacacggatagcgataaataccttagaccagaaacactttttggcartaaatttgaggggtacctcaatcaaaaaatacaaccaactggcacggatcaattrgaacgyatgaagtacgacgaaagttattgggattag

SEQ ID NO: 1146 - DNA, 552 bp, Staphylococcus aureus
atgaaaatcacaggacaagcgcaatttactaaagaaacaaatcaagaaaagttttataacggctcarcagggtttcaagctggagaattcacagtgaaagttaaaaatattgaattcaatgatagagaaaatagatatttcacaatcgtatttgaaaatgatgaaggcaaacaatataaacataatcaatttgtaccgccgtataaatatgatttccaagaaaaacaattgattgaattagttactcgattaggtattaagttaaatcttcctagcttagattttgataccaatgatcttattggtaagttttgtcacttggtattgaaatggaaattcaatgaagatgaaggtaagtattttacggatttttcatttattaaaccttacaaaaagggcgatgatgttgttaacaaacctattccgaagacagataagcaaaaagctgaagaaaataacggggcacaacaacaaacatcaatgtctcaacaaagcaatccatttgaaagcagtggccaatttggatatgacgaccawgatttascgttytar

SEQ ID NO: 1147 - DNA, 190 bp, Staphylococcus aureus
ttgagacgagagaatatattattaaggttaataccttttaatgattatgataacaagaattttaaaatgtttattgtgatkaaaaatacaaaagtsattattttaaakaataaaatatttgtttttgaamaaagtattaaaaaacataacraaatgatgtatattgaactatgtgattgaaaaattttaa

SEQ ID NO: 1148 - DNA, 138 bp, Staphylococcus aureus
atgttacaaaaatttagaatcgcgaaagaaaaaaataaattaaaactcaaattactaaagcatgctagttactgtttagaaagaagtaacaaccctgaattgttgcgagcagttgcagagttgttaaagaaggttaac

SEQ ID NO: 1149 - DNA, 198 bp, Staphylococcus aureus
atgcaagctcaaaacaaaaaagtcatytattactactatgacgaagmmkgtaatagacgacccgttaatattcaatacaacgatggctacgacttaatgatagaccmgcgttttattgaaatgacgcttgaaagacatccgcatttaaaaaataacttttatggattaatagatggaaaagaatttaagttagattaa

SEQ ID NO: 1150 - DNA, 756 bp, Staphylococcus aureus
atgcaagcattaaaaacaaaatcgaacatcggcgaaatgttcaacatacaagaaaaagaaaatggagaaatcgcaatcagcggtcgagaactgcatcaagcattagaagtttcaactaggtacgataagtggttcgaaagaatgacggaatatggttttgaaaacgggatagattttatttcgcaagttgaaaaagtacacggtcaaaaaagggcgcgtacttatgaacaagttaatcatattctcactctcgacactgcaaaagagattgcaatgattcaacgtagtgaacctggcaaacgtgcaagacaatacttcatccaagtagagaaagcatggaatagcccagaaatgattatgcaacgtgctttaaaaattgctaacaacacaatcaatcaattagaaacaaagattgaacgtgataaaccaaaaattgtatttgcagatgcagtagctactactaagacatcaattttagttggagagttagcaaagatcattaaacaaaacggtataaacatcgggcaacgcagattgtttgagtggttacgtcaaaacggattccttattaaacgcaagggtgtggattataacatgcctacacagtattcaatggaacgtgagttattcgaaattaaagaaacatcaatcacacattcggacggtcayacatcaattagtaagacgccaaaagtaacaggcaaaggacaacaatactttgttaataagtttttaggagaaaaacaaacatcttaa

SEQ ID NO: 1151 - DNA, 750 bp, Staphylococcus aureus
atgcaagcattamaaacrmaatcgaacatcggcgaaatgttcaacatacaagaaaaagaaaayggagaaatcgcaataagtgcaagagagttatataaagctttggaagttaaaaagcgttttagcgcttgggcagaaattaacttgaagcatttcaaagaaaayagggattttacaagtgtacttacaagtacggttgttaataacggagctgtaagacaactagaagattatgctttaacacttgatgtagctaaacatgttgcgatgatgtcaggtacagaaaaaggttttgattttagagagtatttcatccaagtagagaaagcatggaayagyccagaaatgattatgyaacgtgctttaaaaattgctaacaacacaatcaatyarttagaaacaaagattgaacgtgataaaccaaaaattgtatttgcagatgcagtagctactactaagacatcaattttagttggagagttagcaaagatcattaaacaaaacggtataaacatcgggcaacgcagattgtttgagtggttacgtcaaaacggattccttattaaacgcaagggtgtggattataacatgcctacacagtattcaatggaacgtgagttattcgaaattaaagaaacatcaatcacacattcggacggtcacacatcaattagtaagacgccaaaagtaacaggcaaaggacaacaatactttgttaataagtttttaggagaaaaacaaacatcttaa

SEQ ID NO: 1152 - DNA, 753 bp, Staphylococcus aureus
atgcaagcattacaaacaaaatcgaacataggcgaaatgttcaacatacaagaaaaagaaaatggagaaatcgcaatcagcggtcgagaacttcatcaagcattagaggttaagactccatacaaaaaatggtttgaaagaatgagtgattacggatttgaagaaaatatcgattatatagtcacggacatttttgtccataacccactaggaggtcgtcagaatcaaactgaccacgcactcacactagacactgcaaaagagattgcaatgattcaacgtagtgaacctggcaaacgtgcaagacaatacttcatccaagttgaaaaagcatggaatagcccagaaatgattatgcaacgtgctttaaaaattgctaacaacacaatcaatcaattagaaacaaagattgaacgtgataaaccaaaaattgtatttgcagatgcagtagctactactaagacatcaattttagttggagagttagcaaagatcattaaacaaaacggtataaacatcgggcaacgcagattgtttgagtggttacgtcaaaacggattccttattaaacgcaagggtgtggattataacatgcctacacagtattcaatggaacgtgagttattcgaaattaaagaaacatcaatcacacattcggacggtcacacatcaattagtaagacgccaaaagtaacaggcaaaggacaacaatactttgttaataagtttttaggagaaaaacaaacatcttaa

SEQ ID NO: 1153 - DNA, 261 bp, Staphylococcus aureus
atggaacaaatcacgttaaccraagaagagtgtgtcgaacaatgcatcaataaagacttaaaacttttagattatcgagttcaacaaattttagaaggtgttctatcagaaagtaccacatacggtgatgcaagaaataaattagaaacattgaaaattattgctgaatctcattttaaaaccgaacatgcttcagttatttacaaattagcattgaaaaagttagacgaaaaaatcaacgccactccaattaaagagtga

SEQ ID NO: 1154 - DNA, 615 bp, Staphylococcus aureus
atgactcaatttctaggggcgcttcttcttacaggagttttaggttacataccatataaatatctaacaatgataggtttagttagtgaaaaaaacaagrttatcaatactcctgtattattgattttttctattgaaacatgtttgatatggttttatasttttataatttttaataatgttgatttaaaaaatttgartttamttcagttgcttacaggtctaaaagcaaatatttkgtttctawttatttttgttttaacagtgyttgtatttaatcctttaattgttaaattyattatctggttaattaatrwaacmagaaagtttatgaawttggattgtataagcttattagacaaaagagacaagttgtttaataacaacggtaaaccagtatttatagttatwaaagactttgaaaacagaatcattgaagagggtgaacttaaaacctataattcagctggtagcgatttcgatttactagrrgttgagcgacaagatttcaaagtatcygatttaccgtcaaacgatgaattgtatattaaacatacrcttgtagaccttaaacaacaaattaaattggatttatatttaatgaatgaataytaa

SEQ ID NO: 1155 - DNA, 393 bp, Staphylococcus aureus
atgcaattcaaattaaaagaagaagagattattagttttttagaattgaaatatccagaaaaagagttcgaatatggtcgtttgttagttggacaacataaacgygatgatttagatgtttattactttggygatacgtttttaatgtgcacgattatttcattcaagacatttgaaattaaagaaacagtagaattatcatatgatgctgttaatcgtattgtgttaaaagatggatggttatttagaaaaatgagaatagaaacaatgcaaaaagtgttaaaatacggtacatctaaattaatgttaactgattttcaaaargasaattataataaatatattcaaggtcagaaacaacgcgtgatatttgaaaatggccattttgtctaa

SEQ ID NO: 1156 - DNA, 1296 bp, Staphylococcus aureus
atgaaaaatttaatatctattatcatcattttatgtttaacattaagtattatgacaccatatgcacaagctrctaacagtgacgtaacccctgtacaagcagcaaatcaatatggttatgcaggtttgtcrgctgcatacgaaccgacgagtgctgttaatgtwagtcaaactggacaattactgtatcaatacaatatcgatactaagtggaatccagcgtctatgacyaaattaatgacaatgtacttaacattggaagctgtaaataaggggcagctttcacttgatgacacwgtcacaatgacgaacaaagaatatattatgtctacactacctgagttgagtaatacgaaactatatcctggacaagtatggacaatcgcagacctattacaaattacagtatctaattctagtaatgccgcggcattaattttagctaagaaggtwtcaaaaaacaccagcgatttcgttgatttaatgaataacaaagctaaagctatcggaatgaaaaatacacatttcgtcaatccaacgggtgctgaaaattcaagattacgtwcatttgcaccaacaaartataaagaccaagaasstactgtaassactgctagagactaygccattttagatttacacgtgattaaagagacacctaaaatattagactttacaaagcagttagcaccaacaacgcwwgcagttacgtattacacattcaacttttcattggaaggtgcaaaaatgagtttgcckggtacagatggtttaaaaactggatcaagtgatacagcaaattacaaccatacgattactacyaaacgaggtaaatttagaattaatcaagttatcatgggtgcrggagactataaaaaccttggtggcgagaagcaacgtaatatgatggggaatgcattaatggaacgytcatttgatcagtataaatatgtaaaaatattgyctaaaggtgagcaaaggataaatggtaagaaatattatgttgaaaaygatctttacgatgttttaccaagtgattttagtaaaaaagattataaacttgtagtcgaagatggtaaagtacacgcggactatccaagagaatttattaataaagattatrgacctccaactgtagaagttcatcagccaattatycaaaaggcaaatactgttgctaaaagtatgtgggaagaacatccattattcactatcattggtggtrcatgcctwgtcgctggattagcactwattgttcatatgataatcaatcgtttatttagaaaaagaaaataa

SEQ ID NO: 1157 - DNA, 3465 bp, Staphylococcus aureus
ttataagtaatactcagaattgcgtttagcatttctgccgttaacaatactagtaagcgcatcgttattaacatcgaattcaactttaacagttttcatgttcggtgatgtttcaatagaatgtgtgtgttgtacttgcgcatttatatttccacctaaattacttaagtttcctgtaatactagaaatgtcaggtgcgtttaatgtaggttgaaatgcatcaactactttatctgcaacattagaaacattacggataactttacttgaatgattatctatacctttaacgaaacctagcattgaatacataccaacatccatgaattcacgtgaaggtgagtgaatacccaaagcacttttagctgcatctaaagctttcttagcaacatttttagctgcatctactaattgaccagccatttgtccaatacctctaattaaaccacggatcatatcagcacctgcagacacaaaatctcctataaagctttttattttatttactgcatttgtcataccttgactaactttgtttacaacattaacgaatccttgaataactctattaacaaagttaattagcgtacttgttatagtagatacccattgcatacctttagtgacaatgaagttccaagcttgagacattttgtctgatatagttgaaacaacttgtgtgaatatgcttacaactttattccaaattgtcgttaatataccagataagaaactccaaatcgtattccatatattagaaataaaactccatgccgcttgtaacgcagtagatatagctgtagtgatagcgttccaaaccttagttgccacagtaactatagtgttccacaacgtttgtaagaacgtccaaatagcgttccaaattgtcattgcgatagtcataattgtggtaaacactgtagttattacagtgactaacaaattccaaatcgtagtagcgattgtaattatcgtgttccagattgtacttaagaatgtccaaatagctgtccatatcgtcataactattgtcattatcgtcgtgaaaacagttgtgatgattgtaactaaaaggttccacaccgttgttgcaatagcgataattccattccataacccttgtaaataagcgactatttgattccaaacaatcattataaaattgtatacattagttactgctgtagtgatagcttttaaaatagcattccatacaaccgatgctacagttttcaacacattccaaactgtaaccataaacgtttttatcgcattccaagcatttataataaagtttctgaatccttcatttttattccaaaataaaacgaatatagctattaatgcagcgattacaccaataactattgttattggaccacctaaaataccaaacacagttactagtcctgtgatagcatttctaattaatccaatcttaccgaataacaattggaatatagctgtaactaattttattggaccttttaatgatgtcattgccttacttaatactaaagttcctgttttagcccaaccaaacttagttactaatgcgactaatcttgctgctaatggccccagaaaatccattaccgctaatattggagcaattaaaaatctaaatgcaccaactaaagttataatgacgccaactaattgtgctgtagctggatgcgcctcaaacaagttagctatccaaccagttattgctactgcaacgcgtaatactgcactagctataggagccatcgctgttgcgaatgcaactaatcctcttgcaatgttcccgattaattgcattattagtggtccattagtttgtatatagctgacaaaatctttaaacccttgagattgtcctacttgttcagaccattccctaaacttagctgtcatttgttcaagagattggaatatgccagttgatgatccrctgaatgcattcatcaaattgttaattccaacgaaaacatttttgaaaatattaccaatgataggtaagtttgtttttgtgtattcaataaaacgagttatcgaattttctccagctgcactattagcccagttagagaaagattgacctaatctatccaaccaatcagccgaccattgaaacagtggcgctaattgtgtgaatacattgactaatccgtcaccgaaaccgcctgcagcacttaatagcttgttaaataccgaaacaccagttgtattcatcatgttgaagaaccttgatgctacaccgctattttgagcccatttaagtacactttgagacgcctcttccattcctcttgaaataccactaaaaaacggttgtaagctctgcattgctgttttaacagtatttaaaccatttgcaagagttgtgaagatagcggattgattttgctttataatatcagtccatgctgactttacgccatctaaagcttttttgtattcgtttgttgctgagctagcttgtaaagtgccatcattaagcatctttatagcgctgatagccattgcgccaaatgctacaaagccagcgccggctattgctaccgcaccacctaaagcaagtacaccaccagttaacactttgatagcgtttaatagtgcaaacactacaggtactacgctcgctattacaggtattaaaatgctaaaagatgaagttagtaatccaccaaccatattagaacctacagtaccgaacacacggaacatattagctaaattccccatctgtctttggaaattgtcgtttgcttttattatgtaggcataagctttctttaaaccattagtatcgacatctacctttgttgtttttttgtttggcaatgcgtctaatgattttttaaacgcataaatagttggtatagaaagccttgtatctacatcaagtcgagatctagttttatttggaatacttttaagctcttctttagtacgtttgattttagaattagcaacactgttgtctacatctaaaatagctttggctttagacctatttaaagcttcaagactagctttagatacttttaacactcgattgaatttactgttatcagcattgacgtcaatattgacacgtttcttttctagttctgataacttagcttctgcttcagcgatatctttagttaacttttgtttttgtaacttaacttctggtgtaacttcttttgaatctaattgatttaattcaaaacttgcttctaaagctttttgttgtagatcttctattttagcatctaatttagcttttacttttttgttactaaatgcatctaaagactttttagcaaccttgatagttttttgtaattttttatcgttagcgtttaattcaacatctttagtttgatctgctactcttttgaatttttgtacagatttaaccgcactatcaatttgctttttgaatttagctacacttgcttcaatagtcgctttaattttatattccgtcac

SEQ ID NO: 1158 - DNA, 216 bp, Staphylococcus aureus
atgaacattcaagaagcaacgaagctagcgatggagaaaggaataagtataaggagagagaatcaagatgtgtatgggatattaccaactaatttgcagcgttatcaatgcctagtcgtatctagacactataagaaaaaaagacaaaccgccgccggaaggtggcagcctagcgcagacgatttaatagcagatgattggattttagattattaa

SEQ ID NO: 1159 - DNA, 906 bp, Staphylococcus aureus
atggaagagaaacaatacttatggagatataacgatatagaaaaaagaatgaatgaacttcacaaaaaatataaagaattagtggatatattttttggtgatgtaatagataaaaatactggatacttccccttttattccggtataaaatatagctacgcagatttgaatatcagtttttacagaggtttaatttatattcacggtgggtcagaaggcatgcaagcgaagaaaataaatatttctgtagatgatgttttaaaaagaacagaaagatctttcgagaagttaagtgaatatataaaaagtactttcattttcgaaaaagtcatacatgattttcaaatgtttaacttgagcgatttagctagtatatacaacgacgatgcaattgcgcattattattttgaaactcattctgacttatatttatcagataaatctacaaaaatttatcgaacacctaattctttgttagaaaacgcaaatgatttaccggcttctttaagaaaatacactcaattattagaaacagttaatgacaaggattttgaaactcatatagttgaagcttatgattgctttatgtctgaaaaaaggctagctacatcactacttttaggtagagcgctagaactaatgtgtaggctgatattgaacaagtttgataaagatataattaaacaaacacctgattacaagaggaatataagaacatttttaaacgaaatggaaaacaacgatttaatagaagaacatttaaaacattcagtcaaagctgctattgaacacagaaactctattatgcatggtattaaaatcgaagagtacaattcgataattcaaacattatttgacgaaatagctaagctgtctaatgtatataagtctcttaataaacagtaa

SEQ ID NO: 1160 - DNA, 1047 bp, Staphylococcus aureus
atgccagtatataaggatgataatacaggtaaatggtatttttccattagatataaagatgtatacggtaataacaaacgaaaaatgaagcgtgggtttgaacgtaagaaagatgccaaactagctgaaagcgaatttatacaaaatgttaaatatggatactcggacaatcaaccctttgaatatatattttttgatcgtttaaaaaatgaaaatctttctgcacgctcaatagaaaagcgaactacagaatataatactcacataaaagaaaggttcggaaatatccctattggcaaaatcactactacgcaatgtactgctttcaggaattatttgttaaacgatgcaggtctttctgttgactatgcacgatctgtgtgggcaggttttaaagcagttatcaattacgccaaaaagcattacaagctcttatacgaccccacattatcggtaactcctattcccagaacaaaaccacaagctaaatttatcactcgtgaagaatttgatgaaaaagtagaacaaatcacaaatgatacttctcgtcagctaactagactgttattttattctggtcttagaataggagaagctttagctttgcagtggaaagattacgataaaataaaaggcgaaattgacgtaaataagaaaatcaatttaagtaatagaaaaattgaatataatctaaaaaaagaaagctctaaagggataatacctgtaccaaatttaattagagagatgcttaaaaacatgtataatgaatcttctaaaagatataaatattttgacgaaaactattttatattcgggggtttagaacctattagatacgttacttattcgtatcattttaaatctgtattcccgaatctaaaaatacaccatttaagacactcgtacgctagctatttaattaataatggtgtagatatgtatttattaatggaattaatgaggcattctaacattacagaaacaattcaaacgtactctcatttatatactgataaaaaacatcaagctatgagcatatttgattaa

SEQ ID NO: 1161 - DNA, 507 bp, Staphylococcus aureus
atggcccatattatacgtagagttagtatcaaagatgtagaaaatttcatttcaatgttagcgaamatatacgacgaatctccgtatatgttctacacaccaggagaatatgatcctagcgtcacrtcggctagtaaacaattagaagaatatatcacttctccrcataaagtcatcttygttgctgaaagtgatgaacaactygtwggctttgcctttgttaatacgacaccatttcaacgcattaaacatgttgctaaaattgatttaggtgtaaagaaattatatcaacatcgtggaattggccaagcacttcttgatgccattatggcttggtgtttaaacaatcaaatacaccgaattgaagcaaatgtaccactcaataaccaacctgccctmgagctttttaaaagtgccgattttcaaatcgaaggcgttttaaaagataagttattyatcgatggtaaatattaygatgactatatgatggctaaaattcttaattaa

SEQ ID NO: 1162 - DNA, 114 bp, Staphylococcus aureus
ttgattttgacaaaatacattataataataaatgaagttaatatgattaaggacgcgctatcaaacattttaaatagaaataacgataatgtcgaaattactatgatgaaaaaa

SEQ ID NO: 1163 - DNA, 993 bp, Staphylococcus aureus
atgtgcacaggattcacaatacaaactttaaataatcaagtacttcttggacgcacgatggattatgattatccattagatggttcgccagcagtgacgcctagaaattatcgttggamatctygcactggcacgacaggccaaacscaatatggctttattggyacaggaacagatatggaaggttttatttatggtgatggtgttaatgaacatggcgttgcyatttcracacaatatttccgaggttatagttcatatggmtcaacacacaaagcggrcgcgatgaatattacgcaaaatgaaattgtgacatggattttggkatatacaacaagcattgaagatatgaaacaacaagcatcccaaatacatgttgtagckgtatatttaaatgayatcggtgaagttccgccattgcattatcatgtttccgatgyaactggacatwcagycgaagtttcatttaaagagggkgaagtggttataaaagataaycctattggtgtcttaacaaatcatccagacttarattggcattatagtaatttaagacaatatatcaatatttctccttatccagcaacagcaaakttattggaaggtgtawcgattgaacctttaggcaatgaagcaggtacatttggattgccaggtggatttacttcaactgagcgctttgtgagaatgrcatttatgaaagcaaacattgctcaaaacaatgataaagaaatggatttaatgaatgcattttatttattagatgcggtaaatataccgattggaattgtacgtccgcatgatgctgacaatcactatacgatgtatcagaccgtaataaatttaactacaagaacgttatatattaagtattatggcagcaatgaawtagtagcattaaagctcacagatgatytaattaatagaaaagatatgaygatttttaagcctgagaagcatatcactattagaaagttgaatgacaatcaatag

SEQ ID NO: 1164 - DNA, 798 bp, Staphylococcus aureus
ttgaaaaaattagcatttgcaataacagcaacatctggtgcagctgcatttttaacgcatcatgatgcrcaagcttctacacaacatacagtacaatctggtgaatcattatggagtattgctcaaaaatacaacacttcagtagagagtattaaacaaaataaccaattagataacaacttggtattccctggtcaagttatctcagtaggtggaagtgatgcacaaaatwcgtcaaacacttctccacaagctggttcagcatcatctcatactgtacaagctggtgaatcattaaatatcatygctarcagatatggtgtttcagttgatcaattaatggcagccaataacttacgtggttatttaattatgcctaaccaaacattacaaattcctaatggtggatcaggtggtacaacaccaacagctacaacaggtagcaatggcaatgcatcatcttttaatcaccaaaatttatacactgctggtcaatgtacatggtacgtatttgaccgtcgtgctcaagctggtagtccaattagcacatattggtcagacgctaagtattgggctggtaacgcagctaatgatggttaccaagtaaacaacacaccatcagttggttcaatyatgcaaagcacacctggyccatatggtcatgttgcttatgttgaacgtgtcaatggtgatggtagtatcttgatttctgaaatgaattacacatatggtccatacaatatgaactaccgtacaattccagcttcagaagtttctagctatgcattcatccattaa

SEQ ID NO: 1165 - DNA, 183 bp, Staphylococcus aureus
gtgttaagcaataaacgcgttgaaaaagaagcgggttgtgaacacaaaaagtttttaaaaaagttattgactttaaattccaaagttgataatatgataaagtcgtcaaaaacgacgcagttgtttttaaagaagaatttcaaaagtgtaaaacttaccattgaaataactataaaaacaata

SEQ ID NO: 1166 - DNA, 189 bp, Staphylococcus aureus
atgaacatttcaaatgaaaatacagtcacattaattgcagtaattatcgcaattatcattggtattttcctacaaatatttttyaaattaccattaatagtgacggcagtactatctattttattgggtatctttgtaggctttatcgtttacytgattgtttcgttttataataarcgaaaaaattag

SEQ ID NO: 1167 - DNA, 180 bp, Staphylococcus aureus
gtgaaatttaaaacaactaaagaatgtaaaagtaataatatctttaaaagaagtcaagaaattaataatagwgaaagtgaaaagggttgtttatggggcattagcatgttgattctacttttcttattgattctgtttggaataactgcttgttcatcaagcattcactttattaattag

SEQ ID NO: 1168 - DNA, 951 bp, Staphylococcus aureus
atgaaaaaattaacagcagcagcgattgcaacgatgggcttcgctacatttacaatggcgcatcaagcagatkcagcagaaacgacaaacacccaacaagcacatacacwaatgtcaacacaatcacaagacgtatcttatggtacttattatacaattgattctaatggggattatcatcacacacctgatggtaactggaatcaagcaatgtttgataataaagaatatagctatacattcgtagatgcwcaaggacatamgcattatttttataactgttatccaaaaaatgcaaatgccaatggaagcggycaaacatatgtgaatcmagcaayagcaggagataacaatgactacacagcgagtcaaagccaacagcatattaatcaatatggttatcaatcaaatgtaggtccagacgcgagctattattcacatagtaacaacaaccaagcgtataacagycatratggtaatggaaaggtcaattaycctaatggcacatckaatcaaaatggyggatyagcaagtaaagcgacasstagtggtcatgcgaaagacgcaagctggttaacaagtcgtaaacaactacaaccatatggacaatatcacggtggtggtgcgcattacggtgtcgactatgcaatgcctgaaaattcaccagtttactcattaactgatggyacagtagtacaagcaggttggagtaactatggtggcggyaatcaagtaackattaaagaagcgaacagtaataactaccaatggtatatgcataataatcgtttaactgtttcagctggtgataaagtcaaagctggtgaccaaattgcatattcaggtagtacrggtaattcaacagcrcctcacgtacacttccaacgtatgtctggtggcatcggtaatcaatatgcagtagacccaacgtcatacttrcaaagtagataa

SEQ ID NO: 1169 - DNA, 450 bp, Staphylococcus aureus
atgaaaaagaaattagcaacaacagttttagcattaagttttttaacggcaggaatcagtacacaccatcattcagcgaaagcttttacttttgaaccgtttcctacaaatgaagaaatagaatcaaataagaaawtgttagagaaagaaaaagcttataaagaatcatttaaaaatagtggtcttcctacaacrctaggaaaattagatgaacgtttgagaaattatttaragaaaggcacaaaaaatwctgctcaatttgaaaaaatggttattttaactgaaaataaaggttactatacagtatatctgaatacaccacttgctgaagatagaaaaaatgttgagttactaggtaaaatgtataaaacatacttctttaaaaaaggagagtctaaatcatcttatgtaattaatggtcctggwaaaactaatgaatatgcatactaa

SEQ ID NO: 1170 - DNA, 636 bp, Staphylococcus aureus
ttggtgtatattgatcctttaaaaaatgttcgtttttctattaataacgtaattagtaatgttgaaatttctaaaagtatggcaattaaacaatctttaaaacctaagtaccaattagatataattaatagaaacaacataaatttattttctgacttcaaagtagactttcatctaaacaacttaattgaaatgaattttaatttgcgtaattctttttcatctctaacatttcaaagaaatttattttctgaagaaacgataaaatcttttaaggaactctataggtttgatgatgagattgtacttcaagcacaacagaccattagagatttttatatcaatccaactgctatctctactttggctgaagccatcaattcgacctatccaataaatgagcaaagtacctacaagagacacgatgaatttgtcaaacgtatcgaaaatgattttccacatcctttcaaaaagttaataagatggtctaatggcattgcagcaggtgctgacattcaaatctttgtaacaaactatataaacgagaacgatttacatattcaaaattcattgatagttgctatagtttgtttattaagttttttatcgacctattgttcacattctaaaaagtaa

SEQ ID NO: 1171 - DNA, 540 bp, Staphylococcus aureus
atggacataatcgcgatttgtatcgcaatttttagtttcttactgactgcacttaaatattatttagactatatgaaagattctmttaacatcgatgttatacctaccagaagctttaattacttggtcgatgacaaatcaagttacaacgatataacatttattaatttcacaaagtttcccatttctgttattgacgttgaatttgatattaaaaataaagtaaatgaacaaaaaacgttcaaacctatacgatataaagataaaaactactccattccatttactttaggaccttatgaaagtgtwgaatgtacttttttgctcgaagaatatccagtgatatgggaatgggatgtgactatcaaagtcactaccaacaaaggmatctatataaagcctgttatcatagaatcgcggacagaacaccgagaatcagagccacaagtgacagagttaacatcagcaaataaggtaagtgctctttccaaccccaaggatggttttttaaagaagtttttatatcatttaaaaccttaa

SEQ ID NO: 1172 - DNA, 144 bp, Staphylococcus aureus
ttgaatggtggtgagaattttatggcggataaaaacaaaaaacaagaagctacycgtagtaacccaataaacaaaagttttgaaaagccgggtgccagcgaaaacttaaaaagcactttatcagaaaaagctaagaaaaaagat

SEQ ID NO: 1173 - DNA, 1038 bp, Staphylococcus aureus
atgaaaacacgttgttacgatggtaaaaaatggcaatatgartttaagcatgaaggaaaaagataccgtaagaaaggttttagaacaaagcgtgaagctaattctgctggactagacaagttaaatgagttaagaagtggttttaatatagataactatataactcttgmagaatacttcgaaaattggattaaaacrtataaacaacctgttgttaaagaaaatacctaccgtcattatagaaatgcattacaacatatacaaaaacataaaataggtaaaatggagttatcaaagataaatagacaagtttatcagaaattcataaacgacyattcaaaagaacacgcaaaagaaactataagaaaaacaaacggtgctattcggtcagctttagatgacgcattatatgatggayttatttttaaaaaccccgcttataaagttaattataaagccggaaaacctacgaagtcagaacaagaaaaattcatctcggtaactgaatatgaaatactaaaagatcacgtcagaaagaagagaactcgttcatcattagcgytattcataatgatttgtacgggttgtcgtgtcagtggtgcaagaaatataaagaytgagcatatcaaccaagtgaaaaacactatatttattgacgagcgaaaaaccratacttcccctagatatatcagtatcgctaaatctgatatgaaacacattatggacgtcataagtacatttgcaattagctatgatggttacattttcaaagaagscggatctataattaaccttcakgctatcaataatgctttgaaatcagcctgtagagtcaataatataccaattattacatcgcacgcattaagacacactcattgttcttatttactagcaaaaggtgtatctatacattacatttctaaaagattaggtcataaaaatatagcaataactacatcygtgtattctcatttgttagaagaaaaatttaatgaagaggacaaaaaaacaactaaaatkttagaaagtatgtaa

SEQ ID NO: 1174 - DNA, 1827 bp, Staphylococcus aureus
atgaagtggctaaaacaactacaatcccttcatactaaayttgtaattgtttatgtattactgattatcattggtatgcaaattatcgggytrtattttacaaataaycttgaaaaagagctgcttgataattttaagaagaatattacgcagtacgckaarcaattagaaattagtattgaaaaagtatatgacgaaaagggctccgtaaatgcacaaaaagatattcaaaatttattaagtgagtatgccaaccgtcaagaaattggagaaattcgttttatagataaagaccaaattattattgcgacgacgaagcagtctaaccgtagtctaatcaatcaaaaagcgaatgatagttctgtccaaaaagcactatcactaggacaatcaaacgatcatttaattttaaaagattatggcggtggtaaggaccgtgtctgggtatataatatcccmgttaaagtcgataaaaaggtaattggtaatatttatatcgaatcaaaaattaatgacgtttataaccaattaaataatataaatcaaatattcattgttggtacagctatttcattattaatcacagtcatcctaggattctttatagcgcgaacgattaccaaaccaatcaccgatatgcgtaaccagacggtygaaatgtccagaggtaactatacgcaacgtgtgaagatttatggtaatgatgaaattggcgaattagctttagcatttaataacttgtctaaacgtgtacaagaagcgcaggctaatactgaaagtgagaaacgtagactggactcagttatcacccatatgagtgatggtattattgcaacagaccgycgtggacgtattcgtatygtcaatgatatggcactyaagatgcttggtatggcgaaagaagacatcatyggatattacatgttaagtgtattaagtcttgaagatgaatttaaactkgaagaaattcaagagaataatgatagtttyttattagatttaaatgaagaagaaggtctaatcgcacgtgttaactttagtacgattgtgcaggaaacaggatttgtaackggttatatcgctgtgttacatgacgtdactgaacaacaacaagttgaacgtgagcgtcgtgaatttgttgccaatgtatcacatgagttacgtacacctttaacttctatgaatagttacattgaagcacttgaagaaggtgcatggaaagatgaggaacttgcgccacaatttttatctgttacccgtgaagaaacagaacgaatgattcgactggtcaatgacttgctacagttatctaaaatggataatgagtctgatcaaatcaayaaagaaattatcgactttaacatgttcattaataaaattattaatcgacatgaaatgtctrcgaaagayacaacatttattcgagatattccgaaaaagacgattttcacagaatttgatcctgataaaatgacgcaagtattygataatgtcattacaaatgcgatgaaatattctagaggcgataaacgtgtcgagttccacgtgaaacaaaatccactttataatcgaatgacgattcgtattaaagataatggcatyggtattcctatcaataaagtcgataagatattcgaccgattctatcgtgtagataaggcrcgtacgcgtaaaatgggtggtactggattaggactagccatttcgaaagagatygtggaagckcacaatggtcgtatttgggcaaacagtgtagaaggtcaaggyacatctatctttatcacacttccatgtgaagtcattgaagacggtgattgggatgaataa

SEQ ID NO: 1175 - DNA, 651 bp, Staphylococcus aureus
atggaattgaaagtcgatgattttgtaaagaatataaaaagaccatacttgactgtattgggagtatttgtagttgcagtttcattattttttgacgcgattatgtttttctacgctaaactatatgataaattgcctatgtatttactggtgtttatggcctttacagctgtaattttgattatgatgtacatacaagagaaaaatgaaaattacaaagttgaaaaaagatatgtggttagatatctcacacttaacgttattgtgggatatactttgccattgctttttgtatctatttacgtttttggtgtagtcggttttggatttgatgttttcaattattgtctaggtattatcttgatgttatttatttcttggttaggtttatttttattttataaaaacgaatttgatagtgaaaatcctaatcctgcagttaatgccatagcaattattataaaattatttgcttttggaggaatattttatataagtctaatagttcctgtaacacagcaagaagagatttttatagggttaagtatattcatcaatataattgttgatgctcttcttgttaggtcatattttaattacgcgttatataagagtattaagaaagatatcgaaaatgaaggtaagacaatg

SEQ ID NO: 1176 - DNA, 690 bp, Staphylococcus aureus
atgaaaagtactgcgcaattaacaaaagaaaataatgttaaatcattaagattaagcaatactgatagagaaatcttcgagaattatatgacttatatgcgctctgactttcgcgtcaaycctcatgatacagagttaattattaaccgtatactyaaacaattattaagcgcagaacaacatggtttattagccttagattttttcaatcacgacccaaaagcacatgcaataaaagaactaaaagcgatgcctaatgaaacatttaaaaatatttttaaatatatmtatcarcacatcgttctattaattggkattgttagttttctcaaaggatttttaggatttttcatggaaaaaartggaagtaatttatattttgtttcattcccgttttcagtagtcgttggattctttattgtctttttatttatatggtttagttttaaaacaatwcaactgcagtgttttaacaattcaaattggatatggatattcacctatttagcaatcattctactaattgtaggatttttctatgtattctttattccacaatcattacttgcctttggaccatatattcaggtaagcaattgggtatttattatattttcatttatagttatgcctattggattacgcattgaaagaaatatttcgaaaaaacattctcatacatttttataa

SEQ ID NO: 1177 - DNA, 567 bp, Staphylococcus aureus
atgaarcgaatcgcagtttattgtggtgcaagcaaaggtcatgacccttcatatgtacaaaaagcatacgatttaggtaaatattttgctgaacaaggttatgaattagtatttggtgcagggtcaattggyattatgggtgccattcaagatggtgtattaratcatggyggcaaagctattggcgtcatgcctaaaatgttagatgaacatgaaatcacaagccaacgtttaactgaattaattttagttgattctatgcatgaacgtaaaaataaaatggcagaacttgcagatgcatttgtcatggctcctggtggcgcaggttcactagaagaatttttcgaaatgtatagttgggctcaaataggtatccatgaaaagcctattgccatttataatattaatggctttttcaatccactacaaacaatgattgaccatatgattgaggaaggttttattgatcctaagtatcgtgcwcttgcaccgttatgcgacactaaggaatcattaatwgaatcaatattaaatttcaaacctctrggtactcgttcatacgattaa

SEQ ID NO: 1178 - DNA, 105 bp, Staphylococcus aureus
ttgaaacatgattttgatggtgaatcattatttagagtrcaaagcttgatttatcgagacgctgattttgacattcagttagtctacaagcttatcaacttaaaa

SEQ ID NO: 1179 - DNA, 294 bp, Staphylococcus aureus
atggcaatgattaagatgagtccagaggaaatcagagcaaaatcgcaatcttacgggcaaggttcagaccaaatccgtcaaattttatctgatttaacacgtgcacaaggtgaaattgcagcgaactgggaaggtcaagctttcagccgtttcgaagagcaattccaacaacttagtcctaaagtagaaaaatttgcacaattattagaagaaattaaacaacaattgaatagcactgctgatgccgttcaagarcaagaccaacaactttctaataatttcggtttgcaataa

SEQ ID NO: 1180 - DNA, 459 bp, Staphylococcus aureus
gtgacacatattattattgatggagatgcttgtcctgttgttgattctattatagatttaacaactgagacaggcatttttgtgacaattattcggagcttcagccatttttcgaaccaattatatccyccacatgtatcaacattatatgttgatgatggaccagatgcagttgattacaaaattgttcaattatcaacgaargatgatatcgtartcactcaagattatggactcgcaagtttattagtcgacaaagtcttaattgtcatgcatcataatgggaagatatacaattccaaaaatattcaacaactattagataaacgatatatraatgcacaaattagaaaacaaggtggtcgccacaaaggtcccccaccttttacaaagcaagatcaaaaagtgtttgaamaatcactattaaragtcattcatcgaattaaggagctggattaa

SEQ ID NO: 1181 - DNA, 3030 bp, Staphylococcus aureus
atgaaaaagaaaaattggatttatgcattaattgtcactttaattattataattgccatagttagtatgatattttttgttcaaacaaaatatggagatcaatcagaaaaaggatcccraagtgtaagtaataaaaataataaaatacatatcgcaattgttaacgaggatcaaccaacgacatataayggtaaaaargttgagctgggtcaagcatttattaaaaggttagcaaatgagaaaaactataaatttgaaacagtaacamgaaacgttgctgagtctggtttgaaaaatggyggataccaagtcatgattgttatcccagaaaacttttcaaaattggcaatgcaattagacgctaaaacaccatcgaaaatatcrctacagtataaaacagctgtaggacaaaaagaagaagtagctaaaaacacagaaaaagttgtaagtaatgtacttaacgactttaacaaaaacttrgtcgaaatttatttaacaagyatcattgataatttacataatgcacaaaaaaatgttggcgctattatgacgcgtgaacatggtgtgaatagtaaattctcgaattacttattaaatccaattaacgacttcccggaattatttacagatacgcttgtaaattcratttctgcaaacaaagayattacaaaatggttccaaacatacaataaatcattaytgagtgcgaattcagatacrttcagrgtgaacacagattataatgtttcgactttaattgaaaaacaaaattcattatttgacgarcacaatacagcgatggataaaatgttacaagattataaatcgcaaaaagatagygtggaacttgataactatatcaatgcattaaaacagatggacagccaaattgatcaacaatcaagtatgcaagatacaggtaaagaagaatataaacaaactgttaaagaaaacttagataaattaagagaaatcattcaatcacaagagtcaccattttcaaaaggtatgattgaagactaycgtaagcaattaacagaatcrctscaagatgagcttgcaaayaacaaagacttacaagatgcgctaaatagcattaaaatgaacaatgctcaattcgctgaaaacttagaraaacaacttcatgatgatattgtcaaagaacctgatwcagatacaacatttatctataacatgtctaaacaagactttatagctgcaggtttaaatgaggrtgaagctaataaatacgaagcaattgtcaaagaagcaaaacgttataaaaaygaatataatttgaaaaaaccgttagcagaacacattaatttaacagattacgataaccaagttgcgcaagacacaagtagtttgattaatgatggtgtsaaagtgcaacgtactgaaacgattaaaagtaatgatattaatcaattaactgttgcaacagatcctcattttaaytttgaaggcgacattaaaattaatggtaaaaaatatgacattaaggatcaaagtgttcaactcgatacatctaacaaggaatataaagttgaagtcaatggcgttgctaaattgaaaaaggatgctgagaaagatttcttaaaagataaaacaatgcatttacaattgttatttggacaagcaaatcgtcaagatgaaccaaatgataagaaarcaacgagtgttgtggatgtaacattgaatcataaccttgatggtcgcttatcgaaagatgcattaagccagcaattgagtgcattatctaggtttgatgcrcattataaaatgtacacagatacaaaaggcagagaagataaaccattcgayaacaaacgtttaattgatatgatggttgaccaagttatcaatgacatggaaagtttcaaagacgataaagtagctgtgttacatcaaattgattcaatggaagaaaactcagacaaactgattgatgacattttaaataacaaaaagaatacaacaaaaaataaagaagatatttcyaagctgattgatcagttagaaaacgttaaaaagacttttgctgaagarccacaagaaccaaaaattgayaaaggcaaaaatgatgaattyaayacratgtcttcwaayttagataaagaaattagyagaatttctgaraaragyacgcaattgctatcwgatacacaagaatcaaaawcaattgcagattcwgttagtggmcaattaaatcaaktmgayaataatgtgaataarctacatgcgacaggtcgagcattaggcgtaagagckaaygatttgaaycgtcaaatggctaaaaacgataaagataatgagttrttcgctaaagartttaaaaaagtattacaaaattctaaagatggcgacagacaaaaccaagcattaaaagcatttatgagtaatccggttcaaaagaaaaacttagaaaatgttttagctaataatggtaatacagasgtgatttcaccgacattrttcgtattattgatgtatttactatcaatgattacagcatatattttctatagytatgaacgtgcyaaaggwcaaatgaatttcatyaaagatgattatagtagtaaaaacmatctttggaataatgysattacgtcwggtgttattggtrcaactggtttrgtagaaggrttaattgtcggtttaattgcaatgaataagttccatgtattagctggctatagagcgaaattcatcttaatggtgattttaactatgatggtcttygtacttattaatacgtatttactaagacaggtaaaatctatcggtatgttcttaatgattgctgcattgggtctatactttgtagctatgaataatttgaaagcrgctggacaaggtgtgactaataaaatttcaccattrtcttatatcgataacatgttcttcaattatttaaatgcagagcatcctataggcttggyrctagtaatattaacagtacttgtgattattggytttgtactgaacatgtttataaaacactttaagaaagagagattaatctaa

SEQ ID NO: 1182 - DNA, 684 bp, Staphylococcus aureus
atggataagaaaaaagtcatcaaatttatgattaatgtattaccaattgtattggtaccgttaattgttgaacgtaaacgtatcaaacaacatccggacgtacaaaaagttacagatgctacaagtaaagttgcttcaaaaacatctgcagcaatcagtaacacagcgagtgatgttaaagaatatgtcggcgataaaaaacaagattttgaaaataarcgtgaacttaaaaagtttgctagagaacatgatcctgcctatattgagaaaaaaggcgaaaaattagctaaacaaaatcgtaaagacgctgataaaatgaataaaatacttcaaaaaaatatcgaaaagcgtcataaagaagagcaaaaagcccgcgaaaagaatgaaatacaacgtattaaagatatgaaaaartcacaaaaatacgaagwaaaagcaggcttaacacctaataaattagatgagaaaactgagaaaaaaggcgataaactagctgaaaaaaatcgcaaagaaatcgctaaaatgaataaaaagttacaaaaaaatattgaaaaacgacacaaagaagaacaaaaacgccaacaagaagctgataaagcacgcatcaagtcatttaaaaaatataaagattatgttgccaaaagcgcctctcaacaaaataaagaaaacaatacagaggcataa

SEQ ID NO: 1183 - DNA, 132 bp, Staphylococcus aureus
gtgttcgatttaggatttawggaagaatttttaatattttatggaacaacttcgaaatttaatatacaaatactaaaatatcgtatacatgtgttctttaaaattgtgataaggagtttaggatggtttatt

SEQ ID NO: 1184 - DNA, 459 bp, Staphylococcus aureus
atgttgatgaatagcgtgattgctttaacttttttaacagcatctagcaataatggcggacttaatattgaygtgcaacaagaagaggaaaagcgaatcaataatgatttaaatcaatatgatacaacgctatttaataaagayagyaaagmrgtyaaygaygcgattgytaagcagaaaaaagaacgacaacaacaaataaaaaatgatatgtttcaaaatcaagcgagtcactcgactcgcttgaatgaaactaaaaaagtgttattttccaaatctaacttagaaaagacttcggagagtgataaaagcccctatattcaaaacaagcaggagaaaaaaatattcccgtacattttgatgtctgtaggggcttttttgactttaggatttgtcattttttcaattcataaagggagacgaacgaaaaatgaatcagcacgtaaaagtaacatttga

SEQ ID NO: 1185 - DNA, 876 bp, Staphylococcus aureus
atgtttatcattgaattaataaaaggtattatcttagggrtcgtcgaaggattaacrgaatttgcmcctgtttcctctactggacatatgatyctagttgatgatatgtggttaaaatcatctgaatttttaggttctcartcagcatttacatttaaaatcgtcatccaattaggatccgtctttgcagcagcatgggtrttccgcgaacgcttcttagagattttacatattggtaaacacaaacatgttgaaggagawaacratcaacaaagacgttcaaagccaagacgtttaaatttattacatgtattagtgggtatggtkccagcaggtattttaggcttactatttgatgatttcatcgaagaacatttatttagtgtgccaactgttatgattggcttattcgtaggtgctatctatatgattattgctgataartaytcagytaaagttaaaaayccacaaacagtrgatcaaatcarttatttccaagcrtttgtmatyggtatytctcaagcwgtagctatgtggcctggtttcagycgttcaggytcaacratttcaactggggtattaatgaaattaaatcayaaagcwgcatcrgacttyacatttattatggctgttccaattatgttagcrgctagtggtttatctttattaaaacattatcaagatattcagattrctgatatacctttttatattttaggctttttagctgcatttactgttggactaattgcaatcaaaacattcttgcatcwwaktaacaaaatcaaaytaattccatttgccatttacagaattgtattagtaatctttattgctatactttacttcggatttggcattggtaaaggtatttaa

SEQ ID NO: 1186 - DNA, 243 bp, Staphylococcus aureus
atgaatcagcacgtaaaagtaacatttgattttactaattataattacggcacatatgacttagcagtaccagcatatttaccgataaaaaayttaatagctttagtattggatagtttggacatttcaatatttgatgtcaatacacaaattaaagtgatgacgaaaggtcaattacttgttgaaaaygaycgactyattgattatcaaatcgctgatggagatattttgaagttactatag

SEQ ID NO: 1187 - DNA, 444 bp, Staphylococcus aureus
atgtctgatcaacataatttaaaagaacagctatgctttagtttgtacaatgctcaaagacaagttaatcgctactactctaacaaagtttttaagaagtacaatctaacatacccacaatttcttgtcttaacwattttatgggatgaatctcctgtaaacgtcaagaaagtcgtaactgaattagcactcgatactggtacagtatcaccattattaaaacgaatggaacaagtagacttaattaagcgtgaacgttccgaagtcgatcaacgtgaagtatttattcacttgactgacaaaagtgaaactattagaccagaattaagtaatgcatctgacaaagtcgcttcagcttcttctttatckcaagatgaagttaaagaacttaatcgcttattaggtaaagtcattcatgcatttgatgaaacaaaggaaaaataa

SEQ ID NO: 1188 - DNA, 117 bp, Staphylococcus aureus
atgctcacacagtctgagatgattgtagtgttcgtgcttgatgaaacaataaatcaaggcattaatttgacggcaatgaaatatcctaagtctttcgatatggatagagtaatttga

SEQ ID NO: 1189 - DNA, 1335 bp, Staphylococcus aureus
atggttaaaaatcatraccctaaaaatgaaatgcaagatatgttaacrcctttagatgctgaagaagcagctaaaacaaaattacgcttagatatgagagagattcctaagtcttcaattaaaccagaacattttcatttaatgtacttattagaacaacattctccatattttatagatgctgaattaactgaactacgtgayagtttccaaatacattatgacattaatgacaatcatacaccttttgataatattaaatcatttactaaaaatgaaaaattacgwtacttactcaatatcaaaaatttagaagaagtaaatcgtacacgytacacatttgtkttggcaccagatgarttatttttcacaagagatggattaccmattgctaaaacaagaggkttacaaaatgttgttgatccattacckgtgtcagaagctgaatttttaacaagatataaagcrctggttatctgtgcattcaatgagaaacaatcatttgatgctttagttgaaggaaacttagaactacataaaggaacgccatttgaaactaaagttattgaagcggcaacgttagatttactaacggcatttttagatgaacagtatcagaaacaagaacaagattatagtcaaaattatgcatatgtacgcaaagtaggrcataccgttttcaaatgggttgctatcggyatgacaacgttaagtgtkttattaattgcattyttagcctttttatatttttcagtaatgaagcataatgagcgyattgaaaaaggataccaagcatttgtaaaggawgattatacgcaagtactaaatacgtatgatgatttagatggwaaaaaattagataaagargcactttacatttatgccaaaagttatatccaaacaaataaacaaggtttagaaaaagataagaaagaaaatttacttaataaygtgacaccaaattcaaacaaagactacttattatattggatggaattaggacaaggacatcttgatgaagcgattaatattgccacttatttagatgataacgatattacaaagttagcgttgattaataarttaaatgagattaaaaataacggagatttatcgaatgataaacgttctgaagaaacgaaaaagtataacgataaattgcaagatattttagacaaagaaaaacaagttaaagatgaaaaagcgaaatctgaagaagagaaagcaaaagcgaaagatgagaaattaaagcaacaagaagagaacgaaaagaaacaaaaagaacaagcacaaaaagataaagaaaaacgccaagaagctgaaagaaaaaaatag

SEQ ID NO: 1190 - DNA, 618 bp, Staphylococcus aureus
atgcaatctcgatacatcgctagaatttactttttaatwttatttatcgtctccctttttgagactaaaatttttcaatttatgactttaaatttgtttttagcatatataccttttgagcttagtctattattacgattattcaaaccgaataaaaagtatgaatggccactctttatcatatatagttttatatttgtgttacttttaccaaatacattttatatggtaactgatttaatccatttgaaccaatttcaattcaacttttacgcaggactaaatttargtgagtggaaatactttacctatttactgcttggtgtcttcttagcggtttatgtgatgattttaatctattttgaaatactaacattgacttctcaccgttggcttaatagattaattgttgtcgtrctaatgtttttaaatggattcggaatttatattggtcgtttcttacgcttacattccgtttatttctttaatgarcccttacatgttctaaatcacattctagaaagtctaacgcttaaaactgctatgtttgtatgttttatggttgtsatgcaagcagcaattctattatttggaaaaggagtgcgtttgaacaagtga

SEQ ID NO: 1191 - DNA, 4440 bp, Staphylococcus aureus
atgcataaattgattataaaatataacaaacaattgaagatgctcaatttgcgagatggtaagacatatactattagcgaagacgagcgtgcagatattacgttgaaatcgttaggcgaagtcattcatttagaacaaaataatcaaggtacttggcaagcgaatcatacttctattaataaggtgcttgttagaaaaggtgaccttgatgacattacattacagctttatacagaagctgattatgcatcatttgcgtatccttcaattcaagatacgatgacaattggrccaaatgcgtatgatgatatggttattcaaagcttgatgaatgccatcattattaaagattttcaatcaatacaagaatcacaatacgtacgcattgtgcacgataaaaatacagatgtgtatattaactatgaactacaagagcaaytaacraacaaagcttacattggtgatcatatttatgttgaagggatatggctcgaagtacaagctgatggtttaaatgtattgagtcagaatacagtggcatcgtcattaattcgcttaacacaagagatgccacatgcacaggcagatgattacaatacgtaccatcgttcgccaaggattattcaccgtgaaccgacsgatgatattaagattgaaagaccgccacagccaatacagaagaacaatacagtgatatggcgttccattataccgccattagtaatgattgctttaactgttgtcatctttttagtgagaccaattggtatttatattttaatgatgattggtatgagtwcagtaacgatagtatttggtattacaacgtatttctctgaaaagaaaaagtataacaaagatgttgaaaaacgagagaaagattacaaagmttatttggataataaatctaaagaaattaataaagcgattaaagcacaacgttttagtttgaattaccattatccaacggttgctgaaattaaagatatcgttgaaacgaaagcaccaagaatatatgaaaaaacatcgcatcatcacgatttcttacattataagttaggtattgcgaatgtagaaaagtcattcaaattagattaccaagaagaagaatttaaccaacgtcgtgatgaaytattcgacgatgctaaagaattgtatgaattttacacagatgtagaacaagcaccattaatcaatgatttaaatcatggrccrattgcatatattggtgcacgacatctcattttagaagaattggaraaaatgytaatycaattgtcaayrttccatagttatcatgatttagagtttctatttgtgacacgtgaagatgaagttgaaacattgaaatgggcacgttggttgccacatatgacattgagaggkcaaaacattagaggrtttgtttacaatcaacgaacrcgtgaccaaattttaacgtcaatttayagcatgattaaagaacgtatccaagctgtgcgtgaacgcagyaraagtaatgagcaaattattttyacaccgcaattagtgtttgtcattacagatatgtcattaattattgatcatgtcattttagaatatgtaaaccaagatttatcagaatatggtatttcattaatctttgttgaagatgtgattgaaagtttgccagagcatgtagataccattattgatatcaagtctcgtactgaaggmgaactgattacgaaagaaaaagaattagttcaattgaaatttacacctgaaaatattgataacgtygataaagaatatatcgcgmgacgtttggcgaatttgatacacgtcgaacatttgaaaaatgcaattcctgatagtattacatttttagagatgtataacgtgaaagaagtagatcagcttgatgtggttaatcgatggagacaaaacgaaacatacaaaacgatggcagtacctttaggtgtaagaggtaaagatgayattttatcattgaacttacatgaaaaagcacacggrccacatggtttagttgctggtaccactggktcagggaaatctgagattatccaatcatacattttatctttagctattaattttcayccwcatgaagttgcrttcctattgattgactataaaggtgggggtatggcgaacttatttaaagatttagtccatttagttggtacgattacaaacttagatggygatgaagcgatgcgtgccttaacatcaatcaaagccgaattgagaaaacgtcaacgtttattcggagagcatgatgttaaccatattaatcaataccataagttatttaaagaaggtrttgcracagaaccaatgccacatttattcattatttccgatgagtttgccgaattaaaatcagaacaacctgattttatgaaagaacttgtatcaacggcacgtattggacgttcgttaggtattcatttaatacttgcgacacaaaaaccatcgggtgttgttgatgaccaaatttggtctaactctaaatttaarttggcattaaaagtacaagatagacaagacagtaatgaaattttaaaaacaccagatgcagcagacattacattaccaggtcgtgcgtatttacaagttggtaataatgaaatttatgaattrttccaatctgcatggagtggwgcaacatatgacatcgaaggcgataaattagaagttgaagataagacgatttacatgattaatgaytatggtcaacttcaagcaatcaacaaagacttgagtggacttgaagatgaagaaacgaaagaaaaycaaacygagttagaagcggtyatmgatcatatmgaatctattacaacacgattagaaatygaagaagttaagcgtccatggytaccaccattrccagaaaatgtatatcaagaagatttagtagaaacagatttcagaaaattatggtcagatgatgcaaaagaagtggaattaacattaggacttaaagacgtaccagaagaacaatatcaaggrccgatggtattrcaattgaaaaaagctggkcacatcgcgttaatcggaagtccaggatatggtagaacaacgttcttacacaacattattttcgatgttgcaagacaccatcgtcctgatcaagcacacatgtacttgttcgatttcggtaccaatggtttgatgccagtyacagayataccacatgtygctgattaytttacagtagatcaagaagacaagattgckaaggcgatacgtatatttaatgatgaaatygatcgycgtaagaagattttaagtcagtatcgtgtyactagtatttctgaatatcgaaaattaactggtgaaacaattccgyatgtctttattcttattgataactttgacgcagtaaaagattcacctttycaagaagtttttgaaaatatgatgattaaaatgacrcgtgaagggctagcattagacatgcaagtaaccttaactgcytcaagagctaacgcwatgaaaacrccaatgtacattaatatgaaaacgcgtatcgcmatgtttttatatgataaatcagargtgtcgaacgtagtaggrcarcaaaaatttgcggttaaagatgtwgtgggtcgagcattgttaagtagygatgacaaygtatcattccatattggccaaccatttaaacatgatgagacyaaatcatataatgatcaaattaatgatgaagtatcggcgatgacagaattttataaaggtgaaacaccaartgatattcctatgatgccagatgaaattaaatatgaagattacagagaatcattaarcttaccrgatatagttgcmaatggtgctttaccaattggattagattatgaaggtgttacactacaaaaaattaaattaactgaaccagcaatgatttcatcagaaaatccgagagaaattgcgcatattgcygaaattatgatgaaagaaattgacatattaaatgaaaaatatgcgatttgtatcgcagaytcaagtggagagtttaaagcttatagrcatcaagtggctaactttgccgaagaaagagaagacattaaagcgattcatcaactaatgattgaagacttaaarcaaagagaaatggacggyccrtttgaaaaagattcactttayattatcaatgattttaaaacatwtattgattgcacgtatatyccggaagatgatgttaaaaarcttattacaaaaggaccagaacttggcttgaacattttatttgtcggcattcataaagaattaatagatgcttatgataaacagattgatgttgcacgtaaaatgattaaccaatttagtataggtattcgtatttcagaccaacaattctttaaatttagatttattcaacgagaacctgttattaaagaaaaygaagcrtatatggtcgcraaycaagcttatcaaaagattagatggtttaaatag

SEQ ID NO: 1192 - DNA, 423 bp, Staphylococcus aureus
atgaaattgcaaaaaagtaatcatactatactactagtgttrgaaaaaggagaagatatcgttgaatgtataacaamctttgcagatgaccaagacttaacatttacatctgtcagcggcattggtgcatgtgatgacgtygtwttaaaatttttcaatttaacaacgaaacaataygaagaaaaacatattactgagccactrgaattgacgagcttattaggtaatatttctcgtctagayaatggwcattttgcacatttgcatgctactttcggtactcaatcatatgaaacttttagcggacatctcgctaaagcaattgtttctgcaactgctgaaatcattcttactgtaactgattkggacattcaacgttcattcaamgatgcagtcggtttaaatttacttgatcytcaatag

SEQ ID NO: 1193 - DNA, 4449 bp, Staphylococcus aureus
atgcataaattgattataaaatataacaaacaattgaagatgctcaatttgcgagatggtaagacatatactattagcgaagacgagcgtgcagatattacgttgaaatcgttaggcgaagtcattcatttagaacaaaataatcaaggtacttggcaagcgaatcatacttctattaataaggtgcttgttagaaaaggtgaccttgatgacattacattacagctttatacagaagctgattatgcatcatttgcgtacccttcgattcaagatacgatgacgattggatcaaatgcatatgatgacatggtcattcaaagtttgatgaatgccatcattattaaagattttcaatcgatacaagaaactcaatatgtgcgcatcgtgcacgataaaaatacagatgtgtatattaactatgaactacaagagcaattaacgaacaaagcttacattggtgatcatatttatgttgaagggatatggctcgaagtacaagctgatggtttaaatgtattgagtcagaatacagtggcatcgtcattaattcgcttaacacaagagatgccacatgcacaggcagatgattacaatacgtaccatcgttcgccaaggattattcaccgtgaaccgaccgatgatattaagattgaaagaccaccacaaccaatacagaagaacaatacagtgatatggcgttccattataccgccattagtaatgattgctttaactgttgtcatctttttagtgagaccaattggtatttatattttaatgatgattggtatgagtacagtaacgatagtatttggtattacaacgtatttctctgaaaagaaaaagtataacaaagatgttgaaaaacgagagaaagattacaaagcttatttggataataaatctaaagagattaataaagcgattaaagcacaacgttttagtttgaattatcattatccaacggttgctgaaattaaagatatcgttgaaacgaaagcaccaagaatatatgaaaaaacatcgcatcatcacgatttcttacattataagttaggtattgcgaatgtagaaaagtcattcaaattagattaccaagaagaagaatttaaccaacgtcgtgatgaactattcgacgatgctaaagaattgtatgaattttacacagatgtagaacaagcaccattaatcaatgatttaaatcatggaccaattgcatatattggtgcacgacatctcattttagaagaattggagaaaatgctaatccaattgtcaacgttccatagttatcatgatttagagtttctatttgtgacacgtgaagatgaagttgaaacattgaaatgggcacgttggttgccacatatgacattgagaggtcaaaacattagagggtttgtttacaatcaacgaacacgtgaccaaattttaacgtcaatttatagcatgattaaagaacgtatccaagctgtgcgtgaacgcagcagaagtaatgagcaaattattttcacaccgcaattagtgtttgtcattacagatatgtcattaattattgatcatgtcattttagaatatgtaaaccaagatttatcagaatatggtatttcattaatctttgttgaagatgtgattgaaagtttgccagagcatgtagataccattattgatatcaagtctcgtactgaaggcgaactgattacgaaagaaaaagaattagttcaattgaaatttacacctgaaaatattgataacgttgataaagaatatatcgcgagacgtttggcgaatttgatacacgtcgaacatttgaaaaatgcaattcctgatagtattacatttttagagatgtataacgtgaaagaagtagatcagcttgatgtggttaatcgatggagacaaaacgaaacatacaaaacgatggcagtacctttaggtgtaagaggtaaagatgacattttatcattgaacttacatgaaaaagcacacgggccacatggtttagttgctggtaccactggttcagggaaatctgagattattcaatcatacattttatctttagctattaattttcaccctcatgaagttgcattcctattgattgactataaaggtgggggtatggcgaacttatttaaagatttagtccatttagttggtacgattacaaacttagatggcgatgaagcgatgcgtgccttaacatcaatcaaagccgaattgagaaaacgtcaacgtttattcggagagcatgatgttaaccatattaatcaataccataagttatttaaagaaggtgttgcgacagaaccaatgccacatttattcattatttccgatgagtttgcagaattaaaatcagaacaacctgattttatgaaagaacttgtatcaacggcacgtattggacgttcgttaggtattcatttaatacttgcgacacaaaaaccatcgggtgttgttgatgaccaaatttggtctaactctaaatttaaattggcattaaaagtacaagatagacaagacagtaatgaaattttaaaaacaccagatgcagcagacattacattaccaggtcgtgcgtatttacaagttggtaataatgaaatttatgaattattccaatctgcatggagtggtgcaacatatgacattgaaggcgataaattagaagttgaagataagacgatttacatgattaatgactatggtcaacttcaagcaatcaacaaagacttgagtggacttgaagatgaagaaacaaaagaaaatcaaactgagttagaagcggttatcgatcatatcgaatctattacaacacgattagaaattgaagaagttaagcgtccatggttaccaccattaccagaaaatgtatatcaagaagatttagtagaaacagatttcagaaaattatggtcagatgatgcaaaagaagtggaattaacattaggacttaaagacgtaccagaagaacaatatcaaggaccgatggtattgcaattgaaaaaagctgggcacatcgcgttaatcggaagtccaggatatggtagaacaacgttcttacacaacattattttcgatgttgcaagacaccatcgtcctgatcaagcacatatgtacttgttcgatttcggtaccaatggtttgatgccagtcacagatataccacatgtcgctgattactttacagtagatcaagaagacaagattgcgaaggcgatacggaagatacatgatattatttctgagcgaaaaagactattaagtcaagagagagtagttaatatagagcaatataataaagaaactggaaattcaattccaaatgttttcttaattatcgataactacgacacggtgaaagaatcaccatttatggaagaatatgaagaaatgatgtctaaggtaacacgtgaaggtttagcgttaggggtatacatcattctttcaggatcaagatcaagtgcaataaaatcagctatatttactaacattaaaacaagagttgcgctgtacctctttgaaaacaatgaattaacaaatattattggttcttataaaaaaggtgtgaaagatgttaaaggtagagctgcaataaatgatgataacttcacacagttccaaattgcgcaaccatttgaattagcagaaggacaaacatataacgagcgcattaaaaatgaagtagcacaaatgaaagaattctatgtaggagattatccaaaacatattccaatgatgccagataaggtatttatggaagatattcgagaagcatatgatttggaaaaaatcattcatgaagaacacaaattaccattaggattagactttgaggatgtggaactagttagtttagatctgacaagttcttcgattgtaacagcaattaaaccaactgagatggaaaaaatgaatgatgttataatgtctagtttatcagtatatagtaaaaaccaatttgttatcttggttgatgcagaagataatatgagccagtattcagaagatgtaacctcttattattcagcaccatcagatttgagcaacattagattaggatttaagcaagaaatagaagcaaggaaaaatggcgagaaaagtatagaggaatgcaagattgtatttataaataatattaaacgattcaatcaattaactggaatgacagaagatgaaattcgtgtgttatttaatgaaggtcaaaaagttaatattatcattattgcaagtggactatactcagatacaattggtgcatttgatagagaaagtaaaatgatggtaagaactataaatcaagctttgattagtcataagatatcggaacaagaatttataagagttaaagatcgatttggtgaaccagaattaaaagtgggagaaatgtattacattaataatcaagaatatcaaaaaataaaactaatggagggatag

SEQ ID NO: 1194 - DNA, 393 bp, Staphylococcus aureus
atgaattttaatgatattgaaacaatggtyaagtcgaaatttaaagatattaaaaagcatgctgaagagattgcgcatgaaattgaagttcgttctggatatttaagaaaagctgaacaatataagcgattagaatttaatttragtwttgcactagatgatrttgaaagcacagcaaaggacgtacaaactgcaaaawctagtgctaataargacagtgtawctgttaarggaaargcgcccaatacgttatatatygaaaaaagaaatttgatgaaacaaaagcttgaaatgttgggtgaagatatcgataaaaataaagaatccctccaaaaagctaaggraattgctggmgaaaaggcaagtgaatattttaataaagcaatgaattaa

SEQ ID NO: 1195 - DNA, 1056 bp, Staphylococcus aureus
atggtgttatcaattagaagtcaaatcattattggcgtcgtwtcgagtatacyattaacttcaactattttagcaattgcatatattttaatgtggtttaacggccatatgacactaactttgaccttaacgacaataattacaagctgtttaaccttattaatatgtagtatttttattaatccacttatacaaaaaattaagcagtttaatataaaaactaagcmatttgctaacggaaattacgcaagcaatgataaaacgtttaattcaccaaaagaaatttatgaattaaatcaatcttttaataaaatggcttctgaaattacgcaacaaatgaatcaaattaaatccgaacaacaagaaaaaacagaactgattcaaaacttagcccatgatttaaaaacacctttagcaagcattatttcatattctgaaggactacgtgatggtataatcacwaaggatcatgagattaaagagtcatacgacatattaattaaacaagcaaacagattatcaacattatttgatgatatgactcatattatcactttaaatacaggtaaaacatatcccccagaattaatacaactagaccaattacttgtwtcmatwttgcaaccatwkgagcaacgyatcaaacatgaaaaccgcacattagaagtgaatttctgtarcgaaattsatgcattttatcaatatcgaacgccacttgagcgtattttaacaaacttacttgataatgcgctaaaattttcaaatgttggtagtcgcattgatattaatattagtgaaaacraagatcaagatactatcgacattgctattagcgatgraggtattggcattataccagaactacaagaacgtatattcgaacgtacattcagagtagaaaactctcgtaatacaaaaacgggtggttctggattaggcttatatatagctaatgaactcgcgcaacaaaataacgcaaaaatcagtgtaagsagtgatatagatgtrggaactacgrtgactgtaacattacacaaattagacattacgwcataa

SEQ ID NO: 1196 - DNA, 315 bp, Staphylococcus aureus
atgggtggatataaaggkattaaagcagatggtggcaaggtkratcaagcraaacaattagcggcaaaaayagctaaagatattgaagcatgtcaaaagcaaacgcaacagctcgctgagtatatcgaaggtagtgattgggaaggacagttcgccaataaggtgaaagatgtgttactyattatggcaaagtttcaagaagaattagtacaaccgatkgctgaccatcaaaaagcaattgataacttaagtcaaaatctagcgaaatacgatacattatcaattaagcaaggrcttgatagggtgaacccatga

SEQ ID NO: 1197 - DNA, 687 bp, Staphylococcus aureus
atgacccacttactgatcgtggatgatgaacaagacattgtagacatttgtcaaacctattttgaatatgaaggttacaaagtaacaacgacaactagcggtaaagaagcaatttctttactatcaaatgatattgatatcatggtacttgatatcatgatgccagaagttaatggttacgacattgtcaaagaaatgaaaaggcaaaaattagatatcccctttatctatttaactgccaaaacacaagaacatgataccatttacgccttaactttaggtgcagatgactatgtcaaaaaaccatttagtccaagggaactcgttttacgtwttaataatttacttacmagaatgaagaaataccatcatcaaccagttgaacaactgtcrtttgatgaattaacacttattaacttaagtwawgttgtgactgtwaatggkcaygaagtcccyatgcgtwttaagsaatttgagttaytgtggtatttagcytcyagagaaaatgaagttatttctaaatcmgaattacttgaaaaagtttggggatatgactattacgaagatgctaataccgtgaatgtccatatacaccgtattagagaaaaattagaaaaagagagctttacaacatataccatcacaactgtatggggattaggatataaatttgaaaggagccgataa

SEQ ID NO: 1198 - DNA, 1335 bp, Staphylococcus aureus
atgaataataaggarcatattaaatctgtcattttagcrctactcgtcttgatgagtgtcgtattgacatatatggtatggaacttttckcctgatattgcaaatgtcgacaatacagatagtaagaagagtgaaacgraacctttaacgacacctatgacagccaaaatggatacaactattacgccatttcagattattcattcgaaaaatgatcatccagaaggwacratygcgacggtatctaatgtraataarctgacgaaacctttraaaaataaagaagtgaagtccgtggaacatgttcgtcgkgatcataacttgatgattcckgatttrarcagtgattttayattattcgattttacgtatgatttaccgttatcaacatatcttggycaagtactgaacatgaatgcgaaagtaccaaatcatttcaatttcaatcgtttrgtcatagatyatgatgctgatgataatatcgtgctttatgctataagyaaagaycgccacgattacgtaaaattaacaactacaacgaaaaatgatcattttttagatgcattagcarcagtgaaaaaagatatgcaaccatacacagatatcatcacaaacaaagatacrattgatcgtacgacgcatgtttttgcaccaagtaaacctgaaaagttaaaaacatatcgcatggtatttaacacgattagtgttgagaaaatgaatgctatactatttgacgattcaaccatcgttcgtagttcaaaragtggtgttacaacytacaacaataatacaggtgtcgcaaactataacgataaaaatgaaaaataycattataaaaacytgtccgaagatgaagcragttcmagcaaaatggaagaaacgattccaggaacctttgattttattaatggtcatggtggtttcttaaacgaagacttyagattgtttagtacgaataatcagtcaggcgagytaacatatcaacgtttccttaayggttatccaacgtttaataaagaaggykctaatcaaattcaagtcacttggggtgaaaarggcgtctttgaytatcgtcgttcgttaytrcgcaccgaygttgtkttaaayagtgargataataaawcgttgccgaaattagagtctgtacgttcaagcttagcgaacaatagtgatattaattttgaaaaagtaacaaacatcgctatcggttacgaaatgcargataayycrgatcataatcacattgaagtgcagattaacagtgaactcgtaccgcgttggtatgtagaatatgatggygaatggtatgtttataacgatgggaggcttgaataa

SEQ ID NO: 1199 - DNA, 933 bp, Staphylococcus aureus
atggaagacgttacagatatcgtctttcgacacgttgtaagtgaagcagctagaccggatgtgtttttcactgaatttacaaatacygaragcttttgccaccctgaaggcatacatagtgtgcgcggacgcttaacttttagygaagatgaacasccgatggtcgctcayatatggggagataagccagaacagttccgtgaaacgagtattcaaytagctaaaatgggctttaaaggcatwgacttaaatatgggatgtcctgtagcaaatgttgctaaaaagggtaagggttccggcttaatcttaagacckgaygtygctgccgaaattattcaagcractaaagcaggtggrcttccggtaagtgttaaaacacgccttggytactatgaaatcgatgaatggaaagattggttgaagcaygtcttcgaacaagayattgcmaatttatctattcatcttcgtacacgtaaagaaatgagtaaagtagatgcacattgggaattaatcgaagctattaaaaatttacgtgacgaaattgcaccaaayacattgttaacaattaacgrtgatattcccgatagaaaaacaggacttgaactkgcagaaaaatatggyatygatggyrtcatgattggtagaggcattttccayaatccattcrcttttgaaaaagaaccacgygaacacacawgcaargaactattagatytrttgagattgcatytatcattrtttaacaaatatgaraaagatgaaatacgacaattcaagagyttrcgtagattctttaaaatctatgtgcgtggcataagaggcgctagygaacttcgmcatcaattgatgaacacacaatcaattgcagaagyamgagcactwctmgatgaatttgaagcccaaatggacgaagacgttaaamtwgaattatag

SEQ ID NO: 1200 - DNA, 675 bp, Staphylococcus aureus
atgaaagatgttaagcgaatagattatttttcttacgaagaattaacaattttaggtggtagtaaattrcctctcgtaaattttgaattgtttgatccatcaaattttgaagaagctaaagykgctttaattgaaaargaattagtaacagagaatgacaagttaactgatgcaggttttaaagtggctacattagtmagagagtatattagcgcmattgtaaatattcgaattaatgatatgtattttgcaccatttagctatgaaaaagatgaatatattttgttaagccggtttaaaaataatggrtttcaaatacgaattatmaataaagacattgcatggtggtcgattgtacaatcatatcctttattratgagacaagaaaartccaatgattgggactttaaacaaattgacgatgaaayattggagaacttaaataatgaaagtatcgatacgattgggcgtgttttagaaattgaaatmtacaatcatcaaggtgaccctcaacaaagtttatataacatttatgaacaaaatgatttgytaytcattcgatacccattaaaagataaagtrctgaatgttcatattggygtcattaatacatttatacgagaattatttggattcratactgatgaaaatcatattaataaagcagaggagtaa

SEQ ID NO: 1201 - DNA, 474 bp, Staphylococcus aureus
atgaataaattattgctactcgttacatttatcattcgtgtgggttcaggtattgttatgttaatgcaaggytacgaaaaattaacgggcggatttacgctgaaaggtttagtaccagtcatcgctaacaatactgattcaccagagtggtataagtggtttttcgcaaatatagttgcacatacgacgtcattatttgatattgttgtcccactyggagagattgcaattggattaggtttaatttttggagtttttgcatatgctgctagtttctttggagcctttgttatgataaattatatcttagcagatatgatatttacgtatcctcttcaattaactttctttatccttttaytaatgagtcactcattgttaaaacagatttcacttaaagaaatcattaattactttagaggtcgtaagaacagaggtgaaaaaatagatgacccacttactgatcgtggatga

SEQ ID NO: 1202 - DNA, 318 bp, Staphylococcus aureus
atgacgttgagtggaaaaattagtgttaaagctgaaacgattgcacatgttgtaaaagaattggaaagcatwagtcaaaagtatgatgaaatagctcaaaactttggaaaaatwgcgcaattaaattactacagtagtgaaaaagctkcacattctatggaaaayggctatagtagtgctgcaacagtcattagtggtctcaaaggtccattgagtacactcggtggtggygtcatgaattcagcacaaaagttctttgaagcagatgaacattggggtacggaatttgccaagctttactataatattgagggatag

SEQ ID NO: 1203 - DNA, 441 bp, Staphylococcus aureus
atgaatacaaaatattttttagcagytggtgctrttrycwcwryattarctttaggygcttgtggtaattctaattcacaagatcaaggtaacaaaactgaacaaaaaacaaagtcagaagatagcaatgttaaaactgataaaacaaaacacctaacaggtacattcagttctaaaaacggtgaaactgttgaaggtaaagctgagattaaaaatggtaaattaatgcttactaactacaaatcatcaaaaggtccagatttatacgtctacctaacaaaaaatggcgacattaaaaacggtaaagaaatcgcaatggttgactacgataaagaaaaacaaacatttgatcttaaaaatgtagatttaagcaaatatgatgaagtaacaatctattgtaaaaaagctcacgtcatcttcggcggcgctaaattaaaataa

SEQ ID NO: 1204 - DNA, 120 bp, Staphylococcus aureus
gtgaaggttattttttattgtccaaaacgtgctgatgacattttaaaagcaagtatggaatatcagtcgacagactataaacggaggtatatctcatggaaaacaatgatagcaatgaag

SEQ ID NO: 1205 - DNA, 1845 bp, Staphylococcus aureus
atgacaaaagatattgaatatytaacagctgattatgacaatgaaaagtcatctatccaaagtgtaatagatgcaatagagggkcaagacttcttagatgtagatacaacaatggatgatgcggtaagcgatgtcagttctttagacgaagatggcgcaatatcattaacaagtagtgtagtaggtccacaaggatctaaattaatgggstattatcaaaatgagttatatgattatgcatctcaattagattcgaaaatgaaagaaattattgacacgccatttatagaagatatagatamagcattcaaaggtatarcgaatgttraattggaaaatataytaattaaaaatggyggtggwcatggtagagatacctatggggcttctgggaaaattgcaaagggagatgccaagaaaagtgacagcgatgtttatagcatcgatgaaatattaaaatcggatcaagaatttgtaaaagtaattgatcagcattacaaagaaatgaaaaaagaagataagaaattatctaaaagtgattttgaaaaaatgatgactcagggcgcttcttgtgattacatgacagtagctgaagcggaagagctagaggagcaaaagaaaaaagaagaagctatagagattgcagcactagctggtatggtagttttatcttgtattaatcctgttgctggagcagtagctattggtgcttattccgcttattcagcagcaaatgcagccacaggaaaaaatattgtaactggaagaaagctatctaaagaagaacgaatcatggaaggactttcgcttattccattgccaggtatgggcttcctcaaaggtgctgggaaaagtttaatgaaattaggcttcaaaggcggagaaaaatttgcagttaaaacaggattgcaaaagacaatgcaacaagcagttagtcgtatttcacctaaaatgggaatgatgaaaaacagtgtgttgaatcaatctcgtaactttgctcaaaatactcatgttggacaaatgctgagtaacatgcgtggtcaagcaactcatactgttcaacaaagtagaaattggattggacaacaagcacaaaatgtcaaacgaatagtgaataatggacttgataaagaaatagcacatccatttaaacaacaacttgcaccagcgggaatgggtggtataaaatttgctgaaacaactactttgagaaacatgggtcaaaacataaagcgtgctgttacaccacaaaatcacgtgacacatggtccaaaagatagtatggtgagaagtgaaggcaaacatagtataagtagccatgaaatgaattcatcaaagtatgttgaatcaccaaactacaccaaggttgaattcggagaacactatgcaagacttagacctaagaaactaaargcraatatwgaatayacaacaccwactggtcacatatatcgraccgatcataaaggkcgcataaaagaagtttatgtagacaatctytctctaaaagatggsgrtcgtaatarccatgcacaaagaactgtggggggagaggatagattaccagacgatgatggaggtcayttaatcgctagaatgtttggtggktcaaaagacatwgataaccttgtggcacaaagtaaatttatcaaccgtycatttaaggaraawggwcawtggtataatcttgagaaagagtggcaagagttcttaaactctgggaaagaggtgaaaaatattaaaatggaagtaaaatatagcggtaatagtcaaagaccgactatatttaaagttgaatatgaaattaatggtgaaagaaatattagaagaatattaaataagtag

SEQ ID NO: 1206 - DNA, 585 bp, Staphylococcus aureus
atgattktatatatattaattaatattgctatcgtcgtacttataactggattcaatttatataggcatcaaatgcaacatttatcattaagtgcaatgttgttatctattackataaacgcctttataaatacattcataattgataaatataactttattactctgtgtactataacgatgtttatcatttggacgatactacagttttacattgataaaaaattaaaacctgtatacattacagaccaaaaatttattgctatcatattaacgattgttgtcagtttaacgcaacgtgttaccgacttttcaagtacacaatcaatatatatgtctattccatttttagcccctgcmattttcatcattggtggtattatgttrtttatttcaacatttaatagcttagatgaawctgctgaaaataataayaaaataaagaaactaatgattaaaggacttatcattattaacatttcatttatcgttatgatggttttaacaccatattggtacttgtatttaatcgtctatcttattttcttgttgtttttattgtggcaaaaggtttataaattttaa

SEQ ID NO: 1207 - DNA, 1845 bp, Staphylococcus aureus
atgacaaaagatattgaatatctaacagctgattatgacaatgaaaagtcatctatccaaagtgtaatagatgcaatagagggtcaagacttcttagatgtagatacaacaatggatgatgcggtaagcgatgtcagttctttagacgaagatggcgcaatatcattaacaagtagtgtagtaggtccacaaggatctaaattaatggggtattatcaaaatgagctatatgattatgcatctcaattagattcgaaaatgaaagaaattattgacacgccatttatagaagatatagataaagcattcaaaggtataacgaatgttaaattggaaaatatattaataaaaaatggcggtggtcatggtagagatacctatggggcttctgggaaaattgcaaagggagatgccaagaaaagtgacagcgatgtttatagcatcgatgaaatattaaaatcggatcaagaatttgtaaaagtaattgatcagcattacaaagaaatgaaaaaagaagataagaaaytwtctaagagtgwttytramwaaatgatgactcaaggtgcttcttgtgattacatgacagtagctgaagcggaagagatagaagagcaaaagaaaaaagaagaagctatagagattgcagcactagctggtatggtagttttatcttgtattaatcctgttgctggagcagtagctattggtrcttattccgcttattcagcagcaaatgcagccacaggaaaaaatattgtaactggaagaaagctatctaaagaagaacgaatcatggaaggactttcgcttattccattgccaggtatgggcttcctcaaaggtgctgggaaaagtttaatgaaattaggcttcaaaggcggagaaaaatttgcagttaaaacaggattgcaaaagacaatgcaacaagcagttagtcgtatttcacctaaaatgggaatgatgaaaaacagtgtgttgaatcaatctcgtaactttgctcaaaatactcatgttggacaaatgctgagtaacatgcgtggtcaagcaactcatactgttcaacaaagtagaaattggattggacaacaagcacaaaatgtcaaacgaatagtgaataatggacttgataaagaaatagcacatccatttaaacaacaacttgcaccagcgggaatgggtggtataaaatttgctgaaacaactactttgagaaacatgggtcaaaacatgaaacgtgctgttacaccacaaaatcacgtgacacatggtccgaaagatagtatggtgagaagtgaaggtaaacatagtgtaagtagccatgaaataaatttatcaaaatatgttgaatcaccaaactacaccaaggtcaaatatggagagcaatatgcaagacttagacctaagaaactaaaagcaaatatagaatatacaacaccaactggtcacatatatcggactgatcataaagggcgcataaaagaagtttatgtagacaatctttctctaaaagatggcggtcgtaataaccatgcacaaagaactgtgggaggagaggatagattaccagacgatgatggaggtcacttaatcgccagaatgtttggtgggtcaaaagacatagataaccttgtagcacaaagtaaatatatcaaccgttcatttaaggaaaatggtgattggtacaagttggaaaaactatgggaaaaggcaatcaagtctggaaaatcaatagaaaatattaaaatagaagttaaatataaaggtaatagtcaaaggccgactatatttaaagttgaatatgaaattaatggtaaaagaaatattagaagaatattaaataagtag

SEQ ID NO: 1208 - DNA, 714 bp, Staphylococcus aureus
atggctaaaattcctgtactcgaaatattcggtccaaccattcagggtgaaggtcgagtaatcggtagaaaaacgatgtttgtgagaacagctggatgtgattatcgctgtagctggtgtgattctgcatttacttgggatggtagtgctaaaggcgatataaaactcatgaccgctgaagaaatttatgatgaattaaaacgaattggtggcgatttatttaaycacgttacaatttctggtggtaacccagcattaattaaaggtatccaagagttagttgacttatttcaagataaaggtattttcagcgcactggagacacaaggcagtaaattccaaccttggatgacacaaattgatgatttaacgattagtccaaaaccaccaagttcaactatgacrcctgatttaaaaaagttagatgaagtgattrcacaatgcgtaccttcmtcattaaacttaaaagtagttgtattcgacgataaagattatgattttgccaaaatgatacaccaccgttatccagatattcccttctatttacaagttggtaacccatatttatcagacagcgtagataatcataccgaaaagttgttagaacgctacgagcagttggtrgatttagttatgcaaagtaatgatatgaatcacgtttatgtgttaccacaacttcatacattactttggagyaataaaaaaggtgtataa

SEQ ID NO: 1209 - DNA, 501 bp, Staphylococcus aureus
atgacwttygaagagaarmtwagcaaawtatayaatgarattgcgaatgagattagcartatgataccggtagagtgggaaaaagtatatacaatggcttatatagatgatggaggaggkgargtattctttaattatactaarccaggwagtgawgayttgaattattayaccgatatacctaaggagtataayrtttctgtgcaagtatttgatgatttatggatggatttatatgatttgtttragrakttaagaratttatttaaagaagaagayttagaaccatggacatcatgtgaatttgactttacaagagasggyaaattgaawgtwtcatttgattatatwgattggryraatwcagagtttgrwcaawtgggmmgwgaamattattayatgtayaaaaaatttggrrttwkrccwgaaawrgaatatgmmatrrakkrggtwaaamaaatmrarsawtatrttaaagagcaagawgaakmkgaactatag

SEQ ID NO: 1210 - DNA, 462 bp, Staphylococcus aureus
atgactttcgaagaaaaactaagtcaaatgtacaatgaaattgcaaataaaattagcagtatgataccggtagaatgggaaaaggtatatgcaatggcttatgtaaatgaaagaagtggagaagtgttctacaattatactgaaccaagaagtgatgaattattttactatacgagcgtgttaaataaatataatatatcaagatcagaatttatggactcagtatatgaattatataagcaatttgataaactaagagatttatttaaagaagaaggactcgaaccatggacatcatgtgaatttgactttacaagagacggcaaattgaatgtttcatttgattatattgattgggcgaattcagagtttggacaaatgggaagagaacattattacatgtataaaaaatttggaatttggcctgaaaaagaatatgccataaattgggtaaaaaaataa

SEQ ID NO: 1211 - DNA, 684 bp, Staphylococcus aureus
atgactactaaagaaaatattgatactcttcgaaagccaggygcacaagccttaagtttaatatcattgtttttgatacttttttcatgtytractttcttttttggtttagattatgaaaggtttccaaaytatttaaagataacgacaattatagaattaataattattgtaattagtttacttcaatggattagrtttatagayttcgaaaaagaaagtrcacrgaaatataaaaaaatatatgctcgatttttagttrttataaatgtgttaactactatcactgtagtatttgcactgtgtaayctttattattttgcagctgtacaaaaccattaygatttattyaattattggttratgggtwcgatttcaatcataattagctatttattattagtaattggcggaatgttyacgttrttaaaattacctaaagtaacaaaacgytggggkggtaaaactaaaacacatttcggtttattattaactgcgttgagctcatttatatatattgaaaaaattatcgaatatatattgrttcctaatgtcgtagaatcyaagtttataattattgtgagcatgwtggttatcgcyggagcacaatttgtggcatttcaatttattatgcaatacagtagattctatatttttgaattaaacacwgaagatgatgactaa

SEQ ID NO: 1212 - DNA, 420 bp, Staphylococcus aureus
atgttacaacaaatctatcctagtacaacgcatccatatcaattcgaattaaataaagaytttaatttttcrgctgcacatcacattccdtgtgaagaagcaggtatttgtcaaaatgtccatggtcatacttactttgttaatttaacaattgtcggtgataaactagatgacactggcttyttagtgaactttagccatttgaaaaagatgatacacggtaaatttgaccatcaactgttaaataacttacctgcttttaaaaacaaaatcccttcaactgaaatcgtagcggaaacaatttatcaaattgttaaagaaaatttggcatcgctcgaacaccaaccaaaatgtattcaagtatttgtaagagaaacaccaacaagttatgtygtatttagaccaaaggaacaggtgtaa

SEQ ID NO: 1213 - DNA, 216 bp, Staphylococcus aureus
gtgggagggktaacgatggcaacscaaaracaagttgawtaygtratgtcattacaggagcaactggaattagaagactgcgaaaaatatacagacgaacaagttaaagcaatgagtcataaagaagttagcaatgtgattgaraactataagrcaagcataagkaatgaagarctataykacgaatgcatgtcgtttggwctgcctaattgttaa

SEQ ID NO: 1214 - DNA, 258 bp, Staphylococcus aureus
atgagcgtaatcagtaacagaaaagtagatatgaacgaagcgcaagacaatgttaagcaaccagcgcactacacatacggcgacattgaaattatagattttatcgaacaggttacggcacagtatccacctcaactagcattcgcaataggtaatgcaatcaaatacatgtctagagcaccgttaaagaatggtcatgaggatttagcaaaggcgaagttttacgtccaaagagcttttgacttgtgggagggttaa

SEQ ID NO: 1215 - DNA, 324 bp, Staphylococcus aureus
atgaccttacaacaaaaaatactatcacattttgcaacatatgacaatttcaattctgatgatgttgttgaaacttttgggatatctaaaacacatgcaaaatccacwctttcaaaacttaagaaaaaaggaaagattgmaatggaaagttggggtrtctggcgtgttattgaatcgcaattgcatttaagtgtagtcgaacgtaaaaaagaaattttagaagaacaatttgaattgttagcaagattaaatgaacaaagtgakgaccctagagaaatagaagaacgtatcaagttaatgattcgtctagctaaccaattttaa

SEQ ID NO: 1216 - DNA, 612 bp, Staphylococcus aureus
atggagttcttattattaattgtcgtagccggactgtattatattatatatttaactgctgtgatgtattctgaaaaaatagtagtattgcctataatcatctatgccattktgtttgtartaattggtatcacttatatytttataggygacagctatgatcarttaacaaatttcaatgtgattttgtatatggggagtttgttttatgcatggatggctwttagaaatctttggaacagaccaytattaytaaaatataagaacattacagatagttcaagtggaatagttaataaatctgaatayaattcagttgaaagcttacgtataaayattgaaatagctaagtataaagggattatttctttgatagtagctatagtactaacggtattaatgacattaaagtcaacrcctcaaatyactgcrgaaacacgtgacttaagtatctcatttttcatactcagcttatttatcattattatatttgcwgtttgggatttrwttattagagttagaaaaggagcgtttgcttttgttgtaataaggccaatattattyagttgttggwtatttattytgaatatgattttatcaagattaktataa

SEQ ID NO: 1217 - DNA, 669 bp, Staphylococcus aureus
atggaaagtgtattaaataatgaaaaagccatcgttgtctttagtggtggtcaagacagtacaacatgtctcttttatgcaaaaaaacatttcaaagaagttgaactcgtaacgtttaattatggycaaagacatgatactgaaattgaagtcgcaaaacaaattgcacaagatcaaggaatgaaacatcacgttttagatatgtcattattatcacaacttactccaaacgcattaacacaacatgatatggaaattactaataatgaagatggtatacctaatacatttgttccagctagaaatttacttttcttgtcgtttgcaggygctctagcttatcaaattggggctaagcatattattacaggcgtatgtgaaacagacttttcaggctacccagactgtcgcgatagttttataaaatcaatgaacgtaacattaagcctagctatggacaaagattttgtyattcatactcctttaatgtggttaaacaaagcagaaacgtggaaattaagtgatgaactcgaagttttagattatattcgtacaaaaacattaacatgctataacggtatcattggggatggctgtggtgaatgtccagcttgtcatttacgtcaacgtggactaaatcaatatcttgaaagtaaaggagcgctttaa

SEQ ID NO: 1218 - DNA, 216 bp, Staphylococcus aureus
atgaacacaagatcagaaggattgcgtataggcgtcccacaagtttctagcaaagctgatgcttcttcatcctatttaacggaaaaggaacgtaacttaggagcggaaatattagarcttattaaaaaaagtgattacagctacttagaaataaacaaagttttctatgcattagatagagaacttcaatacagggcgaataataacaaactttaa

SEQ ID NO: 1219 - DNA, 486 bp, Staphylococcus aureus
atgtwyagaacaaccttagcccatctctttttatttaaaaattattttttctcacgyaataaatctctgatttcagttaataacacaacattttcttccacaactgcttcttcttcggcttcttctttcttcattaakgtatttgcaatcttaacraagatgaataaagcaaacgcgatgataataaagtcgataacagattggataaataaaccrtatttaataccccagaatgaccattctttagcaaaatcaactgatccgaaaattttaccaattaatggcatratgatattttctactaatgaagatataatcttgttgaaagctgcacccatcacaacagcaattgctaaatctaagacgttaccttttaaggcgaactctttgaattcttttaacattacactcaacctctcttktttaaatgtaacctcaattatacaacaaataaaaaaattagaaaatagattattyaagaaaatt

SEQ ID NO: 1220 - DNA, 264 bp, Staphylococcus aureus
atgaaaacattaaaagagttgaggactgattacggattgactcaaaaagagttaggagatttatttaaggtctcatcacgtacaattcaaaatatggaaaaagactctacaaacattaaagatagtttactttctaagtatatgagtgcttttaatgttaaatatgatgatatttttttaggtaatgaatacgaaaatttcgtattyacgaaygataaaaagaaatcaattattttagcatttaaagaaaaacaaacatcttaa

SEQ ID NO: 1221 - DNA, 219 bp, Staphylococcus aureus
atggaaaaccaaaaacaaggcaatggcttaaaaattgcaacatgggtatttattgtattaacagtagttacaccgctatttggtattggaagtattgtttgtagtattaattayaaaaaatacgatgcwgaaaaaggttcgaagttattgmaaattgcaattatcgtaacaataattgyttttgttttaaatttattagcatatttaggtttaagataa

SEQ ID NO: 1222 - DNA, 918 bp, Staphylococcus aureus
atggaaaataaatatacacatggtgtcctcttttaccatgaacacagtggattaaaaaatattaatcaaggtatyggggaagttacaacrgcattaagttcaatttgtaagcatctttctattcaattgagtgaaaacgaaggtgacatwattaaatattgccaagaaatyaaarctaaaraytatgcaaaagatgtagatatattatttattcttggcggtgatggcacggttaacgaacttataaayggtgttatgwcacaygaccttcaactccctattggcattttaccaggcggtacttttaatgattttacaaaaacgctaaatatagcacctaatcataaacaagctagtgaacaaatgatttctgcacaagttggtamatacgatgtaattaaaataaataatcaatatgcactcaactttgttggcttaggtctmattgttcaaaacgctgaaaacgtacaagatggttcaaaagatatatttggtaaattgagttatattggatcaactgtcaaaacactgctaaatccaacacaatttaattatcaattatcaatwgatgataagacatattctggcgaaacgaccatgatactawcagcaaatggtccattcattggtggtagtcgwataccattgactgatttgtctcctcaagatggtgaactgaacactttcatttttaatgaacaaagtttcagtattttaaatgatatttttaaaaagcgtgatagyatgaattggaatgaaattactcaaggtattgagcatatacctggtaaaaagatttcacttacaacagatccarcaatgaaagttgatattgatggcgaaatttcattagaaacacctattgatattgaggttataccaaatgcyattcagttrcttactgtcaatgatttgtaa

SEQ ID NO: 1223 - DNA, 102 bp, Staphylococcus aureus
atgaagattaaaaataaacaaggcgatttctatcatactcagatagaagtcgccttgttcgttttcaaagaattaattggcatgcatcttatgaagaattat

SEQ ID NO: 1224 - DNA, 1506 bp, Staphylococcus aureus
atgacacaacaaaactcccatggaaatcaaattcaagacatacctcaaacaggatttttcgggcatcctcgaggrctaggcgtactcttctttgtagagttctgggaaaggtttagttattatggcatgcgtgccctactcattttctacatgtactttgccgtaacagataatggccttggaattgataaaacaacagctatgtcaattatgtcagtttatggttcattaatctatatgacatcaataccaggcggatggattgctgacagaattacaggyactagaggcgctactttattaggtgcagtctttattattatcggacatatttgtttaagcttaccatttgcattaatcggcttattcacatcaatgttcttcatcattattggttcaggtttaatgaagccaaacatttcaaatatcgttggccgtttatatcctgaaaatgatagacgtatggatgcaggttttgttattttctatatgtcagttaatatgggtgcattattatcacctattattttgcaacactttgttaatgttaaaaacttccacggyggattcttgattgcagcwgttggtatggcattaggtttagtatggtatgtacttttcaaccgcaaaaacttaggtagcgttggtatgaaacctactaacccattgacaccagctgaaaagaaaaagtatggtcttattatcggaagtgttrtyttagcaattgtattaattatcgttattggtgcattaactaactcattatcatttaacttagttagtaatactgttttagtattaggtattgcattaccaatcatttacttcactttaattattagaagtaaagatgtcactgatactgaacgttctcgtgttaaagcatttattccattatttattcttggaatggtgttctgggctattcaagaacaagggtctaatgtattraacatwtatggaattgaacattcagatatgaaattaaacttatttggttggaaaacaaactttggtgaagcgatyttccaatcaattaacccattatttattttattaytagctccaattatttcacttttatggcaaaagcttggaactaaacaacctagcctgccagtraaatttgcaattggtacgttcttagcaggtgcgtcatacatactaattggtattgtaggttatgcatcaggttcatcaaacttytcagttaactgggttattttatcgtacattatytgtgttatcggtgarctwtgcttatcaccaacgggtaatagtgctgctgttaagttagcacctaaagcatttaatgcccaaatgatgagtatttggtacttaactaacgcttctgcacaagcaatcaatggtacwttagttaagttaatagaaccactaggtcaaacaaattactttatyttcytaggtgttgttgcaattattgttacaacaattgtattagcattctcacctttaatyatyaaagcratgaaaggtatwcgttaa

SEQ ID NO: 1225 - DNA, 132 bp, Staphylococcus aureus
atgtttaatgtgatacttattaatgataagtataacgtaattrtcaaaatttatatagttatgtctacgttaaagttagaaaaattaactagcaaagacgaatttttaacagattttgattcaagtataaat

SEQ ID NO: 1226 - DNA, 441 bp, Staphylococcus aureus
atgataccagtagagtgggaaaaggtatatgtaattgcatatgtggacgatggaggtgggcaagttatattttattataccaagcccagaaatgatgagctgtattattattcgagtatcgttgaagattataatgttttagaagaaatctttgatgatttatggatggaactttatagatcatttaaaaaattaagaaatatatttaaagaagaaagtcttgaaccatggacatcatgtgaatttgactttacaaaagaagataaattaaaagtttcatttgattatattgattggaagaatacagaatttgatcaattaggccaagaaaactactataactatagaaaattcggaattataccagaaatggaatatgaaatggaagaggttaaacaaatcgagcaatatattaaagagcaagaagaagctgaacaatag

SEQ ID NO: 1227 - DNA, 501 bp, Staphylococcus aureus
atggcacatggccgtcaacaagatgaattacaagatataactttattaggaaatcaagacaatacktacaattttgactatcgtcctgatgtattagaatcgtttgataataagcatcaaggtcgtgactatttcgtaaaattcaactgtccagaattyacatcattatgtccrattactgggcaaccagattttgcaactatctatatttcwtatattccaaatgttaaaatggttgaatcaaaatckttgaaaytwtacttatttagtttcagaaatcacggtgatttycaygaagattgtatgaatatwattatgaatgayttgatagagcttatggayccacattatattgaagtytggggcaagttcacaccacgtggtggaatttctattgayccttatacaaactatggacgwccaaattctaaataygaamaaatggctgarcatcgtttratgaatcatgatttatatcccgaaaaaatagataatcgttaa

SEQ ID NO: 1228 - DNA, 522 bp, Staphylococcus aureus
ctgaacaatagrggmgataacatgaytttcgaagaaaaaytaartgaaatgtacaaygarattgcgaataaaattagtagcatgataccagtagaatgggaaaaggtatatacaatggcttatatagatgatggaggaggtgaagtattctttaattatactaaaakmracagcgatgaattgaattattacaccgatatacctaaggagtataacatttctgtgcaagtatttgatgatttatggatggatttatatgatttgtttgaggaattaagaaatttatttaaagaagaaggacatgaaccatggacatcatgcgaatttgattttacaagagacggcaaattgaatgtttcatttgattatattgattgggcgaattcagagtttgggccaatgggaagagaacattattatatgtataaaaaatttggaatttggcctgaaaaagaatatgccataaattgggttgaaaaaataaaagattatgttaaagagcaagaagaagctgaactatag

SEQ ID NO: 1229 - DNA, 501 bp, Staphylococcus aureus
atgaytttcgaagaaaaactaaatgaaatgtacaacgagattkcgaataaaattagtagcatgataccagtagaatgggaaaaggtatatacaatggcttatatagatgatggaggaggtgaagtattctttaattatactaaaccarmsagcgatgaattgaattattacaccgatatacctaaggagtataacatttctgtgcaagtatttgatgatttatggatggatttatatgatttgtttgaggaattaagaaatttatttaaagaagaaggactagaaccatggacatcatgcgaatttgattttacaagagaaggtacattgaatgtatcttttgattatattgattgggttaatacggagtttgatcaattaggccgtgaaaattattatatgtacaaaaaatttggggttataccagaaatggaatatgaaatgaaagaaattaaagaaatcgaacaatatattaaagagcaagatgaagctgaaatatag

SEQ ID NO: 1230 - DNA, 93 bp, Staphylococcus aureus
ttggaaaatggtttaacattcgtaatcgagtcttccaattatmagttgcatgatattcatccaaagagacatgtcgatagaaatgataattat

SEQ ID NO: 1231 - DNA, 144 bp, Staphylococcus aureus
ttgatgctaacagcaatttatttttccattttcactttttatatcagtcaatatagtttaaaattaaagacattatataatattgaaactgactataactataagattgttttgttattgaaagaagggraaacgcatgaatca

SEQ ID NO: 1232 - DNA, 246 bp, Staphylococcus aureus
gtgattattttggttcaagaagttgtagtagaaggagacattaatttaggtcaatttctaaaaacagaagggattattgaatctggtggtcaagcaaaatggttcttgcaagacgttgaagtattaattaatggagtgcgtgaaacacgtcgcggtaaaaagttagaacatcaagatcgtatagatatcccagaattacctgaagatgctggttctttcttaatcattcatcaaggtgaacaatga

SEQ ID NO: 1233 - DNA, 789 bp, Staphylococcus aureus
atgaactggaaactgacraagacacttttcattttcgtgtttattcttgtcaacatcgtrttagtatcgatttatgttaataaagtcaatcgctcacacattaatgaagtygagagtaacaatgaagttaattttcarcaagaagaaatyaaagtaccgrctagtatwttraataaatcagttaaaggyatamaattagarcaaattacrgggcgwtcaaaagactttagttctaaagctaarggcgattcggatttgaccacatcagatggtggaaaattattraatgcraacattagycaatcggtaaaggtcagtgacaataacttaaaagatttgaaagattatgttaacaarcgygtrttyaaaggtkcwgaatatcaattaagygarattarttcwgrttctgtaaaataygaacaaacgtatgatratttyccgattttraayaayagtaaagcgatgttraactttaatatagaagataayaaagcgrctagttataaacaatcaatgatggatgacattaagcccacagatggtgcagataagaagcatcaagtkattggwgtgagaaaagcaatcgaggcattatattataatcgttacttgaaaaaaggtgatgaagtcattaatgctagactyggttactaytcagtcgtgaaygaaacgaatgttcaattgttacaaccaaactgggaaattaaagtgaagcatgacggtaaggayaaaacgaatacttactatgtygaagcgacaaataatarccctaaaattattaatcattaa

SEQ ID NO: 1234 - DNA, 99 bp, Staphylococcus aureus
ttgatgaaatatccatatatgcttataaatataaatttatcaactataactaaaaatgataaaagatttaacgccactgatgaccgaattaatattatt

SEQ ID NO: 1235 - DNA, 315 bp, Staphylococcus aureus
atgcctaaagtttatggttcattaatcgatactgaaacacgctgtcgccattattttaccgaagaagatattattgcwattaaatttaaatgttgtaataaatactatccatgctataagtgccataatgagtttgaaaagcacgccattaagcgttggtctgagccttcatttaacgaaaaagcaatcttatgcggtgtatgcaaacaygaattaacaatcaatgaatatatgatggtwgagcgttgtccwaattgccaatctcgrtttaacaatcgctgyaaatatcactatcatatttatttygaaatttaa

SEQ ID NO: 1236 - DNA, 300 bp, Staphylococcus aureus
atgaaaagctataagtgtaaaggwtcattcttaatagatagtatggctggatttttgctwattggattgattacattactattgataccaatgatgaatcaaatgcaagcgagtataaaccataaactacaawcaattgatgcttctaaagtaattttgacgactgtatctaaaattaataaagaagaacttaagaagggggtaactatagggaartatgatattaagcaaagtgaccaacaaatttgtgctatttcaaaaaataccacttcttatcaaaagacatgtatacagtattaa

SEQ ID NO: 1237 - DNA, 933 bp, Staphylococcus aureus
atgaaaaaatatgatattgcagtcttagactttgaaactatgaatgaacatatgaacagcccttgcgaagttgctgtatctttaattaaggatttatcaatagtaaaagtttattcatcttatattaatcctcctaataatagatataacttgaaaaacgctaaaatacataaaatacctgaagatgtcatattaaaagcacctaaatatccagatatttaccaagaaattctctatcttttaaaagaatcacatttaattattgctcataatgcactttttgatatttcagtattaaaaaatactaataattattatgacttacctgttccaaacttcatgtatgtcgatagtataaatatctttagaagcttccacgcaatctctagttttaaattagaaaatttgtgtagcttatatgatatcgataaagaaaaattacattctgctaaatttgacgtgctagctttatcgaagatgttgatatcactcgctaaaaacaatmagcattatagtgtattaaaattaatacattatatgcctaagcaatacattagatttagcaaatattctaactctccaactaaacttttcgattcaggatttcaaaaaattcatatgaaaatatctgagattaataaaatagaagtggaaagtgtaatccctattttaaaagataaaaatgttgtttttacaggtaattttgacactgaaaaacaagatttaatgatattaactagaaagaaaggagcttatatcagaagtgacgtaactgcaaaaacagatattttagtcgaaggtgttcaagatgataaatataaagatgtgaacggactagtttcaaaacaacgaaaagctcgagaatatgttggaaatggtgcaaaaattcaatttttaaatgaagaagacttaataaatttaataaaggaataa

SEQ ID NO: 1238 - DNA, 342 bp, Staphylococcus aureus
atgatcaaaaaaatttttacaaaaaaacatgtattcttagttatagaagatgaaaaccataatcacagygatgctgtttttggaaaaagtatattactttcaatttacgtcggtgtgaataaaaagactaattctaaatcagggaaatttatataccttgacagatctaaaagaatcgttagacaatctgatatcaccaaaatagaatcagctaacgaaaatgatgtagatttttataatttactgaagaaagaaaaggaaattgtttattccaaaaatatagtagataaatacaatttagcgaactatataatttactacgaagttagtactaaagaataa

SEQ ID NO: 1239 - DNA, 1206 bp, Staphylococcus aureus
atgtggwttgaaaaatttaaaaayaaraayaaygaaackaartayagataytacgagaartayaaagatccrtayacagataaatggaarcgygtaagtgttgtsttgaayaagaatacaaaacaatcwcaaaaagaagcaatgtttcgtttagaagaaaaaataaaagaaaaactraacaacaagtcgtcaagcgaattaaaaactttgacttttcacgcgctattagatgaatggcttgaatatcatataaaaacatcaggttcaaagttgactactcttaataatataaaaataagaattaraaacattaaacgatacwgctctgagaacttgcttttaaacaaactwgatacaaaatatatgcagatatttattaataaattatcagatatctattctcaaaatcaagtaacccgtcaactcggagatatgaaaggagctattaaatatgcagttaaattttacaattatccaaatgaatatttgttractaatgtcaaaattcctaaaagaagaaaaacaatagaggatatcgaaaaagatgaatctaaaatgtacaactatttagaaatgaaccaagtcctacagatacgtgatcatatactaaatgataataagttacamaagcgaaatcgcattttaattgccagcatcttagaagtacaggctttaactggtatgcgcataggagaactacaagcactgcaggaaaaagatatagatttattaaacaaaactatyaatataacaggtacaattcaccgcattaaatacgagraaggattcggatacaaagacactacaaagactataagttcaaaaagaagtatcagcatcaattctagaaccgtagaaatttttaaaaagataatactggaaaacaaaatgttgaaaagatggaattcgagctatgttgacagagggttcatattcacaacaaaaaaagggaatcctttatgtaataatcaaatcgccggtgtgcttaagaaaactacaaaagctttaaatatgaataagaaagttaccacgcacacatttagacatacacacataactttattagtagaaatgaatgtttctttaaaagcaattatgaaaagggtaggacatgtagatgaaaaaacaaccattcgcatatatactcatgtaactgaaaaaatggatagagaactaactcaaaaactcgaaaacattccaagttag

SEQ ID NO: 1240 - DNA, 681 bp, Staphylococcus aureus
atgactactaaggaaaatatagacattcttcgaaagccaggtgcacaagccttaagtttagcatcattatttatgatacttttttcatgtctaactttcttttttggtttagattatgaaaggtttccaaattatttaaagataacgacaattatagaattaataattatcataattagtttacttcaatggattagatttatagatttcgaaaaggaaagcgcacagaaatataagaaaatatatgcccgatttttagttattataaatgtgctaactactatcaccgcagtatttgcaacatgtaacctttattattttgttgctgtacaaaatcattatgacctattcaattattggttgatgggtacgatttcaatcataattagttatttgttattagtaattggcggaatgttcacgttattaaaattacctaaagtaacaaaacgttggggtggtaaaactaaaacacatttcggtttattattaaccgcgttgagcgcatttatatatattgaaagaattatcgaatatatattggtgcccaatgtcgtagaatccaagtttgtcataatggtaagtatcattattattgcttgtacacaatttgtggcatttcaatttattatgcaatacagtagattctatatttttgaattaaacactgaagatgatgac

SEQ ID NO: 1241 - DNA, 924 bp, Staphylococcus aureus
gtgataaataaagacatctatcaagctttacaacaacttatcccaaatgaaaaaattaaagttgatgaacctttaaaacgatacacttatactaaracaggtggtaatgccgacttttayattacccctactaaaaatgwagaagtacaagcagttgttaaatatgcctatcaaaatgagattcctgttacatatttaggmaatggctcaaatattattatccgtgaaggtggtattcgyggyattgtaattagtttattatcactagatcatatcgawgtatctgatgatgcratwatagccggtagcggcgctgcaattattgatgtctcacgtgttgctcktgattacgcacttactggccttgaatttgcatgtggtattccaggttcaatyggtggtgcwgtgtatatgaatgctggcgcttatggtggcgaagttaaagattgtatagactatgcgctttgcgtaaacgaacaaggctcgttarttaaacttacaacaaaagaattagarttagattatcgtaatagcattattcaaaaagaacacttagttgtattagaagctgcatttactttagctcctggtaaaatgactgaaatacaagctaaaatggatgatttaacagaacgtagagaatctaaacaacctttagagtayccttcatgtggtagtgtattccaragaccgcctggtcattttgcaggtaaattgatacaagattctaatttgcaaggtcaccgtattggcggcgttgaagtytcaacyaaacacgctggttttatggtaaatgtagacaatggaactgctacagattatgaaaaccttattcattatgtacaaaagaccgtcaaagaaaaatttggcattgaattaaatcgtgaagttcgcattattggtgaacatccaaaggaatcgtaa

SEQ ID NO: 1242 - DNA, 519 bp, Staphylococcus aureus
atgtattcaaatgttcaaccattcattaatagtgatttaactaattgttttcaatcacaatacactgaaattgaatcattattattcaacctcttagacagcccagtaaaatatacaaaacatattggcggtacgmatcattttaaatattcaacagagccaattttagatattttagtaggtgtagaaaatttgcatgatattacatccttagatgaaaaacgcttaaattatgtagggttttatcgyttgcatcataaatatamtaaraargttatgatggcgaagtttaacaattttcatgaactaaaacaacaggtgcgtctacatatcattcaaatgaatacccaaacatttgaatcttatcttgcacttgatyryctcttatcractaatgatgakatygctttrcaattcmatacwaaaaarcaycaaatattgcaacatagcttaacaattagacaatatgagatgcaaaagcaacaatactttgaaaaactatgtaaaaaatacttataa

SEQ ID NO: 1243 - DNA, 120 bp, Staphylococcus aureus
atgtattcagctggtttagttaatttccacttatacttcggtttaatcatatatatttacgcctcatttccaaaagacattatatctaaaattactttaaataaaaagcacttatctaaa

SEQ ID NO: 1244 - DNA, 1227 bp, Staphylococcus aureus
atgaagaaccaattgatagatagattaacaagatatacgacaattgatacgcaatctgatccaaaatctacaacaacaccttcaactgaaaagcaatgggatttgttacatttattagaaaaagaattacaacaattaggattgccaactgatttagatgaaaatggctacttatttgctacattagaaagtaacatcgatgycgaygtcccaacwgttggwtttttggckcatgttgatacatcacctgatttcaatgcttcaaatgttaaaccgcaaattattgaaaactatgatggyaagccatacaaactaggcaatactaaacgtgtcttagatcctaaagtatttccagaacttaacagtttagttggtcatacattaatggtaactgatggtacatcgttactaggtgcagacgataaagcgggtattgtggaaattatggaagctatttgttatttacaagaacatccagaaattaaacatggtaccattcgcattggatttacaccagacgaagaaatcggtcgtggtccacataaatttgatgttgaccgcttcaatgctgattttgcttatactatggatggtagtcaatatggagaattacaatatgaaagctttaacgctgctgaagcggttattacatgccacggtgtraatgttcatcctggttcagctaaaaatgcaatggtaaacgcaatacgtttaggtgaacaattcgatagtttgctacctgatagtgaagttccggagcgaacagaaggataygaaggcttttaycacttaatgaactttgaaggaactgttgaaaaagcaactttgcaatacattattcgtgatcatgataaaaaacaattcgaattgcgtaagaaacgtattttagaaatacgtgacgatatcaatgcccattttgaaaattatccagttaaagttgatatatcggatcaatatttcaatatggcagaaaaaatattaccattgcctcatattattgatatacctaaacgtgtctttgcyaaattagatattccagcaaacactgaacctattcgyggtggtacagatggttcacaattgtcatttatgggrttaccaactccaaacatctttacaggttgcggtaacttccacggcccatatgaatatgcatccattgatgtyatggaaaaagcagtacaagtaatcattggaattgtagaagataycgctgaaaatmactaa

SEQ ID NO: 1245 - DNA, 495 bp, Staphylococcus aureus
atgctattttatttatttcattttacaatcagctttatatcaacagtacttttctctatcattttcaatgcacccaaacgyctcttagtagcatgtggatttgtrggtgccattgcatggacgatttaccaattaacggtagatttagagtttggaaaagttggcgcttcatttttgggaagcttaattttaggcttaatgagtcatactatgagycgcagwtataaacgaccggtaattatattcatagtrccaggcattataccattagtacctggtggtgcagcttatcaagcgactcgttttttagtatcraatgattatacaagtgctgtaaatacatttttagaagttacactgatttcaggtgcgattgctttcggtatattagtttctgaaattctatattacctrtacacacgtatcaaacaactgtatggtaaaatcaaaggtaagacatataaaaaatcttacaacatgaataatagagtttaa

SEQ ID NO: 1246 - DNA, 762 bp, Staphylococcus aureus
atgccagattcaatcacaattatagatgaaaacaaagtgattgatgttgtattaattgcaggtagaattttacttgaatcaggtgctgaaacatatcgagttgaagatacaatgaaccgtatcgcacatagttatggtcttcataatacatatagttttgtcagttcaactgcaattattttttcattaaaygatcgwacaagtacaagattaattcgtgtacaagagcgtacaacagatttagagaaaatcgctttaacgaatagtctttcacgtaaaatatcaaataaagaactcacaattgatgaagctaaatctgaatttattcatttacagcatgcatcattacaatattcttttttaacgaatttctttgcagctgccattgcatgtggcttcttcctrttyatgtttggtggtgtcgcatcagattgttggattgcagtcattgctggyggatccgcatttttaacattcagctttgtgcaacgctatatacaaattaaatttttctcagagtttgttgcagcygctgtggtcatatccattgcagccacatttactaaattaggyattgcaaccaatcaagatatcattactatagccagtgtcatgccacttgtccctggtatattaattaccaatgccattcgagatttattagcgggtgaattacttgcaggtatgtctcghggtgttgaagctgcattaacagcattcgcaatcggtgctggtgtcgcaatcgttttattaatcatttaa

SEQ ID NO: 1247 - DNA, 1071 bp, Staphylococcus aureus
atgttcgaagcatttatatacaatatatctgttatagtcgctggaatctatttattccatcgcttacagtattcagaaaacaaacgtatggttttttctaaggcwtatgtcactgtwttaatgacaatcgtatcattattattatctgtctaccctatcccttatcgtgaagattatttaattcacttaacattcgttcctttattgtttttaggtagatttacaaatatggtctatacattatctgccacagtaattgtagcaattgttgaaattgtagtatttaacaactcgattatgtacggtgttacgttgattgttattgcygcagtaacaagtgctattggaccatttttaaaacaaaatgatgtgctatcattrttaatacttaatgttgttacaataatcattttatttggtgtcgcrttagtgagtcctatttayacactatcggaagttatcattttaataccaatttcattaattatcactttagcttcagcgataacatttgtcgatatttggcatttcttctcactcgtaaatcgttatgaaaacgaagataaatatgattacttaacaggcttaggtaatgtaaaagaatttgatagacatttaaatgaaatttcacgaaaagctgaaaaagaacatcaaagtatcgcwttattattaatcgatatcgatggatttaaagatgtcaatgatacctactcacacaaatcaggtgatgctgtattaaaacaaatgtctcaattacttaaaaactatgtgccgaatcaatttaaaatttttagaaatggtggcgaagagttctcagttgtcattcacaaytattcacttgatcaaagtgttaaattrgctgaaaatattcgttcgggtgttgaaaaatcatcattccatttaccaaacaaagaagttattaaattgtcagtgtctatcggtgttggwtatttaacagatgacgatccaaaatcacagcgtaaagtgtttaaagatgcagacgatatggtgcatgtagccaaaaatcaaggscgaaayaaagtaatgtttaaccctatyatcaatytataa

SEQ ID NO: 1248 - DNA, 642 bp, Staphylococcus aureus
atgacacaaaatatcattactgttaaaaaagaacacattattgaaaatgtgattagtaaatcaagattcattgctcatatcaaacctgttcaaaatgaagatgaagctaaagcatttattgctgcaataaaaaaagaacataaagatgccactcataattgttctgcatatactattggacctgaaatgaatattcaaaaagcgaatgatgayggtgaaccgacaggaactgccggtgtcccaatgttagacatattaaaaaagctcgatgttcataatgcgtgtgtcgtagtaacaagatattttggtggtattaaattaggtggtggcggtttaattcgcgcctatagcggtgctgtyagagacgtcatttatgatrtcggrcgtgtcgaactacgagaagcagtaccatgtatagtaacactgaattatgatcaaactggtaaatttgaatatgaattagcytcaactcattttatgttaagaaaccaaacttacactgataaggtaagctactatatcgatgtcgttaaaagtgactatgaagcgtttattaaytttttaaatcaaatgactgcwggaaatttcgatttgactgaagaaactccaaagcagttacctttcgatataccaactgaataa

SEQ ID NO: 1249 - DNA, 903 bp, Staphylococcus aureus
atgaaacaatacttaattactggtgggactggtatggttggatctcaattagttaatgaaatyaaaaaatcagattcacatatcacgatattaacgcgacacgaccaaatttcaaatrataagaaaatttcatatgtcaactgggctaaatctgggtgggaacacaaagttcctcaaaatatcgatgtggtcatcaacttagcaggtgctacaytgaataaacgatggacaccggaatataaacaaacgctaatgctaagtagaattcaatctacgcaagctttatatgaattgtttaaatcacgtaataaagcacctaaagytttatttaatgctagygccactggttactatcctcctgatttatttatgagttacacagaagtttataaaactttaccwtttgatttcttatcagatattgtgtatcaatgggaacgtttcgcacaacaatttgaacaattaggtacrcgagttgtcatcggtcgtttcggtatrattttatcgaatgaaggcggtgcgttacaaacaatgaaactaccatacraatattacattggtggtarattaggttctggtcaacaatggtattcatggattcatatcaatgatttaattcaagctattttatttttaataaataacgagtcagctagtggtccgtttaatttaactgcacctatacctgarcgtcaaaatttatttggctacactttagcaagagctatgcataagccycatgaaacttgggyaccaagtcttgcaatgcgtctcatacttggtcaaatgtcaacagtagtattggatactcaaaaagtattacctaataaaattcaagcattgggattccaatttaaatatagtaatttaaaaatggcacttgaagatttaatyaaagrataa

SEQ ID NO: 1250 - DNA, 111 bp, Staphylococcus aureus
gtgcaaaatcaccctcgttttacatttgattcaaagaagaaggtaaaagataagattatttgcaacttaaaaagtcaattagcttatcggtatccatacatcatggataaa

SEQ ID NO: 1251 - DNA, 801 bp, Staphylococcus aureus
atgagccgcttgatacgcatgagtgtattagcaagtggtagtacaggtaacgccacttttgtagaaaatgaaaaaggtagtctattagttgatgttggtttgactggmaagaaaatggaagaattgtttagtcaaattgaccgtaatattcaagatttaaatggtattttagtaacccatgaacatattgaycatattaaaggwttaggtgttttrgcgcgtaaatatcaattgccaatttatgcgaatgaaaaracttggcargcwattgaaaagaaagatagtcgcatccctatggatcagaaattcatttttaatccttatgaaacraaatctattgcaggtttcgatgttgaatcgtttaacgtgtcacatgatgcratagatccgcaattttatattttccataataactataagaagtttacgattttaacggatacgggwtaygtgtckgatcgtatgaaaggtatgatacgtggcagcgatgcgtttatttttgaragtaatcatgacgtcgatatgttgagaatgtgtcgttatccatggaagacgaaacaacgtattttaggcgatatgggwcatgtatctaatgaggatgcggsycatgcratgacrgaygtgattacaggyaacacgaaacgtatttacctatcrcatttatcacaagayaataayatgaaagatttggcgcgtatgagtgttggycaagtattgaacgaacacgatattgatacggaaaaagaagtattgctatgtgatacggataaagctattccaacgccaatatatacaatataa

SEQ ID NO: 1252 - DNA, 756 bp, Staphylococcus aureus
atggatattgttaatatagttatcatgttactcattggggtattcggtgggttcatatctggtctagtaggcgtaggtggtgctatcattatttatccagctattttattattaccaccattattcggagcccctgcatatagcgcatatatcgcatcaggtcttacttctagccaagtctttttcagtacattaagtggctcattaaaagctcgaaaaaaaacagagttctcrccacaattagttctttatatgggtggcggcatgattatagggagtatgttaggtgcatttctagcaaatttatttgatgctacatttgtaaatacggtatatatcattattgctttacttgcattaacattaatgtttattaaagtgaaacctagttccgaaaagtcttcatttaataaatatttattagttatcattggccttttcattggtattatttcaggtatagtaggtgcaggtggtgccttcattattattcctatattattggttttattcaaattaccaatgaatactgtagtcgctaatagtatagtaattgcttttatatcttcaattggtgcttttgtcatcaaacttattcaaggttatatccctttatatgacgccttattccttataatagggagtattatatttgctccaatagggttaaaattaagtaaaaaagtccctaacataatacaaaaatggattatcagtattttaatcgtttttgctatarttcaactcattttataa

SEQ ID NO: 1253 - DNA, 391 bp, Staphylococcus aureus
atgaaaagaatattggtagtatttttaatgttagcaattrtattrgcaggttgttctaataaaggtgaaaagtatcaaaaagatattgataaagtgtacaaagaacagaatcaaatgaataaaattgcctcgaaagtacaaaacactattaaaacagacattaaacaagaagacagtaatacacatgtytataaaratggtaaagtcattgttattggtattcaattrtataaagatcgtgaaaaaatgtattatttcgcatatgaaataaaagatggtaaggcagagattaatagagaaatagacccaattaagtatatgaaagaccataaagcagattatgaagatgaaaatgtagaagtggaaaaarattaacgtatgctttctttaa

SEQ ID NO: 1254 - DNA, 324 bp, Staphylococcus aureus
atgaataatgaagaattagaaatgagattgttattaatgaaacaatcaatagaacaattacaagaagaactagcgcctaacttaaaaactagagatttagtgttattaagatatatgtattcatataaagaaattaatatgctagattcttacttgttccaattggctacaaataaagagcaaataacaaaaaaacaatttaaaacaaaattggaaaacattagagaagtaccagaaatacctattagacaagttaatgatatattagaaggttataaaaatagtgagttatatgttgagttgataaatagcatcctaaaataa

SEQ ID NO: 1255 - DNA, 105 bp, Staphylococcus aureus
ctgtttaaaaataccacagaaaaagctgtagatagtgttggaacgatagttggtgaaggtacaaaaagtattggggatcatttaaaactaatgaaacgggagtgg

SEQ ID NO: 1256 - DNA, 117 bp, Staphylococcus aureus
atggcagaacaatcaaaacagaaacaagctaatgaacaacaaaaggcccagaacttattcgcacgttggagacaacttcagaattcgaacagtgaatcctcgaacgatacaaacaaa

SEQ ID NO: 1257 - DNA, 399 bp, Staphylococcus aureus
atggaaaaatcgatcaaaataatgacaataataggaattgttrttcarggtttagcaacggtatttagtttactattgatggttttagcagcatcaggtgtaatgactacagatgtgtcaacaacagttaatggtgaggttgacccagttgatgcagaaacagcagcagcaattttcactgtattattcttatycctattcatatttggaatcatttcaattattttaggtgcaatcggtatgtttaaagcatctaaaaacaaaaaaatgagtggwatattgttgattattggagctgtaataagtggtaacataattacatttgctttatggttartcagtggtattaaactmcttactaataacaagcctaaagatgaaataagcgacttatcataa

SEQ ID NO: 1258 - DNA, 144 bp, Staphylococcus aureus
ttgaataatgcattaaaacaagaagaggctacatggggaaatgtacaaggtcaagtttcacaagcattgatgggaactggtattaaagattctactgcaagaagcatagggttttgggtttcccaagttggtcaagcattaata

SEQ ID NO: 1259 - DNA, 891 bp, Staphylococcus aureus
atgaataaaatttcaaagtatattgcaatagcatcattatcggtagcggttacagtttcrgcaccacaaacgacaaattctacagcgtttgccaaaagttctgctgaagttcaacaaacrcaacaagcttctataccagcatcacaaaaggygaatcttggtaatcaaaatattatggcagtggcttggtatcaaaattcagctgaagcaaaagcattatatttacaaggttataacagtgcaaagwywcarytagataaagagattaaaaagaataarggtaaacataagttagctattgctttggatttagatgaaacagttttagataattctccatatcaaggctatgcatcaatacayaataaacctttcccagaaggttggcatgaatgggtacaagctgctaaagctaaacctgtctatggcgcaaaagaattcttgaaatatgctgacaaaaaagrtgtcgatatctactatatttctgatagagataaagaaaaagatttaaaggcaacacaaaagaacttaaaacaacaaggtatccctcaagctaagaagagtcatattttactaaaaggtaaagatgataagagtaaagaatcacgcagacaaatrgttcaaaaggatcataaacttgtcatgctatttggagataatttattagactttacagatccaaaagaagctacagctgaatctcgtgaagcattaattgaaaaacataaagacgatttcggtaagaaatatatcattttccctaacccaatgtatggtagttgggaagctacratttacaacaataactataaagcaagtgacaaagcaaaagataaattacgtaaaaatgctattaagcaattcgatcctaaaacaggcgaarttaaataa

SEQ ID NO: 1260 - DNA, 729 bp, Staphylococcus aureus
atgaaaaaagtaatggggatattattagcaagtacacttatcttaggtgcttgtggacatcatcaagatagtgcaaaaaaagagagcrctagtcacaaaaagaaagaaaatgacaatgaagaattaaatgaagaacttaaagaatttaaaagcaaaaaaaatatggatataaaaattaaaggcgatactattgttagtgacaaatttgaagctaaaataaaagaaccgtttatcatcaatgaaaaagatgagaaaaagaaatatatcgcttttaaaatggaaattactgctaaaaaagacgataaagayttaaatccatcttctatttctcatgactatattaatatcactcaagatgataaaaatacagtaaataaattaagagatggttatcttttaagtgataaaaawtataaagattggacagaacataaccaagatcaaattaaaaaaggcaaaactgcacaagccatgtttatctatgagttaagaggtgatggaaayattaatttaaatgtccataaatactcagaagataaaacagttgattctaaatcattcaaatttagtaaacttaaaaccgargatttttctcatagagcggaaacaagrgaagaagyagaaaagaaagaaaaagaatttgaagaagagtacaaaaaagaacaagaacgagagaaagaaaaagaaaagcaaaaagatgacgaccacagtrgtttagatgaagtataa

SEQ ID NO: 1261 - DNA, 1050 bp, Staphylococcus aureus
atgtttttagcttggaatgaaatacggcgcaamaaattgaagtttggactaattattggtgtgttaacgatgattagttacttgctatttttattatctggattggcgaatggtcttatcaatatgaataaagaaggyattgataagtggcaagcagakgccattgttctaaataaagatgccaatcaaactgtgcaacaatctgtttttaacaagaaagatattgaaaataaatacaagaarcaagctacwttgaagcaaacaggrgaaatwgtktctaatggycatcaaaaagacaatgtyttagtgttcggtgttgaaaagtcatcatttttagttccgagtttaatagaagggcataaagcgactaaagataatgaagtgttagctgatgaaacrcttaaaaataaaggatttaaaattggygacacattatcactatctcaatcagatgaaaaattgcatatcgtaggttttacagaaagtgcaaaatataatgcgtcaycagtcattttcacgaatgacgctaccattgccaaratcaatcctagattgactggagataaaattaatgcagttgttgtacgtgatacaaattggaaagacaaaaaattaaaccaagagcttgaagcggtaagtattaatgactttattgaaaatttaccaggttataaaccacagaacttaacattaaactttatgatttcattcttatttgtcatttcagctacagttataggyatwttcytatatgtcatgacattacaaaaracragtttatttggcatattaaargctcaaggatttacgaatggctatttrgcgaaygtrgtwatttcrcaracgstcatattagcaytatttggtacggcatttggcttactgttaacaggcgttacaggtgcatttttacctgatgcagtacctgtcaaattcgatgtactaacattrctcgtatttgcaattgtgttaatgattgtctctgtattaggaagtttattctccattttaacaattagaaaaatagatccgttaaaggcgattgggtag

SEQ ID NO: 1262 - DNA, 90 bp, Staphylococcus aureus
ttgcaacaatacataggatcattattacaagaattatttaatatcatcttagaatctcacaaaatatcaactttgtttaattactcaaaa

SEQ ID NO: 1263 - DNA, 678 bp, Staphylococcus aureus
atgttgaaatttgaaaatgtaacaaagtcatttaaagatgggaatcgtaacattgaagcggttaaagatacaaattttgagataaataaaggtgatattrtagcrttrgttggaccttctggctctggtaaaagtacatttctaactatggcaggtgctttacaaacrccgacatctgggcacattttaatcaataaccaagatattacgacaatgaagcaaaaagcattggcaaaagttagaatgtctgarataggttttattttacaagctacaaaycttgtrccatttttaacggtaaagcaacaatttacattattgaaaaagaaaaataagaatgttatgtctaatgaagactatcagcaacttatgtcacaattaggkctaacwtcattgcttaataagttaccttcagaaatttcaggtggtcagaaacaacgtgtggcgatagcyaaagcgttatatacgaatccgtcgattattttagcggatgaacctaccgcggcgttagatactgaaaatgcgattgaagtcattaaaattctacgtgatcaagccaaamaaagaaagaaagcatgtattattgttacacatgatgaacgacttaaagcatattgtgatcgytcatatcatatgaaagatggcgtccttaatcttgaaaatgaaacagtagaatag

SEQ ID NO: 1264 - DNA, 219 bp, Staphylococcus aureus
atgagtgaatggcatattaataatcaatctacaaaaccttttttaatacaacaagcggaaaagcaattgtctattgttaaaccrttgcctaatggtagcttccaaatactcacagaaataratttggakaatggcaatrttagtaacatcgatcattctytacttgtttcagtagaccccaaagcattagaaataagtatatttgacgctgtaaattaa

SEQ ID NO: 1265 - DNA, 1032 bp, Staphylococcus aureus
atggatttawtrataggtactttatttttatttttggtcttagtgatttttacattatttacatataaagcrcctaatggtatgcgygccatgggagcattagcwaatgcagcaatcgcaacatttttagtrgaagcatttaataaatatgttggtggygaagtrttcggtattaaatttttagaagagctaggagacgctgcgggaggtctaggtggtgtcgctgccgctggattaacagcattagctatcggtgtrtcaccagtatatgcattagttatagcagccgcgtgcggtggtatggatttattaccaggtttctttgcgggttatatgattggatatgtgatgaaatatacagagaaatatgtgccggatggtgtcgacttaattggatcgattgtcatcttagcgccattagctcgtcttattgcagtattattaacgccagtagtgaatagtacattgattcgaatwggtgatattatccaaagtagtacgaatacgaatccaattatcatgggtatcattttaggtggtattatyacggttgtcggyacagcgccattgagttcaatggcattgacagcattattaggtttaacgggtgtacctatggctattggtgccatggcagcatttagttcggcatttatgaatgggacgctattccatcgcttaaaattaggtgatcgtaagtctacgattgcagtaagtattgaacctttatcacaagcagatattgtatcagccaatccaattccaatctatattacaaatttctttggtggtgcgattgctggtttaattattgctatgtcaggtttaattaacgatgcgacaggtacagctacaccgattgcaggatttttagtwatgtttggatttaatcatccraygacwattgtratttatggtgtagtaatggcgattgtaggtgcgcttgcaggttatcttggttcaatygtatttaaaaaatatccaattgttactaagcaagacatgattaatcgaggtgcagtwgacgcatag

SEQ ID NO: 1266 - DNA, 285 bp, Staphylococcus aureus
ttgaatgaactaactaaagaacaaaagtatacaatagctaaattttacaaattatatattgaacgttcgaataawggagaaacagaaacagtcgctaacttttttggcgatgctaaagatgcacgtgaaaactatttttgygatcgtgattatcaagacttcttaactaactgccaaattttaattcaaaacaaatacttaactggtgaarttttggacgataacatttacaatatttctattttaaacaagacatttattgaattygaacaaaattttggttga

SEQ ID NO: 1267 - DNA, 1119 bp, Staphylococcus aureus
atgagcgattctgagaaagaaattttaaaaagaattaaagataatccgtttatttcacaacgtgaacttgctgaggcaattggattatctagacccagcgtagcaaacattatttcaggattaatacaaaaggaatatgttatgggaaaggcatatgttttaaatgaagattatcctattgtttgtattggcgcagcgaatgtagatcgtaagttttatgtgcataaaratttagttgcagaaacatcaaatcctgtaacgtcaacacgctctattggtggcgtagcaagaaatattgctgagaacttaggtaggcttggcgaaacggtcgcttttttatctgctagtggacaagatagtgaatgggaaatgattaaacgattgtccacaccatttatgaatttggatcatgttcaacaatttgaaaatgcgagtacaggttcatatacagctttaattagtaaagaaggcgacatgacatatggcttagcagatatggaagtgtttgactacattacgcctgaatttttaattaagcgttcacacttattgaaaaaggctaagtgcattattgtmgatttgaatttaggcaaagaggcattaaacttcttatgtgcctataccacgaaacatcaaatcaaattagttatcaccacggtttcttcyccaaaaatgaaaaatatgcctgattcattacatgctattgattggattatcacgaataaagatgaaacagaaacatacttaaatttaaaaatakaatctactgatgatttaaaaatagctgctaaacgctggaatgatttaggtgttaaaaatgttattgtgacaaatggcgtgaaagaactcatttatcgaagtggtgaggaagaaatcatyaagtcagttatgccatcaaatagtgtgaaagatgttacaggtgcaggygattcattctgtgctgcagtagtrtatagctggttaaatgggatgtctactgaagatatattaattgctggtatggttaaygcaaagaaaacgatagaaacgaaatatacagttaggcaaaacctagatcaacagcaactttatcacgatatggaggattataaaaatggcaaatttacaaaagtatattga

SEQ ID NO: 1268 - DNA, 570 bp, Staphylococcus aureus
gtgaactatattaaacgaacgwtaattttacttatattattcgttgtcgtatccccwataaactcaccaaaaacaattgcagataataagtattcagaaattcaagatgacaaattccaattacaacctggtgatattattrttacaaaaggccctgtcatgtggggattttttggtcattgtagtatcgcgattgatgataaaacgattttrcaaattgaggggcctggcgacaaaccaactacacaatccttcgaatcttttaaatataattatgcaagtggcaaaaatgattggatgaaagtttatcgttgcagctatcctggtgcaggtaaaaaagcggctgamtgggttaagaaaaactatgaraatacaaatcatcgttatctagttacattaaatttgaacagcaaaaaatttacgtattgtactaaaattatctaycaagcttataaatttggtgtaagtgaaaaatcagttaaaagttatggaytacatattatttcaccctatgcaattaaagataattttatagatccatayaaactaagrcttgtwaaagcttattaa

SEQ ID NO: 1269 - DNA, 162 bp, Staphylococcus aureus
ttggttgctaatgcaccaacagcaaaagagcccctaattaataaattaaaaggggacaaaggaatacagttggttgctaatgcaccaacwgcaaaagagcccctaattaataaattaaaaggggacaaaggaatacagttggatgctaacgcaccaactgca

SEQ ID NO: 1270 - DNA, 363 bp, Staphylococcus aureus
ttgaattattttaattctacagtagctccaacttcttctaattgttctttaagtttttcagcttcttctttaggtaaagcttctttgattactttaggagctccgtctactaattctttagcatcttttaatcctaaaccagttgcttctttaacagctttaacaactttgattttagatgaaccagctgaagttaactcaacgtcaaattcagttttttctgctgcagcgtcagcgccaccagctgcacctgctactgctactggagcagctgcagttacaccaaattcttcttcaattgcttttactaagtcgtttaattctaatactgacatttctttaatcgyttcaatgatttgttca

SEQ ID NO: 1271 - DNA, 924 bp, Staphylococcus aureus
atggcaaatttacaaaagtatattgagtattctcgagaagttcagcaagcackggagaacaatcaaccgattgtagcattagaatcaacaattatwtcgcatggtatgccgtacccacaaaatgttgaaatggyaacaacagtagagcaaattatcaggaataatggtgccattccagcaaccatagccattatagatggcaaaattaaaattggtttagaaagcgaagatttagaaatactggcaactagtaaagacgttgctaaagtatctagaagggatttagcagaagttrttgcgatgaagygtrttggtgctactactgtagcgacgacgatgatatgtgctgcaatggctggtattcaattttttgttacwggaggtattgggggygtccataaaggtgcagaacatacgatggacatttcagcagacttagaagaaytgtctaaaacaaatgtcactgttatctgtgcaggtgccaaatcaattttagacttacctaagacgatggartatttagaaacaaaaggcgttccagttattggatatcaaacgaatgaattgccagcattcttcactcgcgaaagcggtgttaagttaacaagttcggttgaaacgccagaacgacttgctgacattcatttaacaaaacagcagttaaatcttgaaggtggcattgttgttgctaatccaattccatatgagcatgccttatcaaaagcatatattgaggcaatcataaatgaagctgttgttgaagcsgaaaatcaaggtattaaaggtaaggacgccacaccgttcttgttagggaaaattgtagaaaaaacgaatggtaaaagtttagcagcaaatataaaacttgttgaaaacaatgcggygttgggtgctaaaattgctgtcgctgttaataaattattgtag

SEQ ID NO: 1272 - DNA, 261 bp, Staphylococcus aureus
atgaataacattttgttaaatgctatcaatatagttattactaccacttttgttatctttaatattttaatcacatataataaagatttagatgatttatgttggctcctgcctggtattatcatttgtggtgtgatactcatcgtatcctttaccattgcaatgataactaaaaactggttaagtgaaatattattttttataaatatcgtactcgttctctattacatttatcctattttttatagttttataggttaa

SEQ ID NO: 1273 - DNA, 1221 bp, Staphylococcus aureus
atgaatattttattcgctatcacagggatagcatttgcactatttgttgcgtttttattcagttwtgatcgtaaaaamatagacttcaaaaagacgttaataatgatatttattcaagtgttgatygtgwtatttatgatgaacacaacgattggtttracaatyttaactgcaytaggytcwttttttgaagggytaataaatrttagtaaagcaggyataaaytttgtttttggagatatacaaaataaaaatggctttacrttctttttaaaygtrttrctgccattagtkttyatttctgtattaataggcatytttaattatattaaggtattaccatttattatcaaatatgtaggtatygctattaataaaataackagaatggggcgyttagaaagttaytttgctatttcracagcratgtttggrcarccagaagtrtatttaacwataaaagatattatwccrarrttrtctagagcraaattatatacaattgcgacrtctggtatgagtgctgttagtatgrcaatgytrggttcatatatgcagatgattgarccyaagttcgtagttacagcwgtaatgttaaatatttttagtgcgcttatcatcgcyagtgtaatcaatccctataaatctgatgatastgatgttgarattgataayttaackaaatcmacrgaaackaaawcaktgaatggaaaaacaggraaacctaagaaagttgccttyttccaaatgatwggtgatagtgcgatggatggrtttaaaatcgctgttgtagtagccgtaatgttgttagcatttatttcattaatggaagcaattaatatcatgtttggtagtgttggtttgaactttaaacagcttattggctatgtgtttgcaccaatcgcattcttaatggggattccatggagcgaagctgttccagctggctctttaatggcgacyaaattaattacaaatgagtttgtagcaatgcttgattttaaaaatgtcctgggtgatgtatcwgctcgaacacaaggtatcatttcagtttacttagtaagcttcgctaattttggtacggttggtatcatcgtaggttcaattaaaggcattagtgataaacaaggagaaaaagttkcatcctttgcaatgaggytgytacttggttcaactctagcttcwatcatttcaggatcaatcattggcytagtattrtaa

SEQ ID NO: 1274 - DNA, 117 bp, Staphylococcus aureus
atgagtacaaatgacgctagtaacataatttcaaacatgacgtataaattaaataaatctgatgttagaaaagagcctatcacgccaacacttaaaaataatatgaacgatggcaag

SEQ ID NO: 1275 - DNA, 324 bp, Staphylococcus aureus
ttgttatttccattaaacacatgccccccaccaataaagcgtgatattgaaacagaacttacaaaagatataatggcaatgagcatgattgaatctaagaaagaaacggtgcccataagtacacttaacacacccacaattgacattacgacagcacttgttgtatcaaatgtaacgacacgatctgctgttgtaggtcccttgattaatctaaataaacagatgattaatgcaattccaaaaataatgagtgaactaataatcataatatgtgttattgtttgtatcatcgcgacacctccaatattaagtcttcataatgct

SEQ ID NO: 1276 - DNA, 903 bp, Staphylococcus aureus
atgaaaatktttttcaaaatcaatagaaatggagtgagtaaggtgtattacatcgcaatcgatattggaggcactcaaattaaatcggcagttattgataagcaattgaatatgtttgactatcaacaaataycaacgccggacaacaaaagtgagcttattactgacaaagtatatgagattgtaacaggatatatgaagcaatatcakttgatccaacctgtcataggtatttcatcagcaggcgttgttgatgaacaaaaaggcgaaattgkatacgcagggccaaccattccgaattataaaggtactaattttaagcgattattaaaatcactgtctccttatgtcaaagtaaaaaatgatgtaaacgctgcattactaggmgaattgaaattacatcaatatcaagcagaacggatcttttgtatgacgcttggtacaggcattggkggtgcgtacaaraataatcaaggycatattgataatggtgarcttcataaggcaaatgaagttgggtatttattgtatcgtccaactgaaaatacaacgtttgagcaacgtgctgcaacgagtgcattgaaaaagcgcatgattgmcggaggatttacgagaagcacacatgtgccagtattgtttgaagcagctgaagaaggtgatgatattgcaaaacaaatattgaatgagtgggcagaagatgtagcagaagggattgcccaaatacargtcatgtatgatccagggcttatattaattggkggcggtatatctgaacaaggagayaatctcattaaatatatcgagccgaaagttgcacactatttaccaaaagactatgtttatgcaccaatacaaacgactaagagtaaaaatgatgcagcattatatggctgtttgcaatga

SEQ ID NO: 1277 - DNA, 237 bp, Staphylococcus aureus
atggatmatcataatcaatgtaattatgtgaatccacaaaatgtttcacttgactgggaatgttttataattagtaaaagtgaaatgttgttagatggtgtaccaaatgaacttatmaacacttggttagataaagacattattacaccattttcgataagaaatgatgaaataaactttaaaacaaaagatatttgggatgcactaatacatcataattggtactactcaaattaa

SEQ ID NO: 1278 - DNA, 609 bp, Staphylococcus aureus
atgcaattatttgaaacaatgaaaattgawaatggacatatccctagamttacttatcatactaatcgcataaaatgttcttctgagcgattaaactttaaatttgatgaacatgcatggcgaaatgaattaaacgatgtaacaacaaagtatcacartggycaatatagacttaaaatcgtattamatgctgaaagcraattygaaacgatagtgtcacctttacctgagaaaagtagttttacagcaaaatttcaagtgttgcccaaagyagttaatccaacttttataaawaataaaacgacagaacgaaagcatttagcwcacaatcatgaaacagatttaatattgctaacttcagaggacggcaaggtccttgaatttgatattggcaacattgtcattgaagaggatggaaaatggtacacaccaagttataaagatgatttcttaaaaggatgcatgcgtgattatttaatagatagtgacaaacttgttgaaaaagactttaataaaaacgaattgatttataaatatcataacaatgagatacgtwtatttttgataaatagtttacgagaggttgccgatgtccacctttgcctttaa

SEQ ID NO: 1279 - DNA, 207 bp, Staphylococcus aureus
atgattattgtttatattgtgctgttgttaattcttgtatacgtaaattatcgattagtgaatcgattgctatctgaaaatagaatatatgttgttcgtttgatagyaacaattactactgttataagctttatccttgtatacgcattaattcacgaactyatgccttttgttgtgcgrgcaatggatttawtgtaycaccagtaa

SEQ ID NO: 1280 - DNA, 2319 bp, Staphylococcus aureus
atgaaagctttattacttaaaacaagtgtatggctcgttttgctttttagtgyratgggattatggcaagtctcgarcgcggctgagcaryatacaccaatsaaagcacatgyagtaacaacgatagacaaagcaacaacagatargcaacaagtamcgccaacaaaggaagcggctcatcawthtggyraagaagcggcaaccaacgtatcagcatcagcrcagggaacagctgatgawayaaacaryaaagtaacatccaacgcayywwctaacaaaccawctacagyagtttcaacaamagkaaacraaasrcrcgaygtagatrcacaacaagcctcaacacaaaaaccaactcrmwcagcaacrttcamattatcaaatgctaaaacagcatcactttcaccacgaatgtttgctrcyaatgyaccacaaacaacaacacataaaatattacatacaaatgatatccatggccgactagccgaagaaaaagggcgtgtcatcggtatggctaaattaaaaacartaaaagaacaagaaaagcctgatttaatgttagacgcaggagacgccttccaaggtttaccactttcaaaycartctaaaggtgaagaaatggctaaagcratgaatgcagtaggttatgatgctatggcagtsggtaaccaygaatttgactttggatacgaycagttgaaaaagttagagggtatgttagacttcccgatgytaagtactaacgtttayaaagatggraaacgcgcrtttaarccttcaacrattgtaacraaaaatrgtattcgttatggaattattggygtaacgacaccagaaacaaagacgaaaacaagrcctgarggcattaaaggygttgaatttagagatccattacaaagtgtgacagcrgaaatgatgcgtatttataaagaygtagatacatttgttgttatatcwcatttaggdattgatccttcaacacaagaaacatggcgtggygattacttagtgaaacaattaagtcaaaatccacaattgaagaaacgtattacagtbattgayggtcattcacatacmgtacttcaaaatggtcaaatttataacaatgatgcattrgyacaaacaggtacagcacttgcgaatatcggtaagrttacatttaattaycgcaatggagargtatcraatattaarccrtcattkattaatgttaaagacgttgaaaatgtaacaccgaacaaagcattagctgaacaaattaatcaagctgatcaaacatttagagcacaaacwgcagaggtwattattccaaayaatacsattgatttcaaaggagaaagagatgacgttagaacgcgtgaaacaaatttaggaaacgcgattgcagatgctatggaagcrtatggcgttaagaatttctctaaaaagactgactttgccgtgacaaatggtggaggtattcgtgcctctatcgcaaaaggtaaggtgacacgctatgatttaatytcagtattaccatttggaaatacgattgcgcaaattgatgtaaaaggttcagacgtctggacrgctttygaacatagtttaggygcaccaacaacacaaaargayggtaagacagtrttaacagcgaatggcggtttaytacatatctctgattcaatycgtgtttactatgatatraataaaccgtctggcaaacgaattaaygctattcaaattttaaataaagagacaggtaagtttgaaartattgatttaaaacgtgtatatcaygtaacgatgaatgacttcacagcatcaggtggmgacggatatagtatgttcggtggycctagagaagaaggtatttcattagatcaagtactagcaagttatttaaaaacagctaaywtagctaagtatgataygacagaaccacaacgtatgttattaggtaaaccagyagyaagtgaacaaccagctaaaggacaacaargtagcaaaggtagtragtctggtaaagatryacaaccaattggtramgasaaagygatgratccagcgaaamaaccagckmcargtaaagttgtdttgttrcyarcgcatagaggaactgttagtagyggtasagaaggttctgrtcgcrcawtrgaaggarctrctgtatcaagyaagagygggaamcaattggytarmatgtcagygcctaaaggtagcrcrcatgagaarcagttaccaaaaactggaactratcaaagytcaagmccagvagcgatgtttgtattaktarcaggtataggtttaatygcgactgtacgacgtagaaaagctagytaa

SEQ ID NO: 1281 - DNA, 261 bp, Staphylococcus aureus
atgaattatgataaaaaaatgattaatcgtattaatagaatacaagggcaactaaatggaattattaaaatgatggaggaaggaaaagactgtaaagatgtcattacacaaataagtgcatcaaagagttcactccaacgcttgatgggtatcattattagtgagaatttaatagaatgtgtaaaagyagctgcggatgatgaagaaagctcccaagagttaattaatgaagctgtaaacttattggtgaaaagtaagtaa

SEQ ID NO: 1282 - DNA, 669 bp, Staphylococcus aureus
atgttaccacatggattaatagtatcttgtcaggcactascagatgaaccattgcattcatcttttattatgtcgaaaatggcattagctgcgtatgaaggtggtgctgttggtattcgygcaaatactaaggaagacattttagcaattaaagaaacggtagatttaccagttattggcattgtgaaacgtgactatratcactcagatgttttcattacwgcaacgtcaaaagaagttgatgaactgatagaaagccaatgtgaagtcattgcattggatgcaacgttacagcaacgtccraaagaaacgttagacgaattagtatcatatattagaacacatgcaccgaacgttgaaatcatggctgatatcgcgaccgttgaagaagctaaaaatgcsgcacgacttggctttgattatattggcacgacgttacatggctatactagttatacgcaaggacaattactttatcaaaatgacttccaatttytaaaagatgtactacaaagtgttgatgcaaaagttattgcggaaggtaatgtcattacaccggatatgtataaacgygtgatggacttaggcgttcattgttcagtcgttggtggtgcgataacacgaccaaaagaaattacgaaacgttttgttcaarttatggaagattaa

SEQ ID NO: 1283 - DNA, 618 bp, Staphylococcus aureus
atggtaaccgcaattattcatggatttatcttagcgattggtctaattttacctttaggtgcacaaaatgtatttatttttaaccaaggagctaatcaaccaaaatatagatatgtattgcctgcaataattrcagccgggttgtcagacagcttayttattattattgcagtggtaggagtwtctatcattattatgtctttacctrtacttcaagcaattatttatatagttggtttaattttcttgatgtatatggcttggaccatttggcatgataaaccctcaacagatggagaarctcaaattatrtctccaatgaaacaagtaagttttgctttatcagtttcattactcaatccacatgctattttagatacaattggwgtaattggtagtagtgctgcattatatagtggcagcaataaaattgcgtttacaatcgcttgtattagcgtttcatggttatggttctttttactcgcaattttaggaraaatggttggatcaattgataaaacyggaaaattattaacaataatcaataaawtatcaagcataataattattattgttgctctratgatattacaaaaacttattcaattattattctaa

SEQ ID NO: 1284 - DNA, 285 bp, Staphylococcus aureus
gtgacaataaatataatcgttttaatagtatctatcattgtctttcaattgattattggacacatatggcatgatattggtttaagttatttaagaagtatcttactcatgatgctrccatttggactaggtgtatttatacaacaagtgtcgtattacgaacgacaatatcctaaatggcaagtgcctcaaaacataaaagttagattgaaatatatytatctcgctacrtttttagagtatgtcgtactatacctcactttatttacggacatactaagataa

SEQ ID NO: 1285 - DNA, 495 bp, Staphylococcus aureus
atgatwgaaattaaaacattaacgaataatgattttaatgagtataagagacttgtttcgacagtcaatgaagaattcactcaagattcacattatagtcaaacaatgactgacaccttaatacatgacattttaaatcaaggttcaccgaaatgtattgtatttggctgttatgaaaacgaaacacttatcgcaacagctgccttagaacaaattcgatacgttggaaaagaacataaatcattaattaaatacaactttgttactaataacgataaatcgattaatagcgagctcattaatttcattattaattatgcacggcagaacaattacgaatmtttacttacatcaattgtgtcaaacaacataggtgctaaagttttctatagtgcactaggattcgacattcttggttttgagaaaaatgcaattaaaatcggaaatacctatttcgatgaacattggcttttttatgatttgattaataagtaa

SEQ ID NO: 1286 - DNA, 2076 bp, Staphylococcus aureus
atgttaagaggacaagaagaaagaaagtatagtattagaaagtattcaataggcgtggtgtcagtgttagcggctacaatgtttgttgtgwcatcacatgaagcacaagcctcggaaaaaayaycaacgwcyaatgcagcggyacaaaaagaaacactaaatcaaccgggagaacaagggaaygcgataacgtcacatcaaatgcagtcaggaaagcaattagacgatatgcataaagagaatggtaaaagtggaacagtgacagaaggtaaagayaygcttcaatyatcgaagyatcaatcaacacaaaatagtaaaayaatcagaacgcaaaatgataatcaagtaaagcaagattctgaacgacaaggttctaaacagtcacaycaaaataatgcgactaayaawactgaacgycaaaatgatcagrttcaaaatacccatcatgctgaacgtaatggatcacaatcgacaacgtcacaatcgaatgatgttgataaatcacaaccatccattccggcacaaaaggtawtaccmaatcatgataaagcagcaccaacttcaacwacacccccrtctaatgataaaactgcacctaaatcaacaaaagmacaagatgcaaccacggacaaacatccaaatcaacaagatacacatcaaccygcgcatcaaatcatagatgcaaagcaagatgatamtgttcrycaaagtrawcagaaaccacaagttggcgatttaagtaaacatatcgatggtcaaaattccccrgagaaaccgacagataaaaatactgataataaacaactaatcaaagatgcgcttcaagcgcctaaaacacgttcgactacaaatgcagcagcagatgctaaaaaggttcgaccacttaaagcgaatcaagtacaaccacttaacaaatatccagttgtttttgtacatggatttttaggattagtaggcgataatgcacctgctttatayccaaattattggggtggraataaatwtaaagttatcgargaattgagaaagcaaggctataatgtacatcaagcaagtgtwagtgcatttggtagyaactatgatcgygctgtagaactttattattayatyaaaggtggtcgcgtagattatggcgcagcacatgcagctaaatacggacatgarcgctatggtaagacwtataaaggaatcatgcctaattgggaacctggtaaaaaggtacatcttgtagggcatagtatgggtggtcaaacaattcgtttaatggaagagtttttaagaaatggtaacaaagaagaaattgcctatcataaagcgcatggtggagaaatatcaccattattcactggtggtcataacaatatggttgcatcaatcacaacattagcaacaccacataatggttcacaagcagctgataagtttggaaatacagaagctgttagaaaaatcatgttcgctttaaatcgatttatgggtaacaagtattcgaatatcgatttaggattaacgcaatggggctttaaacaattaccaaatgagagttacattgactatataaaacgcgttagtaaaagcaaaatttggacatcagacgayaatgctgcstatgatttaacgttaratggctctgcaaaattgaacaacatgacaagtatgaatccwaatattacgtayacgacttatacwggtgtrtcwtcwcatactggtccattaggttatgaaaatcctgatttaggtacatttttcttaatggmtacaacgagtagaattattggtcatgatgcaagagaagaatggcgtaaaaatgatggtgtcgtaccagtratttcgtcrttacatccrtccaatcaaccatttrttaatgttacgaatgatgaacctgccacacgmagaggtatctggcaagttaaaccaatcatacaaggatgggatyawgtcgattttatcggtgtrgayttcctggatttcaarcgtaaaggtgcagaactygccaacttctatacaggtattataaatgacttgttgcgtgtkgaagcgactgaaagtaaaggaacacaattgaaagcaagttaa

SEQ ID NO: 1287 - DNA, 105 bp, Staphylococcus aureus
ttgttrctatcaaacgaacaacatatattctattttcagatagcaatcgattcactaatcgataatttacgtatacaagaattaacaacagcacaatataaacaa

SEQ ID NO: 1288 - DNA, 423 bp, Staphylococcus aureus
atggcaatacattatgaaactaaagcgacgaatgttggcggacgtaaaggacatgtttatactgatgatcgagcrttagatattgatatcgttycgcctgctcaagcagatggtaaagctactaaccccgaacaattatttgcagcaggttatgcatcttgcttcaacggtgcyttcgacctaattttaaagcaaaacaaagtgcgtgatgctcatccagaagtaacactaacagtgagactagaagatgatycagactcagaaagtcctaaattaagtgtttcaattgatgcgacaattaaaaatgttatatctcaagaagaagctgaaaaatatttacaaatggctcatgaattttgtccatattcaaaagcgactcaaggaaatattaatgtcgatttaaatgtaaatgttgtagattag

SEQ ID NO: 1289 - DNA, 321 bp, Staphylococcus aureus
atgcaakcaatcaaaagtaatgaatcatttaaatctrtrattaatagcgatacacctgtaatygttaaatttgaggcaggatggtgcccagactgtcgtgctatggatttatggattgacccaatcgtagaacaatataawgattaccaatggtatactgttaatcgtgatgaattagaagatgtagttgttgaaaatgaagttatgggtatccctagcttgctagtatttaaaaacggcgayaaaattgcacaccttcattcagcaaatgctaagtcacctgarcaagttgaatcatttttagcagaaacttttaaataa

SEQ ID NO: 1290 - DNA, 135 bp, Staphylococcus aureus
atgagtgttcggccacttcattcacgacctttcttaaataaaaatcctaatcatttaaatactgacgttgtattagtcttataccaatatcgacagtctatatctattacaaacttttattttcaaaatattatt

SEQ ID NO: 1291 - DNA, 1221 bp, Staphylococcus aureus
atgtggttwgaaaaatttaaaaataagaataaagaaactaaatatagatattacgagaagtacaaagacccwctcacwrmcaaatggmgacgtgttagygtggtwcttaataagaatggtaagcaatcacaaaaagaagctcaaagrctcttaaatgagcgtatagaagcaaaactgaatgataagacacctactacacttaagtcactaactttycatgyygcawgtgatgagtggtttcagarytatatcaaaacgtctgggtcaaaaagaacractattaaaactaaattgagtaagctaaacactttgaagaaatttgtagatgaagatattttaatcaataaaataacactttcatatgcgcaacaagttttcgatgaaatggatartaaaggttatgtatatcaagtwaacaaagatgcgttaagcatattcaaaaatgtatttgaatacacyagacgyatctataaactgcaagatttagaatttttaaaagatataacgttaaataaaagaattaagtcttatgatgaagtgaaagctaaacgtaataartacctcgaattaaatgaaatacaatctatcatcaaagatattaataygaaggctcagaaratgcactcaggtatccataarcggttttatttattcgttgcactcatgacmgaattycaagccttaaatggtatgcgtattggtgaaatgttagccattcaaaatgaagatatagactttgataataagagtttaaatattaacggaacaatccattggtttcacgatgaatctggtggattcggtgtaaaagataccactaaaacagagtctagttatagaacaattggattgagtagcagaagttgcgagatattaaagaaagcaatactggagaacaaaaaggattcaaaatggaatgatggatatctaaatagaaattttgtatttactaatcataaaggyaacccaatgcagactgaaagattcaataaaatccttagggaagcagctaaagatgttggtattgataaagaagtttcttcacatatattaagacatagccacatatcattactctctcaacaaggcgtgtcacttaaagctattatggatcgtgtaggccattccgaccaccgtacaacrctttccatttattctcacgttactgaacagatggataaggatatgatgaacaaacttgaacagktaaaacttggataa

SEQ ID NO: 1292 - DNA, 132 bp, Staphylococcus aureus
atgrcaagcactaaaataatgtttgggrgtgcttgtgcttttgtggattgcggtcgattatttatattgcatgatttgattaatttgattgattatattggacatgatggtgttggcgggatgcgttgttgc

SEQ ID NO: 1293 - DNA, 2790 bp, Staphylococcus aureus
atgaatatgaagaaaaaagaaaaacacgcaattcggaaaaaatcgattggcgtggcttcagtgcttgtaggtacgttaatcggttttggactactcagcagtaaagaagcagatgcaagtgaaaatagtgttacgcaatctgatagcgcaagtaacgaaagcaaaagtaatgattcaagtagcgttagtgctgcacctaaaacagacgacacaaacgtgagtgatactaaaacatcgtcaaacactaataatggcgaaacgagtgtggcgcaaaatccagcacaacaggaaacgacacaatcakcatyaacaaatgcaactacggaagaaackccggtaactggtgaagctactackacgacaacgaatcaagctaatacaccggcaacaactcaatcaagcaatacaaatgcggaggaattagtgaatcaaacaagtaatgaaacgacttytaatgatactaatacagtatcatctgtaaattcacctcaaaattctacaaatgcggaaaatgtttcaacaacgcaagatacttcaactgaagcaacaccttcaaacaatgaatcagctccacagagtacagatgcaagtaataaagatgtagttaatcaagcggttaatacaagtgcgcctagaatgagagcatttagtttakcggcagtagctgcagatgcaccggyagctggcamagatattacgaatcagttgacgaatgtgacagttggtattgactctggwrmkacwgtktatccgcaccaagcaggytatgtcaaactgaattatggtttttcagtgcctaattctgctgttaaaggtgacacattcaaaataactgtacctaaagaattaaacttaaatggtgtaacttcaactgctaaagtgccwccaattatggcyggagatcaagtattggcaaatggtgtaatcgatagtgatggtaatgttatttatacatttacagactatgtwratactaaagawratgtaamagcwamtwtkacyatgccmgcttatattgaccctgaaaatgttamaaagacaggtaatgtracattgrcwactggcataggtagtacaacagcaaacaaaacagtattagtagattatgaaaaatatggtaagttttataacttatctattaaaggtacaattgaccaaatcgataaaacaaataatacgtatcgtcagacaatttatgtcaatccaagtggagataaygttattgcgccggttttaacaggtaatttaaaaccaaatacggatagtaatgcattaatagatcagcaaaatacaagtattaaagtatataaagtagataatgcagctgatttatctgaaagttactttgtgaatccagaaaactttgaggatgtcactaatagtgtgaatattacattcccaaatccaaatcaatataaagtagagtttaatacgcctgatgatcaaattacaacaccgtatatwgtagttgttaatggtcatattgatccgaatagcaaaggtgatttagctttacgttcaactttatatggrtatractcrarkwtwrtwtggmgmtctatgtcatgggacaacgaagtagcatttaataacggatcaggttctggtgacggtatcgataaaccagttgttcctgaacaacctgatgagcctggtgaaattgaaccaattccagaggattcagattctgacccaggttcagattctggcagcgattctaattcagatagcggttcagattcgggtagtgattctacatcagatagtggttcagattcagcgagtgattcagattcagcragtgattcagaytcagcragtgattcagaytcagcragygattcmgaytcagcragcgattcmgaytcagmsarygaytcrgattcagmkagygattcwgaytcagmsagtgaytcagattcmgmmagygaytcmgaytcagayarygaytckgaytcagayagygaytcdgaytcagayagygaytcagattcmgatagcgattcagattccgacagtgattccgactcagacagcgattctgactccgacagtgattccgactcagacagcgattcagattccgacagtgattccgactcagatagcgattccgactcagatagcgactcagattcagacagcgattcagattcagacagcgattcagattcagatagcgattcagattccracagtgactcagattccgacagtgactcggattcagatagcgattcagattccgacagtgactcagattccgacagtgactcagactcagacagtgattcggattcagcgagtgattcggattcagatagtgattccgactccgacagtgactcggattcagatagcgactcagactcggatagcgactcggattcagatagcgattcggactcagatagcgattcagaatcagacagcgattcagawtcagacagcgattcagattcagacagygactcagattcagatagtgactcggattcagcgagtgattcagactcaggtagtgactccgattcatcaagtgattccgactcagaaagtgattcaaatagcgattccgagtcagkttctaacaataatgtagttccgcctaattcacctaaaaatggtactaatgcttctaataaaaatgaggctaaagatagtaaagaaccattaccagatacaggttctgaagatgaagcaaatacgtcactaatttggggattattagcatcaataggttcattactacttttcagaagaaaaaaagaaaataaagataagaaataa

SEQ ID NO: 1294 - DNA, 2808 bp, Staphylococcus aureus
atgaatatgaagaaaaaagaaaaacacgcaattcggaaaaaatcgattggcgtggcttcagtgcttgtaggtacgttaatcggttttggactactcagcagtaaagaagcagatgcaagtgaaaatagtgttacgcaatctgatagcgcaagtaacgaaagcaaaagtaatgattcaagtagcgttagtgctgcacctaaaacagacgacacaaacgtgagtgatactaaaacatcgtcaaacactaataatggcgaaacgagtgtggcgcaaaatccagcacaacaggaaacgacacaatcatcatcaacaaatgcaactacggaagaaacgccggtaactggtgaagctactactacgacaacgaatcaagctaatacaccggcaacaactcaatcaagcaatacaaatgcggaggaattagtgaatcaaacaagtaatgaaacgacttctaatgatactaatacagtatcatctgtaaattcacctcaaaattctacaaatgcggaaaatgtttcaacaacgcaagatacttcaactgaagcaacaccttcaaacaatgaatcagctccacagaatacagatgcaagtaataaagatgtagttagtcaagcggttaatccaagtacgcctagaatgagagcatttagtttagcggcagtagctgcagatgcaccggcagctggcacagatattacgaatcagttgacagatgtgaaagttactattgactctggtacgactgtgtatccgcaccaagcaggttatgtcaaactgaattatggtttttcagtgcctaattctgctgttaaaggtgacacattcaaaataactgtacctaaagaattaaacttaaatggtgtaacttcaactgctaaagtgccaccaattatggctggagatcaagtattggcaaatggtgtaatcgatagtgatggtaatgttatttatacatttacagactatgttgataataaagaaaatgtaacagctaatattactatgccagcttatattgaccctgaaaatgttacaaagacaggtaatgtgacattgacaactggcataggaaccaatactgctagtaagacagtattaatcgactatgagaaatatggacaattccataatttatcaattaaaggtacgattgatcaaatcgataaaacaaataatacgtatcgccaaacaatttatgtcaatccaagcggagataacgttgtgttacctgccttaacaggtaatttaattcctaatacaaagagtaatgcgttaatagatgcaaaaaacactgatattaaagtttatagagtcgataatgctaatgatttatctgaaagttattatgtgaatcctagcgattttgaagatgtaactaatcaagttagaatttcatttccaaatgctaatcaatacaaagtagaatttcctacggacgatgaccaaattacaacaccgtatattgtagttgttaatggccatattgatcctgctagtacaggtgatttagcactacgttcgacattttatggttatgattctaattttatatggagatctatgtcatgggacaacgaagtagcatttaataacggatcaggttctggtgacggtatcgataaaccagttgttcctgaacaacctgatgagcctggtgaaattgaaccaattccagaggattcagattctgacccaggttcagattctggcagcgattctaattcagatagcggttcagattctggcagtgattctacatcagatagtggttcagattcagcgagtgattcagattcagcaagtgattcagactcagcgagtgattcagattcagcaagtgattcagattcagcaagtgattcagattcagcaagtgattcagactcagcaagtgattcagattcagcaagtgattcagattcagcaagcgattcagattcagcgagcgattcagattcagcgagcgattcagattcagcgagtgattccgactcagcgagcgattcagactcagatagtgactcagattccgatagcgattccgactcagatagcgactcagattcagacagcgattctgactcagacagcgattctgactcagacagtgactcagattccgatagcgattctgactcagacagtgactcagattccgatagcgattcagattcagacagtgattcagactcagatagcgattcagattccgacagtgactcagactcagacagcgattcagattccgatagcgattcagattccgacagtgactcagattccgatagtgactcggattcagcgagtgattcagattcagatagcgattcagaatcagatagtgactcagactcagacagtgattcagattcagatagtgactcagactcagacagcgattcagaatcagatagtgactccgattcagacagcgattcagaatcagatagtgactccgattcagatagcgattcggattcagcgagtgattcagactcaggtagtgactccgattcatcaagtgattcagattccgattcaacgagtgacacaggatcagacaacgactcagacagtgattcaaatagcgattccgagtcaggttctaacaataatgtagttccgcctaattcacctaaaaatggtactaatgcttctaataaaaatgaggctaaagatagtaaagaaccattaccagatacaggttctgaagatgaagcgaatacgtcactaatttggggattattagcatcattaggttcattactacttttcagaagaaaaaaagaaaataaagataagaaataa

SEQ ID NO: 1295 - DNA, 2970 bp, Staphylococcus aureus
atgaatatgaagaaaaaagaaaaacacgcaattcggaaaaaatcgattggcgtggcttcagtgcttgtaggtacgttaatcggttttggactactcagcagtaaagaagcagatgcaagtgaaaatagtgttacgcaatctgatagcgcaagtaacgaaagcaaaagtaatgattcaagtagcgttagtgctgcacctaaaacagacgacacaaacgtgagtgatactaaaacatcgtcaaacactaataatggcgaaacgagtgtggcgcaaaatccagcacaacaggaaacgacacaatcatcatcaacaaatgcaactacggaagaaacgccggtaactggtgaagctactactacgacaacgaatcaagctaatacaccggcaacaactcaatcaagcaatacaaatgcggaggaattagtgaatcaaacaagtaatgaaacgacttctaatgatactaatacagtatcatctgtaaattcacctcaaaattctacaaatgcggaaaatgtttcaacaacgcaagatacttcaactgaagcaacaccttcaaacaatgaatcagctccacagaatacagatgcaagtaataaagatgtagttagtcaagcggttaatccaagtacgcctagaatgagagcatttagtttagcggcagtagctgcagatgcaccggcagctggcacagatattacgaatcagttgacagatgtgaaagttactattgactctggtacgactgtgtatccgcaccaagcaggttatgtcaaactgaattatggtttttcagtgcctaattctgctgttaaaggtgacacattcaaaataactgtacctaaagaattaaacttaaatggtgtaacttcaactgctaaagtgccaccaattatggctggagatcaagtattggcaaatggtgtaatcgatagtgatggtaatgttatttatacatttacagactatgttgataataaagaaaatgtaacagctaatattactatgccagcttatattgaccctgaaaatgttacaaagacaggtaatgtgacattgacaactggcataggaaccaatactgctagtaagacagtattaatcgactatgagaaatatggacaattccataatttatcaattaaaggtacgattgatcaaatcgataaaacaaataatacgtatcgccaaacaatttatgtcaatccaagcggagataacgttgtgttacctgccttaacaggtaatttaattcctaatacaaagagtaatgcgttaatagatgcaaaaaacactgatattaaagtttatagagtcgataatgctaatgatttatctgaaagttattatgtgaatcctagcgattttgaagatgtaactaatcaagttagaatttcatttccaaatgctaatcaatacaaagtagaatttcctacggacgatgaccaaattacaacaccgtatattgtagttgttaatggccatattgatcctgctagtacaggtgatttagcactacgttcgacattttatggttatgattctaattttatatggagatctatgtcatgggacaacgaagtagcatttaataacggatcaggttctggtgacggtatcgataaaccagttgttcctgaacaacctgatgagcctggtgaaattgaaccaattccagaggattcagattctgacccaggttcagattctggcagcgattctaattcagatagcggttcagattctggcagtgattctacatcagatagtggttcagattcagcgagtgattcagattcagcaagtgattcagactcagcgagtgattcagattcagcaagtgattcagattcagcaagtgattcagattcagcaagtgattcagactcagcaagtgattcagattcagcaagtgattcagattcagcaagcgattcagattcagcgagcgattcagattcagcgagcgattcagattcagcgagtgattccgactcagcgagcgattcagactcagatagtgactcagattccgatagcgattccgactcagatagcgactcagattcagacagcgattctgactcagacagcgattctgactcagacagtgactcagattccgatagcgattccgactcagacagtgactcagattccgatagcgattccgactcagacagtgactcagattccgatagcgattcagattccgacagtgattccgactcagatagcgattccgactcagatagcgactcagattcagacagcgattcagattcagacagcgattctgactcagacagtgactcagattccgatagcgattcagattcagacagtgattcagactcagatagcgattcagattccgacagtgactcagactcagacagcgattcagattccgatagcgattcagattccgacagtgactcagattccgatagtgactcggattcagcgagtgattcagattcagatagcgattcagaatcagatagtgactcagactcagacagtgattcagattcagatagtgactcagactcagacagcgattcagaatcagatagtgactccgattcagacagcgattcagaatcagatagtgactccgattcagatagcgattcggattcagcgagtgattcagactcaggtagtgactccgattcatcaagtgattcagattccgattcaacgagtgacacaggatcagacaacgactcagacagtgattcaaatagcgattccgagtcaggttctaacaataatgtagttccgcctaattcacctaaaaatggtactaatgcttctaataaaaatgaggctaaagatagtaaagaaccattaccagatacaggttctgaagatgaagcgaatacgtcactaatttggggattattagcatcattaggttcattactacttttcagaagaaaaaaagaaaataaagataagaaataa

SEQ ID NO: 1296 - DNA, 3090 bp, Staphylococcus aureus
atgaatatgaagaaacaagaaaaacacgcaattcgtaaaaaatcgattggcgtggcttcagtgcttgtaggtacgttaatcggttttggactactcagcagtaaagaagcagatgcaagtgaaaatagtatgacacaaacggaaaatacgagtaatgagagcaaaagtaatgatccaagtagcgttaatgctgcacctaaaacagacaacacaaacgtgagtgattctaatacaacgacaaacactaatagtgacgaaacgaatgtagcgcaaaatccagcacaacaggaaacgacacaatcagcatcaacaaatgcaactacagaagaaacaccggtaactggtgaagttactactacggcaacgaatcaagctaatacaccggcaacaactcaatcaagcaatacaaatgcggaagaatcagtgaatcaaacaagtaatgaaacgacttctaatgatactaatacagtatcatctgtaaattcacctcaaaattctacaaatgcggaaaatgtttcaacaacgcaagacatttcaactgaagcaacaccttcaaacaatgaatcagctccacagagtacagatgcaagtaataaagatgtagttaatcaagcggttaatacaagtgcgcctagaatgagagcatttagtttagcggctgtagctgcagatgcaccggctgctggcaaagatattacgaatcagttgacgaatgtgacagttggtattgactctggagatacagtttatccgcaccaagcaggctatgtcaaactgaattatgggttctcagtaccaaatgaggctgttcaaggtgacacattcaaaataactgtgcccaaagaattaaacttaaatggtgtaacttcaactgctaaagtgccaccaattatggccggagatcaagtattggcaaatggtgtaatcgatagtgatggtaatgttatttatacatttacagactatgtaaatactaaagatgatgttaaagcaactttgaccatgcccgcttatattgaccctgaaaatgttacaaagacaggtaatgtgacattggctactggcataggtagtacaacagcaaacaaaacagtattagtagattatgaaaaatatggtaagttttataacttatctattaaaggtacaattgaccaaatcgataaaacaaataatacgtatcgtcagacaatttatgtcaatccaagtggagataacgttattgcgccggttttaacaggtaatttaaaaccaaatacggatagtaatgcattaatagatgcacaaaatactagtattaaagtatataaagttgataatgcatcagacttgtctgaaagttattatgtgaatccagataactttgaagatgtcactgatagtgtgaatattacattcccaaatccaaatcaatataaagtagagttcaatacgcctgatgatcaaataacaacaccatatattgtagttgttaatgggcatattgatcctaatagtaaaggtgatttagctttacgttcaactttatatggatataattcgaatataatttggcgatcaatgtcatgggataatgaagtagcatttaataacggatcaggttctggtgacggtatcgataaacctgttgttcctgaacaacctgatgagccgggtgaaattgaaccaattccagaggattcagattctgacccaggttcagatagtggttcagattctggcagcgattctaattcagatagcggttcagattcgggtagtgattctacatcagatagtggttcagattcagcgagcgattcagattcagcaagtgattcagattcagcgagtgattcagattcagcaagtgattcagattcagcgagtgattcagattcagcaagtgattcagattcagcgagtgattcagattcaacgagtgattcagattcaacgagtgattccgattcagcaagcgattcagattcagatagtgactcagactcagacagcgattcagattcagatagtgactcagactcagatagcgattcagattccgacagtgactcggattcagatagcgattccgactcagacagtgactcagattcagatagcgactcagactcagaaagcgactcagattcagacagcgattccgactcagatagtgattcagattcagacagcgactcagacagtgtttcagattcagacagtgactcagactcggatagtgaatcagactcagacagcgactcagattcagacagcgactcagactcggatagtgaatcagactcagacagtgactcagactcagacagcgactcagactcagatagcgactcagattcagatagcgattcagactcagacagcgactcagactcagatagcgattccgactcggatagcgactcagactcagatagcgattccgactcggatagcgattcagaatcagatagtgactcagattcagatagcgattccgactcagatagcgactcagattccgacagcgattcagattcagacagtgatttagactcagacagtgactcggattcagatagcgattccgactcagacagtgactcggattccgacagcgattcagattcagacagtgatttagactcagacagtgactcggattcagatagcgattccgactcagatagtgcctcagattcagatagcgactcagactcagacagcgattcagaatcagatagtgactcagattcagatagcgattccgactcagacagtgcctcagattcagatagtgactcggattcagcgagtgattccgattcagattcaacgagtgacacaggatcagataacgactcagactcagaaagtgattcgaatagcgattccgattcaggttctaacaataatgtagtgccgcctaattcacctaaaagtggtactaatgcttcaaataaaaatgaggctaaagaaagtaaagaaccattaccagatacaggttctgaagatgaagctaatacgtcactaatttggggattattagcatcattaggttcattactacttttcagaagaaaaaaagaaaataaagataagaaataa

SEQ ID NO: 1297 - DNA, 432 bp, Staphylococcus aureus
atgagaaaattattaggtttagcattagcaagtacgttaattttaggcgcttgtggtagcaacgacggagataagaaagaagaaagcaagagctatactacaaatgatatcgttaaaggttttaaagataataaattaaatgttatcaatgaaaaagaaatgacacgtgaagactttgggcttgctccaatgaagacggacgaagctaaaatgtttgttgttcaagatgataaaaatgctagagtaatgaaatttaaaaatagtgatgatctaaaacaaactaaaaaatattacgatgaattaggtaaagaaagtgcagctttctattcacatacccattctaaaggtaagtttttaatacaaatgaacggtgatatcgatgatgctactttcaataaatacaagaattctatggataaaacattaaagtga

SEQ ID NO: 1298 - DNA, 189 bp, Staphylococcus aureus
atggaagatatgaaagaactttattctttaaaaatccaaaagaagaatttaaataataaacaaaagaatttaatgtctgtaattaatcaatgtattgaactagaaaatttttcttacactgaaattaaaaaagttctctacctaattgatagagaacaaaagtatttagctaataaccgcagaaaaaca

SEQ ID NO: 1299 - DNA, 459 bp, Staphylococcus aureus
atgtatttatacgaaaagatggttattgaaaacaaagagataccaattgatgatgggaagtctttaggtaattttgagggtctctatgacaatggagttattttaattaataaaaatttatccgaaaggcgtaaagccgaagtgttatacgaagaacttgcccaccacaagttgacgtatggcaacattttagaccaatcgaagttcaacaatcgcaagttcgaaaattacgcacgtagacacggctttatctcagcagtcccgttacgtgaaattgtagaagcttacaattatggcgtacgtaacttgtatgaattgtctgagtatctacaattaagcgaagaatacatattagaagcaatagaacaatataaaaagatatatggtattggaactcactatggcgagtattctattacatttgagccgttgagagtttttaaatataaagaaatataa

SEQ ID NO: 1300 - DNA, 333 bp, Staphylococcus aureus
atgagaactaatgatgaaataattacaataattaaaacatcaatgaaagaacaaaatatgtcactaagtgaattagctcgtcgtgtaggtgtagcaaaatcagcagtatcaagatatttaaatttaactagagagttcccattgaatcgcgctgaagattttgcgaaagtacttggaataaaaacagaatatttattaggatttgctgaacgcgaagaatctacaaaacaagatactatcgccgcgcacttagatggagattttacagaggaagaattaattgaaattagaaagtatgcggagttagttagaaaagcacatcgaaatcagtaa

SEQ ID NO: 1301 - DNA, 120 bp, Staphylococcus aureus
atgaacgacatgatgaacctagttattaaccaaatcgttattaagttacattatagagatgattggaatgaatttatcgatatatactccaatacgattttactagggttaacaataaat

SEQ ID NO: 1302 - DNA, 1257 bp, Staphylococcus aureus
atgatagacaactttawrcaggtccttaaattaattaaagagaaacgtaccaataatgtagttaaaaaatctgattgggataaaggtgatcwatataaaactttagtccatgataagttacccaagcagttaaaagygcatataaaagaagataaatattcagttgtagggaaggttgctactgggaactatagtaaagttccttggatttcaatatatgatgagaatataacaaaagaawcaaaggatggayattatttggtatatctttttcatccrgaaggagaaggcatatacttatctttgaatcaaggatggtcaaagataagtratatgtttccgcgggataaaaatgctgcaaaacaaagagcattaactttatcttccgaactcaataaatatattacatcaaatgaatttaatactggaagattttattacgcagaaaataaagattcatcttatgatttaaaaaatgattayccatcaggatattctcatggatcaataagawtcaaatattatgatttgaatgaaggrttcacagaagaagawatgctakakgatttaaagaaatttttagaactatttaatgaattagcttcaaaagttacaaaaacatyctatgatrgcttrgtcaatagmatagacgaaatacaggaagayagygaaattgaagaaattagaayagcacaaawagataagacactcaagsaagtggaagcacctaaaggartaattccaaaatataaaaaaggtgtatcaaagactactaaaaatgattcagaaattgaaaaatcaaataaagagaataaattaaccggtaaagttggagaaaaattagcgctaaawtactttaatgakctaattgataataaaatagacgaagataagaaagaacagtttaggaatattttaaatgataatccaggstctcaacacggtcatggctatgatttagtagcttttgatccaacaaatacagatraagctrtagaaaaatttattgaaattaaaacatctayatcttctartattgaggaaccattttttatgtcgctaaatgaaatgtttgctwtgaaagartataagmagaaatatttaatattaagaatatttaatgtttcyggtraagaaccacaattttattttatagatccrtatgcraattattctgaatttaaagatgtagatgatctcattgayaaagtatttaatgtagaagctattcartataaagtttttggcgaaaaatga

SEQ ID NO: 1303 - DNA, 99 bp, Staphylococcus aureus
ttgagtacacgtggtttgaatatctggcaagaaatggaaattggtaatgtcagtcataaagtcgctaaacgtgctcaaataccattaattatttttaaa

SEQ ID NO: 1304 - DNA, 558 bp, Staphylococcus aureus
atgaataaaaaactattaacaagaacattgatagcaagtgctttagttttaacaacagtaggttcaggttttcattcttcttcaaattataatggtattaataacgttgcaaaggcttctgaaataacagatagagacttatggaaaaatgtaagagatgctttgaaagaagcaaatattatcgataaaacagcaaatgagacagttggtgttacgtacaatttaaataatggtggcgaaagtagtattacgggtacagctgatttagatgaacttagtaattttaataacaagccgattaataccgatagtgttaaaagaattgatttgtcaagaataaatccaaatggaaataggtttgacgcaaatgatgcatggaaaaaattaactgacaaattaaaagagaaacaaatcgttaaaaacggcgacacagtaactatccatagtaaagataaaaatgatcccccaatttcagctaaagttggtgaaaactataatggcaacaaggggttaatgctaaatcagagagatataacaaaaataactataactaaataa

SEQ ID NO: 1305 - DNA, 852 bp, Staphylococcus aureus
atgcaacaatttaaatggattaatattctaaaaggttttgctatgggaacgagtgacttggtacctggtgttagcggtgggactatygcattattgttaggtatwtacaatcaatttatcgcttcaattagyggcatattctcacgacgtttttggccaagttttacatttttaatcccyattataattggaatgttactggcaatgggatcactaagtaatctttttaattatttattaagccaacaccatattccaactatgtttttctttggtggattaatcattggtatcgttccatatttattgaaaatttctaactataaaacgtcatttacaactaaacattacatgatggttatagctggtatcgctatcttaattgttattacattaatgaataatrgygataaacatgctggagaaacrcttactctatcaactrgtcttattattaaataytttattgcaggtatgtgtgcatctagygctatgttactcccaggtatttcaggrtcatttatgttattagtatttggcktctatggtacggtcatgctagcaatatctgaagttgttaaacttaactttrcmggtcttcctataytacttgcagtcggatttggsgtgcttgctggattcattatttcaagcaaaattatccagtatttcctaacacatcataaactaatgacttttgcattaatcattggttttgttgttggctccctctttgcagtatttccaggtttaccaactaatatcgtgatgtggttcgtttcattagtagtatttatcatcggttttattgtaagtttgactttaggtcgaattaccgctgaaaatgaataa

SEQ ID NO: 1306 - DNA, 315 bp, Staphylococcus aureus
atgtattttgttttagcaatatttacamtmatyagtgccagtgtragtttaggttattcaattcaagcwtgtgcatctagycataatataaatgcatattatgcacttagtcgaagcttacctttatttttattagctattttttctttagtcattcatagtgctatatttttgataactatatccattgcaatgatyttagttcaatttttagatgcgattgttggttataaaagtraagatgtctttaaaacttayggtccattagcaacatctgtagtgaacttaatwttattaatagttttcttattttaa

SEQ ID NO: 1307 - DNA, 105 bp, Staphylococcus aureus
ttgacaaatattttwaaacataatataataaataacgttctgaaaaacgaagatgttttaaatgcctatatccgcggtcgtggcggaatggcagacgcgctaggt

SEQ ID NO: 1308 - DNA, 258 bp, Staphylococcus aureus
atgtatttatatgatgacaacgaagagagtcaagttcagtttgttggttttgttggcgagcatagtcgatatgatttratgytagtccatacaaatagacattatggtaagacactcgtacttaatatgcaaacaaataaattcggtattatcggtactgatgatttaaaagaagaaggctatatygctcatattttaggtgtaaatgctgaagaaggcgatgaaattacwgagtatttaaatgaagtcattcattaa

SEQ ID NO: 1309 - DNA, 243 bp, Staphylococcus aureus
atgcctactgaagatacaacgatgtttgatcaagtagcagaagttattgaacgtcttcgyccatttttattacgtgatggtggcgactgctcattgattgacgtkgaagacggtattgttaaattacaattacatggtgcatgtggtacatgcccaagttctacaatcactcttaaagctggtattgagcgtgcattacacgaagaagtgcctggtgtaatagaagtagaacaagtattctaa

SEQ ID NO: 1310 - DNA, 420 bp, Staphylococcus aureus
atgttaaacagaacagtattagtagggcgattaacaaaagacccagaattaagaagcacgccaaatggcgtaaatgtagggacattcacattagcagtaaacagaacatttacaaatgctcaaggcgagcgtgaagcagactttataaacgtagtagtattcaaaaaacaagctgaaaacgttaaaaactacctttctaaaggatcactggcaggtgtagacgggcgattacaaacacgcagttacgataacaaagaagggcgacgtgtatttgtgacagaagtagtagcggacagcgttcaattcttagaaccgaagaataacaacaaacagaataaccaacaacacaacggacaaactcaaactggtaataatccgttcgacaataccgaagaagacttttctgacttaccgttctga

SEQ ID NO: 1311 - DNA, 1065 bp, Staphylococcus aureus
atgaaaaacttagttttgttaggcggcggatatggtaatatgcgtatcatgtcacgcattttaactacwtctttaccacaagattatacagtcacattagttgatcgtatgccatttcatggattgaaaccagaattytatgctttagctgcgggcacgaaatcagataaagatgttcgyatgaaattccctaatcatccacaagtgaatacrgtttatggtgaaattaacgacatagatttagatgctcaaattgtctcagtcggtaattctaaaattgattatgatgagctaatyattggtttaggatgtgaagataartatcataacgttccaggagccgaagaatatacacatagtattcaaacactctcaaaggctcgggatactttccatagtattagtgaactaccagaaggtgctaaagtyggtatcgttggtgctggattaagyggcatagaacttgccagcgaattaagagaaagtagatcagacttggaaatatatctttatgaccgtgggccrcgaattttaagaaattttccagaaaaattaagtaagtatgttgcgaaatggttcgccaaaaataatgttaccgttgttccaaattcaaatattaataaagttgaacctggtaaaatatataactgtgatgaacctaaagatattgatttagttgtatggacagcaggaattcaacctgttgaagttgttcgtaacttgccgattgatataaatagtaatggacgygtgatagttaaccagtatcatcaagtaccaacatatcgtaacgtctatgtagttggtgattgtgctgatttaccacatgcgccaagtgctcagttagcmgaagttcaaggtgatcaaattgccgatgtgcttaaaaagcaatggctaaatgaaccattacctgacaaaatgccggaactaaaggtacaaggtatcgttgggtcattaggagataarcaaggttttgcatatatcatggaycgcactgtaacaggacgactcgcttctattttraaatccggcgtactttggttatataaatatcataatggttaa

SEQ ID NO: 1312 - DNA, 696 bp, Staphylococcus aureus
atgccaawaatyacyagttatatcactcaagaygacggcacaacaacagttgtcatctcgggygtcgaattaggcaataaagaaacattactacttgataacggrtttgatgtrgaagtmgatgtaarcgtyatagatccrtttcaaattaccggcaagcaacgwcgaaaaatattcgcscttgtcaaagacatagaagaacatacaggtcaaccaatggactatatgagacatatgttcatcgagtttgtaagaacgtactayggctatgatgaacgtatttcgctwagtaattgtacgagaacacaagcaagtcaaatcattgaagcaacgcttgactggacgttctacaatgacataccacttagctacaaaacgagtaatctactgaaacaagataaatcrttcttatactggtcaactgttaaccgcaactgtgtaatatgcggaaagcctcacgctgacctagcacattaygaagcrgtwggyagaggcatgaacagaaayaagatgaatcactaygacaaacatgtattagcgttatgtcgcgaacatcacaaygagcaacatgcgattggcgttaagtcgtttgatgataaataycacttgcatgactcgtggataaaagttgatgagaggctcaayaaaatgctgaaaggagaagamaawggragaagtatcgtggataaaacttaa

SEQ ID NO: 1313 - DNA, 1155 bp, Staphylococcus aureus
atgcattggacaattatcggcggtggcatacagggaactgcaatcgcacaaaaactattatcaagcggattaacaacagacckattaacaatcattgacccacaygaaactttttgccaaaggtttaactcatwtacaaatcgaatagaaatgccttatttaagatcaccgattgtacatcacgtacatccacaaccgttccatctaaaacaattcgctaaacagcaccaatatacaaatgctttttatggtccttatcarcgacctgaattgacaatgtttatgratcatattgcacatgcttctaaacaatatcaattagaggattgcttggttcaaggtttagttcaaactttagataaacaagaagacaaatggcatatcaagttagaagatggacaaattatcactacagattgcgtcgttattgcaataggyagtacaaatattccgtttatgcctgacattttaaaagacaaacagaatgtaaatcatatcttcgagaaagaacwtgatcaagtagtataygataagaccgatcatatcgttggtagyggyattackgctgcacatcttgcacttaaattgttaaatcatgatracgataaaaagattcatttatggctaaataaagatattgaaatacatgactttgatgctgatcctggttggttaggtccgaaraatatgtctwcatttttaagtactaaaagyatgcctgaaagaaatgccattgtacaacgygaacgtcataaaggatcaatgcctcacgaactgtacttacgccttaaaaaacatattaaaaatggtcgtataaatgtgcataaaacacctatcactcaaattagtgrtggtktaattaacactgaaaatrattctgttccatatcaacagattatggttgcaactggttttgaacaagattttatgtcacaaccacttattaagcaattaatacaaaattatgatgcacctatcaacgaatgtaattaccctgttatttccgaaaaattagaatggataccaaatctatwtgtcgcaggatgctttgcagacttagaattaggaccatttggtagaaatgttatgggtggccgtaaagctgccgaacgcattgaacaagcatttctaaaaytacaacaatatagcgcataa

SEQ ID NO: 1314 - DNA, 357 bp, Staphylococcus aureus
atgatcaaaatcatactgattagtcttgcacttatctttgttatcatcggtgctttaattagcgccctrgcagcyataggattattgagacttgaagatgtatattcacgtgcacatgctgccggaaaagcatcaacattaggtgcaatgtcattactatttggtacktttttatattttattgctactcaaggttttgtaaatatgcaattaatcgttgcgattatctttgtattaattacaggtcctctttcaagtcatatgattatgaaagcagcatataatattaaaacgccttatactaaaaagactaaagtcgatgaaatttcdgaagacttaaaagacacaaaattrtag

SEQ ID NO: 1315 - DNA, 294 bp, Staphylococcus aureus
atgaatcataatgttattatcgttattgcattaatcatagttgtcatttctatgttagctatgctcattcgcgttgtgctaggcccatcacttgccgatcgtgttgtcgcattagatgcgattggtcttcaattaatggcagttatagcattattcagtattttattaaatattaaatacatgattgtcgttattatgatgattggtatattagcytttttaggtactgcagtattctctaaatttatggacaaaggtaaggtgattgaacatgatcaaaatcatactgattag

SEQ ID NO: 1316 - DNA, 114 bp, Staphylococcus aureus
atggtagcaaaacatgttcgtttgctaccattttatttrcagtatagtgatgagggctatttaacctcaatatacctagtggaaattttaattgcaccatctgaatcagtgaca

SEQ ID NO: 1317 - DNA, 480 bp, Staphylococcus aureus
atggctgtacaattagtwttaaactttattatygcagtgttttggttgtttgtracaaatagttacacaacaaataactttgtgttaggtttcatctttggcctagttcttgtttacctcttacacagagtgttaccaggtagattttatgtcatcacgctatatcgtattattaaattagttattattttcttaatcgaactgattaaagctaattttgatgttttgaaaattattattaaaccttcgattaaaaatgaaccaggattctttgtttatcacacagatttaaaaaaagattggcaaattgtcttgytgtctaatttaattacattaacacctggtactgtagtgcttggtgtaagtgaygatcgtacaaaaatttatattcatgccatagatttttcaactaaagagcaagaagtagaaagtattaaaacatcattagagaarattgtaagagaggtgggcgaaatataa

SEQ ID NO: 1318 - DNA, 240 bp, Staphylococcus aureus
atgagtgataatttgtcattattcattgactatatcaatgataatataatctatggtagtgaaatcaaacgggagaaattagagaatttatttaatcaatttgctataaaaaatgttgaaaagaacattgtctatgatgaactgaaatctttagatattacaatcattgagtcacaggattcatataaaaataaattgaagagattattttcggttctgttgcaaagtaaaaaaatatag

SEQ ID NO: 1319 - DNA, 1497 bp, Staphylococcus aureus
atgattgaaagtaatatgcttgtgttaacgctmgtyattccagtaattacagccatattacttgtctttattggaaarcgtcctattataaagcgttatgtcgcactaggcggtacattattaaccttggtcgcggcaattatcaatttagcaaatgttgtwaaacatggaccawtacgmgtwgarctaggttcatggaaagcrccwtacagtattgtctttgtwttagacatattcagtgcsctactaatwattactagtattattattacagctattgtgattttatattcawrccaaacaattggtattgaacgtgaaagatattattattatttttcagtactatttatgttaataggtatcattggtgcattcacaactggtgacattttcaacctattcgtatttttcgaagtatttttaatgtcatcttatttcttattagtaattggttctacaaaaattcaactacaagaaacaatmaaatatgttcttgttaacgttgtatcgtcatccttcttcgtaatgggtgtagcgattttrtattcagtagtaggaacattgaatctagcagatataagcaataaattagctaacctttcagcgcatgacagtggcttagtcaatatcgttttcatactatttatctttgtttttgctacaaaagctggcgtattcccaatgtttgtttggttacctagtgcatactatgcaccaccaattccaatcattgcattctttggtgctttgttaacaaaagttggtgtttatgcaatcrctagaacattragcctattctttagtgataatgtaagcttttcacattatgtcattttattcttagcactattaacgatcatctttggttgtgtcggtgctgttgcatatgccaacattaaaaaaatcatcctatacaatgtcatgattgctgtaggtgtgatcttagtcggcgttgcaatgatgacagagtcaggtatgattggkgctatttactatacattgcacgacatgttagtaaaacttgcattattcttgcttatcggaattatgattaaaattacaggcactgctgatttaagacaatttggtggcttaattaaacgatatcctgtacttggttggtcattctttatcgcagcattaagtttagctggcattcccccactcagtggcttttatggaaaatttttyattgtccaatcaacatttgaaagaggattttatttaagtggtgtcatygtcttattatcaagtttagtcgtattatattctgtcattcgcatattcctacaaggctttttcggtcaaccaaaaggatatgatcttaataacaaagtcgacgtcaaatatttaactacgattgcaatcgwtgcagttgtgataactgttttatatggattgtcagcagattacttatatccaatggtaaaagctggtgcagaaacattctacaatccatcaacctacgttaaagctgtattaggaggtaaataa

SEQ ID NO: 1320 - DNA, 102 bp, Staphylococcus aureus
ttgttactcctagaaaggactagcatgtctgattttgaaatgctkatgrttgtattaacaatcattggtttagtattgattagtactcaagaccataaaaaa

SEQ ID NO: 1321 - DNA, 342 bp, Staphylococcus aureus
gtggaaattattatgatttttgttagtggtattctcacagcaattagtgtctatctcgttttgtctaaaagtctgatacgaattgttatgggaactacrctattaacacatgcagcaaayttatttttaataactatgggcggacttaaacatggtactgttccaatttatgaagcgaacgtaaaaagctatgttgatcctatcccgcaagcacttattttaacagcaatcgttatcgcctttgcgacaacagcctttttcttagtattagcatttagaacatataaagaattaggcacagataacgttgagagtatgaaaggagttccagaagatgattga

SEQ ID NO: 1322 - DNA, 423 bp, Staphylococcus aureus
atggaagtacattacagtagtaaaacaaacgagtggacaacaccacaacatttatttgatgacctaagcgaagaattcagttttacattagatccttgttcaacagacgagaacgccaaatgccggaagtattatacagtaaaagataatgggttaattcaagactggtctgaggacattgtttttatgaacccgccatacggtcgaagtattaagcgttgggtcaagaaggcttacgaagaaagtttgaaaggcgcaacggtagtttgtttaatacccgcaagaacagacacgacatattggcatgattacatttttaataaggctgatgatataagattcctacgcggtcgtctgaagtttggagatagtaaaaacagcgctccttttcctagcgcaattatcgtttatagaggtgcacaa

SEQ ID NO: 1323 - DNA, 429 bp, Staphylococcus aureus
atgaatagacaacaaaatgatctaattttgcaatttgctgcagttattatctttttcatggtaatggtctttggtttttcacttttcttagcaggacattatacacctggtggcggtttcgtcggcggattattattcgcaagttcacttgttatcattacgattgcatttgatatagaaacaatgcgtaaaattttcccrttagattttaaaatcttgataggtatcggattagttttttgtattgcgacgcctatygcaagttggtttttaggcaaaaatttctttacgcatgtcacatttgatataccgttatttatattagaacctgttcatatgacaacagcagtattctttgatttcggtgttttatgtgcagtagttggtactgtcatgacaattattatttcgattggagagaacgaatag

SEQ ID NO: 1324 - DNA, 2406 bp, Staphylococcus aureus
gtgagtttgttacatattgcggtgatattaccgttaatattcgcactcattattcctatcctgtatagattttttaaacgtatacatttaggatggttcgtattayctgtccctatcgtcatatttatttatatgcttacattaattaaaacgacgatgtcaggtaatactgtaatgaaaaccttaaattggatgcctcattttggtatgaactttgatttatatcttgatggcttaggtttactctttagtttgcttatttcaggaatcggcagtttagtagtattatattcaatcggctacttaagtaagtcagaacaactagggaatttttattgttatttattactatttatgggtgcaatgttaggtgtcgtactttcagataatgttattattctatatttattctgggagctaacgtcattttctagttttttacttatttcattctggcgcgaacgacaagcatctatatatggtgctcaaaaatcgctyataatcacagtatttggtggtctatcattattaggtggtatcatcttactcgctataccaacrcaatcatttagcattcagtacatgattcaacatgcttctgaaattcaaaatagcccattcttcatttttgcgatgattttaatcatgattggtgcttttacaaaatctgctcagtttccattttatatttggctaccagatgcaatggaagcacctacaccagtcagtgcttatcttcattcagcaacaatggttaaagcagggttatatttaatcgctcgaatgacaccaatcttcgcagcatcgcaaggttggrtatggactgtcacactygttggtttaattacrttattctgggcttcgctaaacgcaacaaaacaacaagacttgaaaggtatactggcattttcaacagtatcccaattaggtatgattatggcgatgcttggaatcggtgccattagttatcactatcaaggcgatgatagcaaaatatatgctgctgcattyacggctgcaatattccatttaatcaaccatgcaacatttaaaggtgccctatttatgattacwggtgcagtggatcattctactggtacacgtgatgttaagaaattaggtggcttactaacaattatgcctatttcatttacaatcactgttattacagcattaagtatggctggtgtaccaccgttcaatggtttcttatcaaaagaatcatttttagaaacaacatttacagcaagcmaagcaaatttattcagtgttgatacattaggctacctattcccaatcattggtatagtgggcagtgtcttcacatttgtatattcaattaaatttataatgcatatatttttcggacaatataaacctgaacaattacctaaaaaagcacacgaagtatcaatattaatgcttttatcaccagctattttagctacattagtaattgtattbggtttattccctggcattttaactaattcgattattgaaccagctacatcttcgattaatcatacggtaattgatgatgttgaattccatatgttccatggattaacgcctgcctttttatcaacattagtgatttatattttaggtatcttactaattgtgacatttagttattgggtgaaattgttgcaacgacaacctggtaaactaacattcaattattggtacaacagaagtgcaaatgttattccaaactactctgaaaagatgacgaatagctatgttaccgattattcacgtaataatttagttatcatttttggtgcattaattttattaacatttgtcactrtattctcagtrcctttcaacattaattttaaagacgttagtccgattagaattttcgaagtttgtatcgtaattttattattaagtgctgcctttttaattcttttcgctaaatcaagattatttagcatyattatgttaagtgcagttggatatgctgtgtctgtattgtttatattctttaaagcacccgacttagcattgacacagtttgtcgttgaatctatttcaacagcattgttcttattatgcttctaycacttaccaaatttaaatcgttataatgaaaagcgctcattccagcttactaatgctttaattgctggtggtgttggtttgtccgtcattattatcggtttaattgcatacggaaatagacattttgaatcgatwtctaagttttatcaagagcacgtttatgatttagctcacggtaaaaacatggtaaacgtyatactwgttgatttccgtggtatggatactttattcgagtcatctgtgcttggtatcgcaggattagctgtatatacaatgattaaattacgtaaaaagcgtcaaacgcaaggtaacgaggtgaaaaatcatgaatag

SEQ ID NO: 1325 - DNA, 105 bp, Staphylococcus aureus
ttggtattgttarcttttgtaacgaccatacatgataccgatgatggtcgtttttttaatgaacacaaacatgctaacaacaaattgctaaaacatagtttgatt

SEQ ID NO: 1326 - DNA, 384 bp, Staphylococcus aureus
atgaagctatatcgattttcacacaaaacaggtagctatggtgtcacgattgttgaagaaaatggagacgatgtccttgttaaagttgaacaagttatcaaacacccgaaacaaggtgatttacataaccctactgaaactgaaggtgtatttttccatgamcgcaaagcattaagycattttgaaaaacgctatacgaaacgttcacaattacgcgacttcaatgttgatgtattgcgctatgaagattcacttcaacaagcaattacagatttagaaactaaacttaaarctcagcaaacaaaacatgctgaaatgtctttagctagtttagcacgcttaaaagaagattattcacttcaatacaaagaaaattttaaataa

SEQ ID NO: 1327 - DNA, 930 bp, Staphylococcus aureus
atgactaactcttcgaaaagcttcactaaatttatggctgcttctgctgtttttactatgggatttttatcagtacctactgctggcgctgaacaaacwaatcawattgcaaataaacctcaggctattcaatggcatacaaatttaacgaatgagcgattcactactatcgcacatcgtggcgcaagtggctatgcaccmgagcatacgtttcaagcatatgataagagtcataatgagttaaaagcatcktatatcgaaattgatttacaacgtaccaaagatggmcatttagttgctatgcatgatgaaamtgttaaccgtacaacaaatggacacggtaaagttgaggattatacccttgatgaattaaaacagttagatgcaggaagttggtttaataaaaaatatccaaaatacgcaagagcaagttataaaaatgctaaagtacccactttagatgaaattttagaacgttatggyccraatgcaaactattatattgaaacaaagtcacctgatgtatacccaggaatggaagaacaattattagcttcattgaaaaagcatcaccttttaaataamaataaattaaaaaatggacatgtaatgattcaatcattttctgacgaaagtttaaagaaaattcatcgtcaaaataagcatgtgccattagtaaaattagttgataaaggtgaactacaacaatttaacgaccaacgcttaaaagagatacgctcttatgcgattggattaggtcctgattatacagatttaactgaacaaaatacccatcatttaaaagacttaggatttatagtacatccttatacagtgaatgaaaaagctgatatgttacgattaaataaatayggcgttgatggtgtctttacaaatttcgctgataaatataaagaagtcattaartag

SEQ ID NO: 1328 - DNA, 294 bp, Staphylococcus aureus
atgaagcaccctaaaaagggcgtgttggatacagtaatatacaataccgatattacagttactaacattccaaataaagtatataattatattgtgaatggcaagcctgctattgaatggattatagatcagtacaacgtaagcatcgacaagaaatctggaatattagatgatcctaatgaatttagtgaagatccgaattacattttaaatctgcttttatcagttattactgtaagtatgaaaactcttggattaatagatwaattaccagattttgaagtattagattaa

SEQ ID NO: 1329 - DNA, 357 bp, Staphylococcus aureus
atgagtatcgtaaagattaacggtaaaccatataaatttaccgaacatgaaaatgaattgataaaaaagaatgggttaactcctggaatggttgcaaaaagagtacgaggtggctgggcgttgttagaagccttacatgcaccttatggtatgcgcttagctgagtataaagaagttgtgttatccaaaatcatggagcgagagagcaaagagcgtgaaatggctaggcaacgacgtaaagaggctgaactacgtaagaagaagccacatttgtttaatgtaccacagaaacatccaagaggacgttatgcgtgctacctgatggaaaacgacatattcgtgaaagttaagaagtag

SEQ ID NO: 1330 - DNA, 1380 bp, Staphylococcus aureus
atgagcaataaagcttggggcggtagatttgaagtacaacctgaagagtgggttgacgactttaacgcatccattacttttgaycaaacgctcataratcaagatatcgaaggcagcattgcrcatgcaactatgcttgcgaatcaaggcattattagtcaacaagacagcgaacaaattatacaaggactaaaatctattcaacatgattatcatcaagatcaaattcaatttagtgcatcattagaagatattcatttaaatattgaacatgaattaattaaacgtatyggtgatgctggtggtaagttgcatactggacgcagtagaaacgatcaagttgcaacagayatgcacttgtacactaagaaacaagtgcaagatatcatcgcattaattaagtcgttacaaagtgtaattgtagacatcgcttccaataatgttgatacaattatgcctggttatactcatttacagcgtgcacagccaatttcatttgcacatcatattatgacttatttttggatgttacaacgagaccaacaacgatttgaagatagtttaaaacgaatcgatattaatcctttaggtgcagcagccttaagtggtaccacataccctatcgatagacacgagacaacagcattgttgaactttggcagyctctatgagaatagcctagatgctgttagtgacagagactatattattgaaacattgcataatatttctttaacgatggttcacttatcacgytttgcagaggaaattattttctggtccacagacgaagctaaattcattacattatcagatgcattttcwactggctcatctattatgccacaaaagaaaaatcctgatatggcagaattaattagaggtaaagttggtcgaacgactggtcatttaatgagcatgcttatgactttaaaaggattacctctagcatataacaaagatatgcaggaagataaagaaggtttattcgatgctgtccatacaattaaaggttctttacgtattttcgaaggtatgattcaaacgatgacmattaataaagaacgactcaatcaaactgttaaagaagatttttcaaatgcaacggaactagcagattatttagtaactaaaaatattccatttagaactgcacatgaaattgtaggaaaaatcgtcttagaatgtatacaacaaggtcattatttattagatgttcctttakcaacatatcaacaacatcattctagtatygatgccgatatttacgattatttgcagcctgaaaattgyttraaacgacgtcaaagttacggktcwacrggkcaatcatcggtcaaacaacaacttgatgttgctaaacaattactatcacaataa

SEQ ID NO: 1331 - DNA, 228 bp, Staphylococcus aureus
atgacacatttgacaaaggttttagatacactaactggaatatgcgtagtattattatttagtaaatattttgtggygtatgcaaatatggtgtttgattggaatttaagatggtatttgctagaaaacataccacatttgccaattatattatttattctgatgtttattttcggagtaccttctgaaatgataaaagataggcaaaggaaaaataacggygtttaa

SEQ ID NO: 1332 - DNA, 1158 bp, Staphylococcus aureus
gtggccgttcaatggcttatcgacaaaggatacgacgttgtagcttgttgcctagatgttggtgaaggtaaagatttagacatcgtttataaaaaagctttagatatgsgagcwgttgaatgtcatattattgatgcaacaaaagaatttagtgatgagtatgtaagttatgcaatcaaaggaaatttaatgtatgaaaatgcatatccattagtttcwgctttatcaagaccattaatcgctaaaaaattagtagagattgctgagaaaacaaattcagtaggtattgcacatggttgtactggtaaagggaatgaccaagtacgtttcgaagttgccattaaagcattaaacccatcattgaaagcattcgcacctgtacgtgagtgggcatggagtcgtgaagaagaaatygattatgcaattaaacataatatccctgtatcaatyaaccatgattcaccttattctatcgatcaaaayctatggggcagagcgaatgaatgtggtattttagaagatccttatgctgcrccaccagaggatgcgttcgatctaacaaatgctttagaagaaacaccagatrctgctgatgaaatcattttaacgtttgataaaggcatcccagttcaaattgatggcaaaacatatgaattagacgatttaattttaacgttgaatgcattagctggtaagcatggtatcggaagaattgaccatgtagaaaatagacttgtaggtatcaaatcaagagaaatttatgargcacctgctgcagaagttattttaaaagcrcataaagcattagaaacgattacgttaackaaagatgtygcacactttaaaccaatcatygagaagcaatttgctgaacaactatacaatggactttggttctcacctttaactgatagcttraaattatttattgatagtactcagcaatacgtaagtggtgatgtcagaattaaattattcaaaggtaatgcyatcgtraatggtagaaaatcaccttacacattatatgatgaaaaattagcaacttatacaaaagaagatgcatttaatcaagacgctgctgtyggctttatcgatatctatggtttacctactcaagtaaatkcgatgytrcatggaggctatagcaatgagcaataa

SEQ ID NO: 1333 - DNA, 1221 bp, Staphylococcus aureus
atgactgatttgttgaaaattaaaaacttcagattgttctttttagcagaaataatttcagcattcggagttggaattagtacagttggggctaattggtatttaatcgacaaaactaacgactcccaactattaggtattatgttagctttaaatgtattatccggtttcttagcttctcctataataggtggactagccgataaatataatagacgaaatattattttaatcacctatcttcttcaggtaatattatatttactcattgtcatagcactcgtaatgataggatttgagacctatttagtgattggatttgcgattgttaatgggataggttggactacgtatatggcaacatctagaagtttagttaaacagatattaaaaccagatcaatatacagatgcaaattctctattagagattagtttgcaaacaggtatgtttattgcaggtggattatcaggaatattatataaaataaatggattcactctaattatagcgatgactataatgatgtttctaatcagcatttttatgttatttagattgcatgtagataaaccaactcattcagaggaagaatcaacaaatagcttattgcaagaatatttattaggatggaaatttttaaaagacaacatgatgatatttatttttggagttatttcaatcataccaatggtgtttacaatgatctttaacatatcattaccaggatatgtttataatgttttaaaactttcgtctgtacaatttggtttttcagatatgttatatggcattggaggattatgtgcaggtttaatttcagctattctttcgaagaaaatctcaactaaagtattgatatttttgttatatttcatattagtcataaattcagcactatttatttggataaactcagcattttacttattcataggatcatttatactaggctactcaatttcatcaatcagaatttatatgaatacagctataatgaacactgtttcagataaatatgtcggtcgctcatttacgatatggacgtcaatttcattgttactgcaaagtttmattgctccatttttaggaagatggattaatgaaattaatgataaattcggtttctatattatactcattttatccttactcatatttgttacactgctgcttgttaacaaaacagacaaaataaaatatgcacataaagaagagtga

SEQ ID NO: 1334 - DNA, 168 bp, Staphylococcus aureus
atgctagaatctagagagcaattatcagtcgaagaatacgaaacattctttaacagatttgataatcaagaatttgatttcgaacgtgaattgacacaagatccatattcaaaagtatacttatacagtatagaagaccatatcagaacatataagatagagaaataa

SEQ ID NO: 1335 - DNA, 1317 bp, Staphylococcus aureus
atgcccaaaatagtcgtagtcggagcagtcgctggyggwgcaacatgtgccagccaaattcgacgtttagataaagaaagtgacattattatttttgaaaaagatcgtgatatgagctttgctaattgtgcattgccttatgtcattggcgaagttgttgaagatagaaratatgctttagcgtatacacctgaaraattttatgatagaaarcaaattacagtaaaaacttatcatgaagttattgcaatcaatgatgaaagacaaactgtawctgtattaaatagaaagacmaacgaacaatttgaagaatcwtacgataaactcattttaagccctggtgcaagtgcaaatagccttggctttgaaagtgatattacattyacacttagaaatttagaagacactgatgctatcgatcaattcatcaaagcaaatcaagttgataaagtattrgttrtaggtgcaggktatgtttcattagaagttcttgaaaatcttwaygaacgtggtttacaccctactttaattcatcgatctgataagataaataaattaatggatgcygayatgaatcaacctatacttgatgaattagataagcgggagattccataccgtttaaatgaggaaattratgctatcaatggaaatgaaattacatttaaatcaggaaaagttgaacattacgatatgattattgaaggtgtcggtactcaccccaattcaaaatttatcgaaagttcaaatatcaaacttgatcgaaaaggtttcataccggtaaacgataaatttgaaacaaatgttccaaacatttatgyaataggcgatattgcaacatcacattatcgacatgtcgatctaccggctagtgttcctttagcttggggcgctcaccgtgcagcaagtattgttgccgaacaaattgctggaaatgacactattgaattcaaaggcttcttaggcaacaatattgtgaagttctttgattatacatttgcgagtgtcggcgttaaaccaaaygaactaaagcaatttgactataaaatggtrgaagtcactcaaggtgcacacgcgaattattacccaggaaattcccctttacacttaagrgtatattatgacacttcaaaccgtcagattttaagagcagctgcagtaggaaaagaaggygcagataaacgtattgatgtactatcgatggcaatgatgaaccagctaactgtagatgagttaactgagtttgaagtggcttatgcaccaccatatagccaccctaaagatttaatcaatatgattggttacaaagctaaataa

SEQ ID NO: 1336 - DNA, 1266 bp, Staphylococcus aureus
atggaaaagatgcatatcactaatcaggaacatgacgcatttgttaaatcymacccmaatggagatttattacaattaacgaaatggkcagaaacaaaraaattaactggatggtacgcgcgaagaatcgctgtaggtcgtgacggtgaarttcagggtgttgcgcarttactttttaaaaaagtacctaaattaccktatacgctatgttatatttcrcgtggttttgttgttgattatagtaataaagargcgttaaatgcattgttagacagtgcaaaagaaattgctaaagctgagaaarcgtatgcaattaaaatcgatcctgatgttgaagttgataaaggtacagatgctttgcaaaatttgaaagcgcttggttttaaacataaaggatttaaagaaggtttatcaaaagactacatccaaccacgtatgactatgattacaccaattgataaaaatgatgatgagttattaaatagyttygaacgccgaaatcgttcaaaagtgcgcttggctttaaarcgaggtacgacagtrgaacgatctgatagagaaggtttaaaaacatttgctgarttaatgaaaatcactggggaacgcgatggcttcttaacgcgtgatattagttactttgaaaatatttatgatgcgttgcatgaagatggagatgctgaactatttttagtaaagttggayccaaaagaaaatatagcgaaagtaaatcaagaattgaatgaacttcatgccgaaatwgctaaatggcagcagaagatgraaacatctgaaaagcaagctaaaaaagcgcaaaatatgattaatgatgcgcaaaataaaattgctaaaaatgaagatttaaaacgagacctagaagctttagaaaaggaacatcctgaaggtatttatctttctggtgcactattaatgtttgctggctcaaaatcatattacttatatggtgcgtcttctaatgaatttagagattttttaccaaatcaycatatgcagtatacgatgatgaagtatgcacgtgaacatggtgcaacaacttacgatttcggtggtacagataatgatccagataaagactcwgaacattatggmttatgggcatttaaaaaagtgtggggaacatacttaagtgaaaagattggtgaatttgattatrtattgaatcagccattgtaccaattaattgagcaagttaaaccgcgtttaacaaaagctaaaattaaaatatctcgtaaattaaaacgaaaatag

SEQ ID NO: 1337 - DNA, 825 bp, Staphylococcus aureus
atgcaaccacatttaatatgtctagacttagacggaacattattaaacgataacaaagaaatttcatcatatactaaacaagtattaaatgaattacaacaacgtggacaccaaattatgattgcgactggcagaccttatcgtgcaagtcaaatgtattatcatgaattaaatttaacgacaccaattgttaattttaatggcgcttacgtacatcaccctaaagataaaaacttcaaaacttgccatgaaattttagatttaggcatcgcacaaaayattattcaaggattacaacaatatcaagtatcgaatattatwgcagaagtgaaagattatgttttcattaayaatcatgatccaagattatttgaaggtttttcaatgggtaatccaagaattcaaactggtaatttacttgtccacttgaaagaatcccctacctcaattttaattgaagccgaagaaagtaaaatacctgaaatcaaaaatatgcttactcatttttatgccgatcatattgagcatcgacgctggggcgcaccattccctgtcattgaaattgtaaaacttggwattaataaagcaagaggcattgarcaagttagacaatttttaaatattgamcgaaataatattattgcattcggtgatgaagataatgatatwgaaatgattgagtacgcscgycayggtgttgctatggaaaatggtttgcaagaacttaaagatgtagcgaacaatattacattcaacaataatgaagatggmattggtcgatatttraatgatttctttaatttaaatattagatattactgttaa

SEQ ID NO: 1338 - DNA, 870 bp, Staphylococcus aureus
atgaatttrgattggtactatacatttgtcattttagcgaagacgttaaactatcgattagctagtgaagaaattaatctcactataccttctatacataagcaaattaaaaatttagaacagcatctcaatgtgaaactatttgaaacttataaaaatcaaattatcttgactgaagatggtcatacatttcttccaattgcgcaaagttttattgaacaatatgaaagtggcatcaaacatatccaacttaaaaaracgatgtttcaatcgaaattaaatgttgtcgtgtcttcatatatcgcgacattcattatgcccaaatttttaaaatctttctttaacgagcatccktttatcgatgtttctctycatgtcaaaaatgaaaatattgaaaaagatattaataatcatacgtatgacatcgggattagcagaaatcaacctaaactaagagaagttcattctgaaaaagtatgcgaaggtaaaattgtattgattgctcccaataaagagaataatcatcttctaactgaggcatctttatttgaaaaatacaaaataataagtgataaccatccagaatattggtcatcacttaaaaataatattttaaatatttatgraaaagcacaatttctatctatcaatgatgtgcatacttcaattaaattaatcgaaatgaatcaaggtatatcattcctgcctmtttatataacaamaratagtrattacaatatttcggttattaacacgaaaattttacaagcrcctatttcatttacatatatatacagcaaaaaagaaaryccagaaatattggyktttattaaatcatttaaaaagtatattgccaatgaacaattataa

SEQ ID NO: 1339 - DNA, 186 bp, Staphylococcus aureus
atgaaacacctcgtaacattcttttgggcattattattaatgcaaatggttaactttgtacttaatagcctagtaggtggagacagcttaaatgtagtgaatccaattatcatggcagtattgttcacgattttcacagcaattttygctgcagtaattaaaccgccgaaagattcatcacaataa

SEQ ID NO: 1340 - DNA, 372 bp, Staphylococcus aureus
atgttgaaaaaatggcttggaatggcactaataacsccaatrytaacgtttattatatggstttttaatagccatactatcattacatatttaaatatattgttttatgtttcattaattatttttattagcatwtttttgattttacttgtacaagaaggcatttttgatgcgacaagttatggttttagaagattaaagtatcaaatgtcatcttcgaaaaagaagaagtctatctctgatgatccatttttcaacccacaagaggtaaaaaaagagcattactttgtttctacatggataatmccyttattattaataaatattytatattttattatgacgattgtgctgtcgctcatcttagtataa

SEQ ID NO: 1341 - DNA, 195 bp, Staphylococcus aureus
atgacggawgttaaaattaaaactatttcaggyggagtttattttgtaaaaacrgctgaaccttttgaaaaatatgttgaaagaatgacgagttttaatggttatatttacgcaagtactataatcaagmaaccaacgtatattaaaacagatacgattgaatcaatcacacttattgaggagcrtgggaaatga

SEQ ID NO: 1342 - DNA, 990 bp, Staphylococcus aureus
atggaracattattttcaggcatycaacctagtggaattcctactattggaaattatattggcgcaytaaarcaatttgttgatgtgcaaaaygactatgattgttatttctgtatcgtagatcaacatgcaattacaatgccacaagatcgyttaaaattacgtaaacaracyagacaattagcagcgatttatttagcttctggtatagatccagacaaagcaacattgttcatacaatctgaagtccctgcacacgtacaagcaggatggatgttaactacrattgcttctgttggmgaattagagcgtatgacgcaatacaaagataaagctcagaaagcagttgaaggtataccwgctggtctattaacatatccacctttaatggcagctgatattgttctttacaatactaatatcgttccagttggmgatgaccaaaagcagcayatygaattracwcgtaaycttgtagatagatttaatagtcgytataatgatgtscttgtgaaacctgaaattcgtatgcctaaagtyggtggmcgtgtyatgagtttacaagayccaacaagaaaaatgagtaaragtgatgayaaygctaaaaacttyatttcattattrgacgarccraatgttgcwgctaaaaaaattaaaagygcwgtractgattcagayggtattattaaattygaycgygacaayaarccaggtatwacaaatttaatttcaatatacgctggattaacmgacatgccwattaaagatattgaggcaaaatatgarggsgaaggttayggtaaattyaaaggygaccttgctgaaatagttaaagcatttttagtagaattccaagaaaaatacgaaagtttctataactcagataaacttgatgatattttagatcaaggtagagataaagcacayaaagyttcatttaaaactgtcaaaaaaatggaaaaagcgatgggwttaggacgtaagagataa

SEQ ID NO: 1343 - DNA, 183 bp, Staphylococcus aureus
gtgtatttaaaaaataaaattgatgagagtgacacacatttatcatataaaatgatgatgaaagcgtgttactcttatttttttatatttagctatagaataatgtctaaaaaagtgtacaatatgaatgtgaaaacgaactttttaaaatgggaatgtgaagtaagaagaaatgtaaacaaa

SEQ ID NO: 1344 - DNA, 204 bp, Staphylococcus aureus
atgaatcagctgagaattttattacatgacggtagtagtttgatattacatgaagatgaattatttaacgaaatagtatttgttttggacaattttagaaatgatgatgactatttaacgatagaaaaagattatggcagagaacttgtattgaacaaaggttatatagttgggatyaatgttgaggaggcagacgatgaytaa

SEQ ID NO: 1345 - DNA, 807 bp, Staphylococcus aureus
atggctggagaattacgaataatggaaaataagagtcgtgaagatatyaatctatcacctgtaagtaaaatcgaaatttattcatttttcgatccatttagctccgattgcttcaaattatcagcaatcttatccaaattaagaattgaatataatcaatatatacgtatcagacatatattaaatccttcgttaaaagtattaacgaaatgccaagctcaaagtacatccaactttgataacatcgccctagcttataaagcagctgagttacaaggtcgtktacgwgymgaamgatttatacatwyaatgcawaatgaaatcatacctaaaagagatattattacaraatcaatgatttgtgactgtattcaaaatgcaggtattgatttagaagtatttaaagacgacttacaaaaaagtaaaytaaccgaaagcttgaaaattgatttgcatattgcaagagaaatggaaatcgaacaagccccttctctcgttttctttagtgaagatgttcatgaagaaggtttaaaagtcgaaggattatacccatatcacatctatacttatataattaatgaattgatgggtaaacctatcgaaaagaatcttcctcctaaattagaaacttatatacagcaacaacaacttgtaacgatggaagaattacttactatttatgaatggccagaaaaacttttaaacaaagagttaaagaagttagcyattcaacaaaaaattgaaaaacttaaatatccagayggcgatttctggaaatctaaaatgcctaaaatcaaatcaaaataa

SEQ ID NO: 1346 - DNA, 318 bp, Staphylococcus aureus
atgattgattatttttacacccttgtagaaaargatgaacgacttaatcacctgtttccaggagattttgcagaaacaagtcgtaaacaaaaacaatttttaacacagtttttgggcggtccaaacatttataccgaagaacacggacatcctatgctaagaaaaagacatatrgmktttacaatcactgaatttgaaagagatgcatggttagaaaatatgcagacagcaattaatcgcgctgcgtttccacaaggtgttggagattatttatttgagcgcttaagattaactgctaatcatatggtgaattcctaa

SEQ ID NO: 1347 - DNA, 594 bp, Staphylococcus aureus
atggcaacaaatcatgaaatagaatttaaacaaatgataactgcatcaatctataataaattgcaagagaaatattttaaagacagtgtgctttttaagcaartcaattactatattgatacacccgatttcaaattaaaggaacatcgctctgcactacgcataagagttaaagacaatcaatatgaaatgactttaaagacaccagcaaaggttggtctattagaatacaactatatcgtcgacattaaaccagagatgaacttgattatttcaaacgacaatcttccagatgacattcgtcaaattatagttgaacagtttggtgtaaargatacaactttatcaatacttggygcattaacgacatatcgccaagaaactaaatataaaggtgatttactbgttttagataaaagtgagtatttcgayactrcggattatgagttagagttcgaagttaaagactataatcaaggtttasaaaagttccaatctttattaaaygaactaaacctcgaacatcatcaacctttaaataaagttcaacgttttttyaagaaaaaagaaacactttcaaacaatataaattaa

SEQ ID NO: 1348 - DNA, 1086 bp, Staphylococcus aureus
atgttaaacaaggtttggttccgaactggcatcgctctgattatgctgttcattctcatcaaactatttatggaagtgcacgaagtatttactccaatagctacaatcatcggttctgtatttcttccatttttaattagtggttttttattttatatctgtctaccttttcaaaactyacttgaaaaagtcggttttccaagatgggctagtataacaacaatcatgttagctttgtttgctattatcggcttaattgttgcgtttgttgcaccaatcatcatttcaaatatcaacaatttaattagtcaracacctgccytacaaaaagaagcagagcaaattattaaattcgcactagctcaaatggataaattacctgaagatgtaacaagtagaattacaaatatggttaaatcaatgggtgatggcgttactaatattttatctaattcattacagtacattacatcattaatttcaaccatcttcttattgattatggttccattcttcttaatttatatgttaaaagaccatgaaaaatttatcccagctgttgctaaatttttcaaaggtgaacgtaaagtatttttcgtagatttattaactgatttaaactttacattaaaatcttacattcaaggtcaagtaactgtcagtgttattttaggtatattcttatatatcggttattcaattattgacttaccatatattcctttattagtwctatttgctggtgtcgcaaacttaattcctttcttaggttcatggttatcatttgcacctgcagcaatactcggtattatagatagtcctactacatttatatgggtttgtatcattacattaattgcacaycaacttgaaggtaatatcattacrccaaatgtaatgggtaaatctttaagtatccatcctytaacaattatcgttgttattttagcagcaggagatttaggtggctttacattagttctgattgcagtgccattatatgctgtacttaaaacggttgttagtaatattttyaaataccgccaacgcattattgataaagcaaacagtaatgttaaggactaa

SEQ ID NO: 1349 - DNA, 183 bp, Staphylococcus aureus
atggtagaacgttatatcaaagttttaatattatatattttcacaacactactatcttctatttcagtaacgtcaaaatgtgtacctaataaagttataaggtttattttacgtactgcaattggttacagtrtatttgcatatggtttacattacttttcaaatttaaaaaagaataagtaa

SEQ ID NO: 1350 - DNA, 231 bp, Staphylococcus aureus
atgcttatttttttatcttacgattttgtacgtgcatgcttgcctaggggtatggctcgagccattagtctctcgcacatactattccctcaggcgtcagcacttacaaaatcggttgtaattttcatttttatacgcattcttactgagattatactaataagaggaatagtaaaagcaattctaagtaaaattgcagataagaggtttgttaaaagcagttctaagtaa

SEQ ID NO: 1351 - DNA, 462 bp, Staphylococcus aureus
gtgaatttatatcaaagcaacattgaaaaggttacagataatcgtcatagcaaaggtgccaactttcataatgatgattacgaacaaattttaatcaaagttttagaatcagatattattattttttcaacaccactctattggtactccatgagtgcgtctttaaaactcttcattgatagatggaccgagtcattgcgagatacgcaaatagacaacttcaaagaaatcatgtcacaaaaaaagtatttgattttaatcataggtggcgacaatccgcataccaaagcacaacctttagtcaaccaattcaaattaatatttgagtttatgaatattactaactatagatttttgatcggcgaaggcaataaaccattcgatattttaaacgactctcaatttatagaagagctcgcaaatataaatcttgcattgaaaaaaggtgatatttatgactga

SEQ ID NO: 1352 - DNA, 1209 bp, Staphylococcus aureus
atggaaaggttcctttatatgcaagattcttcgttaaataattacgctaatcataaaaatttcattttaatgcttattatcttatttttaatggaatttgcgagaggcatgtatatcctaagctatattaatttcttgccaacagtwacatccattgctgtagcaataacgtctctagcattttcaatacattttattgctgatgcatctacaaactttgttataggatttttactgaaaaaattcggcacaaaaatcgttttaacgactggatttattttagcatttacaagtttatttttagttatttggtttccagcatcaccttttgtaatcatatttagtgctatgatgctcggtattgcagttagtcctatttgggtcattatgttatccagtgttgaagaagataaacgtggcaaacaaatgggctatgtttatttttcatggttgttaggcctattggtaggtatggtttttatgaatctacttatcaaagtgcacccaacacgctttgccttcatgatgtctttagtcgttttaattgcwtggatattatattattttgtcgatgtaaagttaacaaattataatactcgtccagttaaagctcaattgagacaaattgttgatgtgacaaagcgccatttattgttgttccctggtattcttttacaaggtgccgcaattgctgcmctagttcctatattaccaacatatgctactaaggttattaacgtaagyacaattgaatatactgttgcaatcattattggtggtatcggctgtgcagtttcgatgctatttttatcgaaactaatagataaccgcagcagaaactttatgtatggtgttattctaagcggatttattttatacatgatattaattttyactctatctatgattgttaatattcacatcktgtggattatcgctttagctatcggtctaatgtatggcatcttattaccagcatggaatacctttatggcacgatttatcaaatcagatgaacaagaagaaacttggggtgtttttaatagtatccaaggattcggctcaatgatmgggccattatttggcggattaattacacaatttaccaacratttaaacaatacattttatttctcggcattaatctttttagtcttagctgtattttatggaagctactttatagyaaatagagaaaaagctaagtaa

SEQ ID NO: 1353 - DNA, 1176 bp, Staphylococcus aureus
atggttactcaaaataaaaagatattgattattactggctcwttcggtaacggtcatatgcaagttacacagagtatcgttaatcaacttaatgatatgaatctagaccatttaagcgtcattgagcacgatttatttatggaagctcayccaattttgacttctatttgtaaaaaatggtatatcaatagctttaaatattttagaaatatgtacaaagggttttattacagccgcccagataaactaracaaatgtttytacaaatactatggacttaataarttaathaatttattgataaaagaaaagccrgatttaatattattaacgtttcctacaccagttatgtcggtactmactgagcaatttaacattaatattccagttgctacagtgatgacagactatcgcttacataaaaactggattacgccgtattcaacaagatattatgtggcaacaaaagaaacgaaacaagacttyatagacgtaggtattgatccttcaacagttaaagtgacaggtattcctattgataacaaatttgaaacrcctattaatcaaaagcagtggttaatagacaacaacttagatccagataagcaaactattttaatgtcagctggtgcatttggtgtatctaaaggytttgacacgatgatyactgatatattagcgaaaagtgcaaatgcacaagtagttatgatttgtggtaagagcaaagagctaaagcgttctttaayagctaagtttaaatctaacgagaatgtattgattctaggttataccaaacacatgaatgaatggatggcatcaagtcaacttatgattacgaaacctggtggtatcacaataactgaaggtttcgcccgttgtattccaatgattttcctaaatcctgcacctggtcaagagcttgaaaatgccytttactttgaagaaaaaggttttggtaaaatcgctgatactccagaagaagcaataaaaattgtagcwagtttaackaayggtaatgagcaattaactaayatgattagtacaatggaacaagataaaattaagtatgctacacagacaatatgtcragacttacttgatttaatcggtcattcatcacaaccacaagagatttatggaaaggttcctttatatgcaagattcttcgttaaataa

SEQ ID NO: 1354 - DNA, 531 bp, Staphylococcus aureus
atggttattcgaccagcatttgatgatgacgatcaaagaaayggtagtgaaataattcggtttgacaaaacgcgtattcaaaatccttttaaagtccagaaaatcattgaacgctcttgcaaattttatggtaatacttatcttggcaagaaagcagagacaaaccgcattactggcatttctagtaaaccacctattttactaacaccattatttccaacttattttttcccaacacattctgacagacaaaatgaaaatatttggttaaatatgcattatatcgaaagtattaaagaattaaaaaatcgtaaatgtaaagtgacatttattaataatgaatcwatcattcttcatgtttcataccacagtttatggcaycaatataacaattccattttttactattacakggtagataaacaatctcgcatgatatcaaaaaatcccgaccaaccaatagattataataaagccacattgaatgtgtttgaagcattgacacgctattctttatttgaagataaataa

SEQ ID NO: 1355 - DNA, 195 bp, Staphylococcus aureus
ctgaataatgcaattaatgttgtgattagtgctaatttaatttctattggtagccaagtcagtacaaaagaccaattattgctaccgagaatgagatatggtaatgcatataatatgagcgctawagcgatacatawacataawgwtarccaactcaatacagcaatccgttttgatctacgcaaaagaatttga

SEQ ID NO: 1356 - DNA, 987 bp, Staphylococcus aureus
atgaaattcattagtaataataatattacagatccaactttaaacttagcaatggaagaatatgttttaaaaaatttaccagcagaagaaagttactttttattttacataaatagaccatctatcattgttggaaagaatcaaaatacgatagaggaagtaaatcagacatatatmgatgctcayaacatcgatgtagtwagaagaatttctggtggtggcgctgtttatcatgatactggcaatttaaactttagtttyataacagatgatgatggtaacwktttccacaatttccaaaaattcactgaaccaattgttcaagcattacaatctttaggcgtmaatgctgaattaactggtcgtaacgatattcaagttggacaagcgaaaatctcaggraatgcyatggttaaagttaaaaatagaatgtttagtcatggtacgttgatgttaaatagtgatttagacgaagttcagaatgcactaaaagttaatccagctaagattaaatcaaaaggtattaaatctgttcgtaaacgrgtagcaaacattcaagaatttttaaatgaccctttagaaattgaagaatttaaaaaaatcatcttgaaaactatctttggagaaactgaagtagaagaatataaattaacggatgaagattgggaaaatattgaaaagttaagtaacgacaaatatagaacttgggmatggaattatggwagaaaccctaaatataactttgaacgcgaggaaaaatttgaaaaaggatttgtacaaatyaagtttgatgttaaacgaggtaaaatcgaacatgcaaaaatwttcggtgatttctttggtgtcggagatgtcactgatcttgaaaatgcattagttggctgtctacacgactttgagcacatagaagaagcactatcagaatatgatttatatcaytatttcggtgacatagatagacatgaattaattagattaatgtcataa

SEQ ID NO: 1357 - DNA, 99 bp, Staphylococcus aureus
atgataaaaatacaagcaattgaactttattacggaaaatcaaacttttcaatgasrctattaatttggctagtcgcgaagatgcatttttctaaaatg

SEQ ID NO: 1358 - DNA, 426 bp, Staphylococcus aureus
atgaaattaggtatgctwttaattagatggatgytagcaacatcattcttagtrcayggyacwttgaaatttgtwgatttagatggaacaattcacttcttaggstctttaggtttaccacctaccatcgcagtattgatgtcaattggtgargttgttggaggtttagcacttattatcggctttttaacgccttatgttaatgttttttatatttgtgttatgttaggctcaatcttcacacttaaacttacaagaggatatgtaagtggttatgaatttgaaatcatacayatcgtaatgaacttagcttgtattagtagttacagctggaagaaatggctacaattttattawcgtggttttgagaggactatcctctctttttttgtatatatcatgcgtaaaaatcctaggttctcatga

SEQ ID NO: 1359 - DNA, 93 bp, Staphylococcus aureus
ctgggcgactatcataatcctaacaacttgtatcactctcatttagatggttacaatgacatcgccattcaccgttatgttcaacagaactta

SEQ ID NO: 1360 - DNA, 129 bp, Staphylococcus aureus
atgaggtatgtaacgatgcgycaattcattaaaagaaytgttaaaacaatccttgtcggttatgtaattaaatttattcgaaataaactttcaggtaaatcatcacatccgacagataataaacataaw

SEQ ID NO: 1361 - DNA, 249 bp, Staphylococcus aureus
ctgcatccaagaaaaacatyacaattacctttaatattgaaaaytattttgaatcttkcacttataggyattgtrattatcgttytwacacatrctgagtttcaacttaatgccggtgatagtaatgtktttttattaammtgggatattcgaggtttaacatcttatattttctcattcttaatactggttgcgcttgtttctaaactaattttaatatttataactagacgacaaagaacatcataa

SEQ ID NO: 1362 - DNA, 291 bp, Staphylococcus aureus
ttgaaaattctaaagttaraaakattggttttcacaacgaatttaagtagaattatarttaaggaggatttacaaatgaaagtcaataaagccatttatgttattgttgcattatttcttggaggtttaggtattcataaattttatgctgataaatttggacaaggtctttttcacttattatttttctggacaggtatccctaccatcatytcaataatacatgcmattwttgtcatttttactaaaaaagcagataaagayggttatattatattccctaaaaattaa

SEQ ID NO: 1363 - DNA, 108 bp, Staphylococcus aureus
atgttaggtgcttggttaacacgttcttggtattttttaaatgcgaagtataaaccgccaactaatgttaaaataactgctaattttttcatcattcaaactcctttc

SEQ ID NO: 1364 - DNA, 777 bp, Staphylococcus aureus
atgctttgtgaaccagacatagatgtactcagtgattcggatgtgcttgtcgaatcggatgtgctcaatgacgttgatgtgcttgttgacactgattctgagtcgctcactgaagtcgagttgtacgttgaaccggacatactttgtgacattgaaacacttgttgaatcggattcactcattgatgttgagtcagatacgctcgttgaacctgaaccagacgtacttaatgattcagatatgcttgttgaagttgaaccacttgttgagtccgatgtacttgtcgatgtcgagtctgaatctgatgtactcaatgattctgagtcactgatagaagttgaatcacttgtagattctgattctactgtactttgtgaaccactgatacttattgaagtagaatcactgatactgtctgatgttgataatgatgtcgacaccgatgtgctttgtgatgacgatgtactagcactcattgacattgatgttgatatcgatgtacttaaggaaccagatgcacttgtacttgttgactggctttgtgacattgaatcacttaatgatgtagatgtgcttgttgagctcgagtcacttamacttgttgaacctgatattgagtcacttaaacttgtcgatgttgaaactgatacgcttccgctcattgagtcagatgttgaaagtgatgtactcgttgaatttgatccactgatgytagacgaatcacttgtagacattgagtcgctttctgatgcactgatgctcatagagtcaaattga

SEQ ID NO: 1365 - DNA, 765 bp, Staphylococcus aureus
atgctttgtgaaccagacatagatgtactcagygattcggatgtgcttgtcgaatcggatgtgctcaatgacgttgatgtgcttgttgacactgattctgagtcrctaattgatgttgagtcrgatttgtcttgtgacattgaaacactygwtgaatyrgattcactcattgatgttgagtcagatacgctcgttgaacctgaaccagacgtacttaatgattcagatatgcttgttgaagttgaaccacttgttgagtccgatgtacttgtcgatgtcgagtctgaatctgatgtactcaatgattctgagtcactgatagaagttgaatcacttgtagattctgattctactgtactttgtgaaccactgatacttattgaagtagaatcactgatactgtctgatgttgataatgatgtcgacaccgatgtgctttgtgatgacgatgtactagcactcattgacattgatgttgatatcgatgtacttaaggaaccagatgcacttgtacttgttgactggctttgtgacattgaatcacttaatgatgtagatgtgcttgttgagctcgagtcacttacacttgttgaacctgatattgagtcacttaaacttgtcgatgttgaaactgatacgcttccgctcattgagtcagatgttgaaagtgatgtactcgttgaatttgatccactgatgytagacgaatcacttgtagacattgagtcgctttctgatgcactgatgctcatagagtcaaattga

SEQ ID NO: 1366 - DNA, 939 bp, Staphylococcus aureus
atgagtaatcaatatcagcaatattctacagttaagaaatattggcatttaatgcgtcctcatacattaactgcttccgtagtacccgttttagttggtacagcagcatctaaaatatattttcttggtagcgaagatcatattaaaatcagcctattcattgccatgttactagcatgcttacttattcaagcagcaactaatatgtttaaygaatactatgattataaaaaaggcctygatgatcatgaatctgtaggcattggtggtgcmattgtwcgcaacggtatgagcccagagcttgtgctacgattagccattgcattttacatcttagcagcratattaggtttgtttttagctgctaactcttcattttggttattaccagttggattagtatgtatggctgttggttacctatatacaggtggycctttccctatttcatggacgcctttcggtgaattattctcaggcgtatttatgggtatgtttattatcgttattgcattctttattcaaactggcaatattcaaagytatgtaatttggttaagtgtacctatagtaatcactatcggtttaattaatatggcyaacaatattcgcgaccgtgtcaaagataaagcaagtggtcgyaaaactttacccattctattaggtaaaaatgcttctttaacatttatggcaatcatgtactttatcgcttatgcmtttattgtacttacgatcattattaaacctggtggctcattattttacttacttgcgttgttatcattcccaatgcctgttaaagttatcagacgtttcaagaagaatgatacaccgcctacaatgatgccagcaatggctgctgctggtaaaacaaatacatttttcggtttattatatgcaytaggtatttatattagtrcattatttgcaggcatttaa

SEQ ID NO: 1367 - DNA, 1296 bp, Staphylococcus aureus
gtgctaagacttgtggaaccacttaaagatattgatccacttaatgagtcggagtcacttgtactagtagaatcactcattgatattgaatcacttagcgaggtagactcgcttacgctttctgaaccacttaatgatgttgaggtactcaatgaaccagatgtacttgttgaagtcgaaccacttgtygattttgaatcacttaatgaatcagattcactcacgctttcygaacttcttagtgacgtcgatacacttaatgatgacgaatcgcttgtgcttactgaatcgctcatcgattgtgagcmactcaatgaactwgactcrcttacactttctgattttcttaatgacgttgagacgctcaatgagccagaatcactkacrcttgttgarccactcatcgatttwgagtcactttcagaattagattcrcttacactttctgaatcatttacagattctgacatactttgtgaatcagatatgcttgcgctcattacttcactagccgatgttgatgtrcttgtcgaatcacttaacgatatagayacactcatcgaaccagatgtactcgcacttgttgagtctgatgttgaatcactmacactatcagataatgacgttgaatcactcatacttgttgatgtacttgtygaaagcgacatactttgtgaatcactwgtacttgtacgcatcgaagtactagttgaagctgatgtactacgagagtcacttgttgatgttgatgtacttgctgatccwgatgcacttgtacttcttgatgtgctttgtgaatcgcttaatgatgttgatgttgaatcggattcacttgtactttctgatgttgagccagaytctgatgtacttaccgatgtwgataaacttgcaatggtcgacatgcggtttgaagttgatgtacttagcgaatcacttaatgatgctgatgtgctttgtgaatcggattcactgctttgcattgacgcagatgttgaatcacttaaagatgttgacgacraatcggattcacttgcgcttgctgagttactgagcgatgttgacgtacttgctgatcctgagttacttgtacttgttgagtcactgagtgatgttgacgcactttctgatgttgaytcacttgcacttgttgagatactttgtgaatcagattcactctctgaaccacttaatgaygctgatgtgcttryygaacctgattggctcgtacttttagatatacttgttgaatcgcttagtgacgttgatgtcgatgttgattcactttggcttgttgac

SEQ ID NO: 1368 - DNA, 771 bp, Staphylococcus aureus
wyrctyrwtgatgttgartcggattyactttcacttgtagaaccacttaatgatgtrgatgtactaatggaatcagatttacttgtactgattgaatcacttgtcgacattgatgtacttaatgaatcagacttactatcacttgtggaatcacttaatgatgttgacaaacttgtagagtyagacaaacttgtactcgttgacatactyagtgatgttgaaacactctcgctcttaaacgttgacgttgattcactgatacttgtcgatgttgaaatggacgyactaccacttgttgaattacttaatgatgttgatgtgctaccagattctgatgtactgtctgataatgacgtactctcacttgtcgaactactcactgactctgatgttgattcagacgtactttcacttaatgattcacttaaaaaggcagatgcactttgtgattctgaatcgctagtactatttgattcacttaatgatataracgtgctctctgaagcagatattgcttcacttatagartcgctcgttgacgttgattcacttattgaatcagactctgatgtacttaagcttgtggaatcactcayagatgttgatgtacgttctgaattacttgtacttaacgatgtcgaagtacttaccgaaccagatgtgctcgtagaagcactttgtgatattgattcacttgatgcagttgatgctgatttgctatcactcgttgaatcactaaacgacgttgatatgctcattgaatcggattga

SEQ ID NO: 1369 - DNA, 279 bp, Staphylococcus aureus
gtgctcatygaactacttacrgacattgatttactgtctgatgcagmtaatgayccacttgtactsatagartcrcttayyatytcwgamgtrctcatygagtctgatgwrcttgttgagacactttgtgatgytgctatgcttagtgatccagawacwgaaycacttgtgctcgtygaatcgctcaatgattctgatgtactcatcgattttgaatcacttgtacttaatgatattgatgtactttgtgaatctgatttgcttgttgacgcactttga

SEQ ID NO: 1370 - DNA, 813 bp, Staphylococcus aureus
ttggctatrctatttgaaatactgatagagtccgaggtgctagctgactcgctcaatgatkytgatgtrctrattgmattygatgtrctrtcacttamygatkstgatgtactagmcgahycwgatrtactygttgatarrctttktgacttagacaagctyccygatgtactcatrcttamtgartcactkarygaygttgatgtrcgcaatgaatcagatgtrcttgttgatagactttcggatttttcagtactgytagagttygaaatmgaatcgcttaatgatgttgatttactarctgaaycygacatgcttgatgatacactttgtgaattcactaaacttgtgcttgttgagcttgatacactattactttcagatgtgcttaatgacttagatgcactcacagaatcagataggcttacacttgtcgatttcgaggtactagctgawgtagataccacaatcgatcctgatgtrctcgttgatgcactttgtgagtcagctttacttgttgasacactttgrgattgttgtgtacttcctgatgttgatacggaatcactcatgctatttcttgttacttcatatttaaaagttgtygtcgttttgttaccrctcgcatctgtagaaacgattgtwatagtacttgtaccaatgtttgttggtgtaccactaatrgtattatttgtrctatcgaatgttartccagayggcaatccwgtsactgtattygtyacygcattyccactrttrtcytgcgtagcaattttaatcggkgatattggygaatacacttctgatgattga

SEQ ID NO: 1371 - DNA, 111 bp, Staphylococcus aureus
ctgaaagttcgaagttttactggtgcggtgctagttgacgttgtgctagttttgtttaagttgaccgaagatggcgttgtgctttgtgaagtgttatttgatgcagtactt

SEQ ID NO: 1372 - DNA, 330 bp, Staphylococcus aureus
atgtatcaactacaatttataaatttagtttacgacacaaccaaactcacacatctagaacaaaccaatatcaatttattcattggtaattggagtaatcatcaattacaaaaatcaatttgtatacgtcatggcgatgatacaagtcacaatcaatatcatattctttttatagatacggcacatcaacgcattaaattttcatctwttgataatgaagaaatcayttatattcttgattatgatgatacacagcatatcctcatgcaaacgtcatccaaacaaggtattggcacttcgcgmccaatygtttatgagcgcttagtataa

SEQ ID NO: 1373 - DNA, 744 bp, Staphylococcus aureus
atgctaactgtatatggacatagaggattacctagtaaagctccggaaaatacaattgcatcatttaaagctgcttcagaagtagaaggtataaactggttggagttagatgttgcaattacaaaagatgaacaactgattatcattcatgatgattatttagaacggactacaaatatgtccggggaaataactgaattgaattatgatgaaattaaagatgcttctgcaggatcttggtttggtgaaaaattcaaagatgaacatttgccaactttcgatgatgtagtaaaaatagcaaatgaatataatatgaatttaaatgtagaattaaaaggtattactggaccgaatggactagcactttctaaaagtatggttaagcaagtggaagaacaattaacaaacttaaatcagaatcaagaagwgctcatttmaagctttaatgttgtgcttgttaaacttgcagaagaaatcatgccacaatataacagagcagttatattccatacaacttcgtttcgtgaagactggagaacacttttagattactgtaatgctaaaatagtaaacactgaagatgccaaacttactaaagcaaaagtaaaaatggtaaaagaagcgggttatgaattgaacgtatggactgtaaacaaaccagcacgtgcaaaccaacttgctaattggggagttgatggtatctttacagacaatgcagataaaatggtgcatttgtctcaatag

SEQ ID NO: 1374 - DNA, 534 bp, Staphylococcus aureus
atgcatgcaatgcaatatcatgttaagttgcctagtgattacaatatggaaataattagagatagagttcgattaaatggttataagactgatggatttaaaaatttaattataaaagcttatttaataagtcaaacaactactaattgcattacaaatacttattcaccattatatttatggagaagttcagaggggatgactgaatttatattcaatggattttatgataatgttatttcttcttttggatggcaaaatataaatattggtgtgatatattcaatgaacataaccgattctgttaaacatagtctttatgcgcttgaagaatatatcgacattttccctactttatctctaaaagaaatagaaatcaaaaaattgtttagaatcttcgataatgcagttgcagaaattataatttataatcctgataagtggaagtttgtgaaatattcatttattgaaaatcttccaaagagtctcaatccaaatataaaaatttatgatgtactatatatctcacaatga

SEQ ID NO: 1375 - DNA, 1182 bp, Staphylococcus aureus
atgaatagttcatrtaaawctagagtattcaatattataagcatcataatggtttcaatgcttattttatcactaggcgcatttgctaataacaataaagccaaagccgattcacactctaaacagctagaaattaatgttaagagtgacaaagtacctcaaaaagtaaaagatctagcacaacaacaatttgctggttatgctaaagcattagataaacaaagtaatgcaaaaactggtaaataygaacttggygaagcwtttaaaatttataaatttaatggygaagaagataatagttwctattatccagttataamagrcggtaraattgtttatactttaacacttagycctaaaaataaagatgatttaaacaaatcaaaagaagacatgaattacagtgttaaaatttcaaacttcatcgctaaagatttagaccaaattaaagataaaaattcaaatatcactgttcttactgatgaaaaaggrttttattttgaagaagatggcaaagttagattagtaaaagctacgccwctasctrrtaayrtmaaagaaaaagaaagtgctaaaacagtttcabcamaattraarcaagagytaaaaamtacagtaacacctacwaaagttgaagaaaacgaagcgatacaagaagatcaagttcaatatgaaaayacaytaaaaaacttcaaaattagagaacaacaattcgataactcatggtgtgcaggattyagtatggcagcrttattaaatgcaactaaaaatacagacacttataatgcacatgatattatgcgtacattataccctgaagtaagtgagcaagaccttcctaattgykcaacattccctaatcaaatgattgaatacggtaaatcacaaggyagagatattcattatcaagaaggcgtaccatcatatrawcaagttgatcaacttacaaaagataatgtrggwattatgatycttgcacaaagtgtatctcaaaaycctaatgayccacatttaggacatgcsctagcagttgttgstaatgctaaaattaatgaccaagaaaaacttatttactggaatccttgggatacagaattatcaatccaagatgcagattcaagcctattacatttatcattcaatcgtgattataactggtatggttcaatgataggttactaa

SEQ ID NO: 1376 - DNA, 690 bp, Staphylococcus aureus
atgaatgattacgtgcaagccttrttaatgattttrttgactgtcgttttatattatttcgctaaaagrttacaacaaaaatatccraayccatttttgaatccagcattaattgcatctttaggaattatttttgtcttacttatctttggaattagttataacgggtatatgaaaggtggcagttggatcaaccatattttaaacgcaacggtcgtatgtttagcgtacccactttataaaaatagagagaaaattaaagayaatgtctctatcatttttgcaagtgtattaactggcgtcatgctraatttcatgttagtgttcttaacacttaaagcatttggctattctaaagacgtcattgtaacrttattgccccgatctataacagccgcwgtwggtatmgaagtgtcacatgaactwggtggyacagatacgatgaccgtactttttattatcacaacgggtttaatcggtagtattttaggttcgatgttattamgatttggaagatttgaatcttctatcgccaaaggwttaacgtatgggaatgcgtcacatgcatttggcacagctaaagcactrgaratggatattgaatcyggtgcatttagttcaattgggatgattttaactgcagttattagttcrgtgttaatacctgttctaatywtaytrttctattaa

SEQ ID NO: 1377 - DNA, 147 bp, Staphylococcus aureus
atgtatcattgtacatttgtgaattggttgaaaactgatagtgcccgtttaattacaggtactgagatgctttcaggacatggatttgttcgaaaatatgacaatatttcactatggctcttcacttctctagggaaattgctatct

SEQ ID NO: 1378 - DNA, 1011 bp, Staphylococcus aureus
atgaaaggtaaatttttaaaagttagttctttattcgttgcaactttgacaacagcgacacttgtgagttctccagcagcaaacgcgttatcttcaaaggctatggacaatcatccrcaacaawcrcagtcaagcaaacagcaaacacctaagattcaaaaaggcggtaaccttaaaccattagaacaacgtgaacacgcaaatgttatattaccaaataacgatcgtcaccaaatcacagatacaacgaatggtcattatgcacccgtaacttatattcaagttgaagcacctactggtacatttattgcttccggtgtagttgtaggtaaagatactcttttaacaaataaacacgtcgtagatgctacgcacggtgatcctcatgctttaaaagcattcccttctgcaattaaccaagacaattatccaaatggtggtttcactgctgaacaaatcactaaatattcaggcgaaggtgatttagcaatagttaaattctcccctaatgagcaaaacaaacatattggtgaagtagttaaaccagcaacaatgagtaataatgctgaaacacaagttaaccaaaatattactgtaacaggatatcctggkgataaacctgtagcaacaatgtgggaaagtaaaggaaaaatcacttacctcaaaggcgaagctatgcaatatgatttaagtacaactggtggtaaytcaggttcacctgtatttaatgaaaaaaatgaastgatcggaattcattggggcggtgtaccaaatgaatttaatggtgcggtatttattaatgaaaatgtacgcaacttcttaaaacaaaatattgaagatatccattttgccaacgatgaccaacctaataacccagataatcctgataaccctaacaatcctgataaccctaacaayccagatgaaccaaataaccctracaaccctaacaaccctgataatccagacaatggcgatamcaataattcagacaayccwgaygcwgcwtaa

SEQ ID NO: 1379 - DNA, 1029 bp, Staphylococcus aureus
atgaaaggtaaatttttaaaagttagttctttattcgttgcaactttgacaacagcgacacttgtgagttctccagcagcaaacgcgttatcatcaaaagctatggacaatcatccacaacaaacgcagtcaagcaaacagcaaacacctaagattaaaaaaggcggtaaccttaaaccattagaacaacgtgaacacgcaaatgttatattaccgaataacgatcgtcaccaaatcacagatacaacgaatggtcattatgcacccgtaacttatattcaagttgaagcacctactggtacatttattgcttccggtgtagttgtaggtaaagatactcttttaacaaataaacacgtcgtagatgctacgcacggtgatcctcatgctttaaaagcattcccttctgcaattaaccaagacaattatccaaatggtggtttcactgctgaacaaatcactaaatattcaggcgaaggtgatttagcaatagttaaattctcccctaatgagcaaaacaaacatattggtgaagtagttaaaccagcaacaatgagtaataatgctgaaacacaagttaaccaaaatattactgtaacaggatatcctggtgataaacctgtagcaacaatgtgggaaagtaaaggaaaaatcacttacctcaaaggcgaagctatgcaatatgatttaagtacaactggtggtaactcaggttcacctgtatttaatgaaaaaaatgaagtgatcggaattcattggggcggtgtaccaaatgaatttaatggtgcggtatttattaatgaaaatgtacgcaacttcttaaaacaaaatattgaagatatccattttgccaacgatgaccaacctaataacccagataatcctgataaccctaacaatcctgataaccctaacaatcctgataaccctaacaacccagatgaaccaaataaccctgacaaccctaacaaccctgataatccagacaatggcgataacaataattcagacaaccctgacgctgcataa

SEQ ID NO: 1380 - DNA, 1074 bp, Staphylococcus aureus
atgaaaggtaaatttttaaaagttagttctttattcgttgcaactttgacaacagcgacacttgtgagttctccagcagcaaatgcgttatcttcaaaagctatggacaatcatccacaacaaacgcagacagacaaacagcaaacacctaagattcaaaaaggcggtaaccttaaaccattagaacaacgtgaacgcgctaatgttatattaccaaataacgatcgtcaccaaatcacagatacaacgaatggtcattatgcacctgttacttatattcaagttgaagcacctactggtacatttattgcttctggtgtagttgtaggtaaagatacacttttaacaaataaacacrtcgtagatgctacgcacggtgatcctcatgctttaaaagcattcscttctgcaattaaccaagacaattatcctaatggtggtttcactgctgaacaaatcactaaatattcaggcgaaggtgatttagcaatcgttaaattctcccctaatgagcaaaacaaacatattggcgaagtagttaaaccagcaacaatgagtaataatgctgaaacacaagttaaccaaaatattactgtaacaggatatcctggtgataaacctgtcgcaacaatgtgggaaagtaaaggaaaaataacgtacttaaaaggtgaagcaatgcaatatgatttaagtacaactggtggtaactcaggttcacctgtatttaatgaaaaaaatgaagtcattggcattcattggggtggcgttccaaatcaatttaacggtgcagtatttattaatgaaaatgtacgcaacttcttaaaacaaaatattgaagatatcaatttcgcaaatgatgaccaccctaacaaccctgataatccagacaatccaaataatccggacaatcctaacaaccctgataaccctaacaaccctgataatccagacaatcctaataatcctgataaccctaacaacccggacaatccaaataaccctgaccaacctaacaacccaaataacccggacaatggcgataacaataattcagacaaccctgacgctgcataa

SEQ ID NO: 1381 - DNA, 102 bp, Staphylococcus aureus
gtgttaaatattaaagcaattaaaccgagtgaaaaggggataaaggttttgagtcatcaatttaaacaggtctcaaaaactcagttaaattatttttttaac

SEQ ID NO: 1382 - DNA, 1155 bp, Staphylococcus aureus
atgaaactttctttaaaytctaattctaaatwtttaagagcaccaagtattcgccaattttcaaatcgtatgaataatttggatgattgtgttaatttaactattggccaaccagacttccckatgcctgatgttgtgaaaaaggcatatatwgatgctattaacaatgacaagacatcwtactctcacaataaaggsttattagaaactcgcgaagcwattagtcaatacttcaaaaatcgttatcatttttcctatgatcctgaagaaattattgtgacaaatggagcaagtgaagcaatagacacaacgttacgttctatcatagagcctggagatgaaattataataccgggaccaatttatgcaggctacataccactcatcgaagtactaggtggtaaaccaatttatattgatacaacagcaacacaattyaaaattacacctgatgcrttagaaagtcatatttctccaaagacaaaagctgtcttgttaaattatccgactaatccaactggcgtagttttaaaaagaaatgaagttttaaatatcgtaaatgtattaaaaaaatatccgwtatttattattagcgatgagatttatgctgaaaatacatttagtggtaaacatgtatccttcgctgaatttgaagacattcgtgatcaattaatattaattggtggtttaagtaaatcacactcagcaacmggaataagaattggttttctattaggrcctcaatatttgattgataaattaacatttatgcacgcctataattgtatttktgccaatgttccagctcaaatagcatgtataacagcacttaacgaaggattagaagctcctaaatatatgaaygaagcttatgtagaacgaagaaattatttagtatctgaattaactaaattaggttttgagattaccgctcaacctgaaggcgcgttttatattttcccaartattaarcatatcaccgatgacgatttcgaattttgtgtcgatttacttgaatcaacacatttagcaatcgttccaggctcatcctttacagaattcggtaaaggatttgtraggatttcctatgcttatgaaatggatgttttaaaagaaggtatgaagagacttgctaaatatttaaatactaaataa

SEQ ID NO: 1383 - DNA, 1011 bp, Staphylococcus aureus
atgacttcattaaaagagagagattatttttttgacaacgcaagagcaattttaatattattagtcgtatttggacatatgttacaaccctacactagtggcgataaatatttatcagcattatacctagttatttatagtttccatatgccaacatttttgtttatatctggttatttcgcgaaaaatattgataaaccatactatttagaaaaaatttcaaaacgyttgatagtaccttatatgatattttttgcattcttttcaatwtattatttcttaacaggtaaaagtgacgaattacaacttgatccttttaacccagtatttgcgttatggtttttgatcacgctatttttctttcatgtcattttagtaatagttagaagatttaatccatataaagtgctatcagtttcaattattatatctattggagcaggtttttcagataacatcgatagctacttragcatttcaaggacaatcgtatttttcccaatattttayctaggytacattttcaccaaaaaacatacggctatttttaaaaataaaaaactaataccagtatctatcattacstttattttrttttttatcrtttacgtgattcatcctatcaatgcagattggttattrggaagttcaccatatacttcacttgaaaatgaaggacagagtrtattcagtccttttaaacgacttatattatatggaattatattaatcgcaatgactgcgtttctaaatttaatgtcaacaaagaaaaaattatatacttatattggyagtcgtacgctatacgtatatttattacatggtttaattattggcattgttagaggatttgaatggtacccattcgataatcctatatcattaatgacktatcttkatttaataagtatatctgtaatcatcgtatatgtattatctacaaactttgtttgtaaatggacaaatccaataattaatttacaaagaccatcacagtttaaagaytcataa

SEQ ID NO: 1384 - DNA, 153 bp, Staphylococcus aureus
atgactaatatgaaatataacaaaaatatcaatactttagttgagattttcttcgaaagaatagctgaaattaaacctgcacataatcctccaatgccatataacatatctgaaaaaccaaattgtacagacgaaagttttaaaacattataa

SEQ ID NO: 1385 - DNA, 3771 bp, Staphylococcus aureus
atggcgaaaaaattyaattacaaactaccatcaatggttgcattaacgcttgtaggttcagcagtcactgcacatcaagttcaagcagctgagacgacacaagatcaaactactaataaaaaygttttagatagtaataaagttaaagcaactactgaacaagcaaaagctgaggtaaaaaatccaacgcaaaacatttctggcactcaagtatatcaagaccctgctattgtccaaccaaaarcagcraataacaaaacaggcaatgctcaagtaartcaaaargttgatactrcacaagtaaatggtgacactcgtgckamtcaatcarckacwwcaaataatrcgmarcctgttrcaaagtcaacaarcacwacagcacctaaaackaacamtaatgttacaartgctggwtatagtttagttgatgatgaagatgataattcagaaaatcaaattaatccagaattaattaaatcagctgctaaacctgcwgctcttgaaacgcaatataaarccgcagcaccwaaagcwrcamctryatcagcacctaaagctaaaactgaagckacaccwaaagtaactacttttagygcttcagcacaaccaagatcagyygctgcarcaccwaaaacgagtttgccaaaatataaaccrcaagtaaactcwtcaattaaygattacattygtaaaaataayttaaaagcacctaaratwgargaagattatacatcttacttccctaaatacgcataccgtaacggygtaggtcgtcctgaaggtatcgtwgttcatgatacagctaatgatcgttcgacgataaatggygaaattagttatatgaaaaayaactatcaaaacgcattcgtacatgcatttgttgatggggatcgtataatcgaaacagcaccaacggattacttatcttggggtgtcggtgcagtcggtaaccctagattcatcaatgttgaaatcgtrcacacacacgaytatgcttcatttgcacgttcaatgaataactatgctgactatgcagctacacaattacaatattatggtttaaaaccwgayagtgctgartatgatggaaatggtacagtatggactcactacgctgtaagtaaatatttaggtggtackgaccatgccgatccacatggatatttaagaagtcataattatagttatgatcaaytatatgacttaattaatgaaaaatatttaataaaaatgggtaaagtggcgccatggggtacgcaatytacaactacccctactacaccatcaaaaccawcaacaccgtcgaaaccatcaactggtaaattaacagttgcwgcwaayaatggtgtcgcacaaatcaaaccwacaaatagtggtttatatactactgtwtacgacaaaactggtaaagcaactaatgaagttcaaaaaacatttgctgtatctaaaacagctacattaggtaatcaaaaattctatcttgttcaagattacaattctggtaataaatttggttgggttaaagaaggcgatgtggtttacaacacagctaaatcacctgtaaatgtaaatcaatcatattcaatcaaayctggtacgaaactttatacagtaccttggggtacatctaaacaagttgctggtagygtgtctggytctggaaaccaaacatttaaggcttcaaagcaacaacaaattgataaatcaatttatttatatggctctgtgaatggtaaatctggttgggtaagtaaagcatatttagttgatactgctaaacctacgcctacaccaayacctaagccatcaacacctacaacaaataataaattaacagtttcatcattaaacggtgttgctcaaattaatgctaaaaacaatggcttattcactacagtttatgacaaaactggtaagccaacgaaagaagttcaaaaaacatttgctgtaacaaaagaagcaagtytaggtggaaacaaattctacttagttaaagattacaatagtccaactttaattggttgggttaaacaaggtgacgttatttataacaatgcaaaatcacctgtaaatgtaatgcaaacwtatacagtaaaaccaggcactaaattatattcagtaccttggggyacttataaacaagaagctggtgcrgtwtctggtacaggtaaccaaacttttaaagcgactaagcaacaacaaattgataaatctatctatttatwtggaactgtaaatggtaaatctggttggrtaagtaaagcatatttagctgtacctgctgcacctaaaaaagcwgtagcacaaccaaaaacwgctgtaaaagcttatrctgttactaaaccwcaaacgactcaaacagttagcaarattgctcaagttaaaccaaacaacactggtattcgtgcttctgtttatgaaaaaacagcgaaaaacggtgcraaatatgcrgaycgtacrttctatgtaacaaaagarcgtgcwcatggtaatgaaacrtaygtattattaaayaatacaagycataayatyccattaggttggttcaatgtaaaagacttaaatgttcaaaacytaggcaaagaagttaaaacgactcaaaaatatactgttaayaratcaaataacggcttatcaatggttccttggggtactaaaaaccaagtcattttaacaggcaataacattgctcaaggtacatttaatgcaacgaaacaagtatctgtaggcaaagatgtttatttatacggtactattaataaccgcactggttgggtaaakkcaaaagatttamctssaccaactgckgtkaaaccaactacatcagctgccaaagattataactacacttatgtaattaaaaatggtaatggttattactatgtaacaccaaattctgatacagctaaatactcattaaaagcatttaatgaacaaccattcgcagttgttaaagaacaagtcattaatggacaaacttggtactatggtaaattatctaacggtaaattagcatggattaaatcaactgatttagctaaagaattaattaagtataatcaaayaggtatgrcattaaaccaagttgctcaaatacaagctggtttacaatataaaccacaagtacaacgtgtaccaggtaagtggacagrtgctaamtttaatgatgttaagcatgcaatggatacgaagcgtttagctcaagatccagcattaaaatatcaattcttacgcttagaccaaccacaaaatatttctattgataaaatyaatcaattcttaaaaggtaaaggtgtattagaaaaccaaggtgctgcatttaacaaagctgctcaaatgtatggcattaatgaagtttatcttatctcacatgccctattagaaacaggtaacggtacttctcaattagcraaaggtgcagatgtagtgaacaacaaagttgtaactaactcwaacacgaaataccataacgtatttggtattgctgcatatgataacgatcctttacgtgaaggtattaaatatgctaaacaagctggttgggacacagtatcaaaagcaatcgttggtggtgctaaattcatcggcaactcatatgtwaaagctggtcaaaatacrctttacaaaatgagatggaatcctgcacatccaggaacacaccaatatgctacagatrtagattgggctaacatcaatgctaaaatcatcaaaggctactatgataaaattggcgaagtcggcaaatacttcgacatcccacaatataaataa

SEQ ID NO: 1386 - DNA, 3768 bp, Staphylococcus aureus
atgttaggagtaataaatagaatggcgaaaaaattcaattacaaactaccatcaatggttgcattaacgcttgtaggttcagcagtcactgcacatcaagttcaagcagctgagacgacacaagatcaaactactaataaaaatgttttagatagtaataaagttaaagcaactactgaacaagcaaaagctgaggtaaaaaatccaacgcaaaacatttctggcactcaagtatatcaagaccctgctattgtccaaccaaaaacagcaaataacaaaacaggcaatgctcaagtaagtcaaaaagttgatactgcacaagtaaatggtgacactcgtgctaatcaatcagcgactacaaataatacgcagcctgttgcaaagtcaacaagcactacagcacctaaaactaacactaatgttacaaatgctggttatagtttagttgatgatgaagatgataattcagaacatcaaattaatccagaattaattaaatcagctgctaaacctgcagctcttgaaacgcaatataaagccgcagcacctaaagctaaaactgaagcgacacctaaagtaactacttttagcgcttcagcacaaccaagatcagttgctgcaacaccaaaaacgagtttgccaaaatataaaccacaagtaaactcttcaattaacgattacattcgtaaaaataacttaaaagcacctaaaattgaagaagattatacatcttacttccctaaatacgcataccgtaacggcgtaggtcgtcctgaaggtatcgtagttcatgatacagctaatgatcgttcgacgataaatggtgaaattagttatatgaaaaataactatcaaaacgcattcgtacatgcatttgttgatggggatcgtataatcgaaacagcaccaacggattacttatcttggggtgtcggtgcagtcggtaaccctagattcatcaatgttgaaatcgtacacacacacgactatgcttcatttgcacgttcaatgaataactatgctgactatgcagctacacaattacaatattatggtttaaaaccagacagtgctgagtatgatggaaatggtacagtatggactcactacgctgtaagtaaatatttaggtggtacggaccatgccgatccacatggatatttaagaagtcataattatagttatgatcaattatatgacttaattaatgaaaaatatttaataaaaatgggtaaagtggcgccatggggtacgcaatttacaactacccctactacaccatcaaaaccaacaacaccgtcgaaaccatcaactggtaaattaacagttgcagcaaacaatggtgtcgcacaaatcaaaccaacaaatagtggtttatatactactgtttacgacaaaactggtaaagcaactaatgaagttcaaaaaacatttgctgtatctaaaacagctacattaggtaatcaaaaattctatcttgttcaagattacaattctggtaataaatttggttgggttaaagaaggcgatgtggtttacaacacagctaaatcacctgtaaatgtaaatcaatcatattcaatcaaatctggtacgaaactttatacagtaccttggggtacatctaaacaagttgctggtagcgtgtctggctctggaaaccaaacatttaaggcttcaaagcaacaacaaattgataaatcaatttatttatatggctctgtgaatggtaaatctggttgggtaagtaaagcatatttagttgatactgctaaacctacgcctacaccaatacctaagccatcaacacctacaacaaataataaattaacagtttcatcattaaacggtgttgctcaaattaatgctaaaaacaatggcttattcactacagtttatgacaaaactggtaagccaacgaaagaagttcaaaaaacatttgctgtaacaaaagaagcaagtttaggtggaaacaaattctacttagttaaagattacaatagtccaactttaattggttgggttaaacaaggtgacgttatttataacaatgcaaaatcacctgtaaatgtaatgcaaacatatacagtaaaaccaggcactaaattatattcagtaccttggggcacttataaacaagaagctggtgcagtttctggtacaggtaaccaaacttttaaagcgactaagcaacaacaaattgataaatctatctatttatttggaactgtaaatggtaaatctggttgggtaagtaaagcatatttagctgtacctgctgcacctaaaaaagcagtagcacaaccaaaaacagctgtaaaagcttatactgttactaaaccacaaacgactcaaacagttagcaagattgctcaagttaaaccaaacaacactggtattcgtgcttctgtttatgaaaaaacagcgaaaaacggtgcgaaatatgcagaccgtacgttctatgtaacaaaagagcgtgctcatggtaatgaaacgtatgtattattaaacaatacaagccataacatcccattaggttggttcaatgtaaaagacttaaatgttcaaaacctaggcaaagaagttaaaacgactcaaaaatatactgttaataaatcaaataacggcttatcaatggttccttggggtactaaaaaccaagtcattttaacaggcaataacattgctcaaggtacatttaatgcaacgaaacaagtatctgtaggcaaagatgtttatttatacggtactattaataaccgcactggttgggtaaatgcaaaagatttamctgcaccaactgctgtgaaaccaactacatcagctgccaaagattataactacacttatgtaattaaaaatggtaatggttattactatgtaacaccaaattctgatacagctaaatactcattaaaagcatttaatgaacaaccattcgcagttgttaaagaacaagtcattaatggacaaacttggtactatggtaaattatctaacggtaaattagcatggattaaatcaactgatttagctaaagaattaattaagtataatcaaacaggtatgacattaaaccaagttgctcaaatacaagctggtttacaatataaaccacaagtacaacgtgtaccaggtaagtggacagatgctaactttaatgatgttaagcatgcaatggatacgaagcgtttagctcaagatccagcattaaaatatcaattcttacgcttagaccaaccacaaaatatttctattgataaaattaatcaattcttaaaaggtaaaggtgtattagaaaaccaaggtgctgcatttaacaaagctgctcaaatgtatggcattaatgaagtttatcttatctcacatgccctattagaaacaggtaacggtacttctcaattagcgaaaggtgcagatgtagtgaacaacaaagttgtaactaactcaaacacgaaataccataacgtatttggtattgctgcatatgataacgatcctttacgtgaaggtattaaatatgctaaacaagctggttgggacacagtatcaaaagcaatcgttggtggtgctaaattcatcggcaactcatatgtaaaagctggtcaaaatacactttacaaaatgagatggaatcctgcacatccaggaacacaccaatatgctacagatgtagattgggctaacatcaatgctaaaatcatcaaaggctactatgataaaattggcgaagtcggcaaatacttcgacatcccacaatataaataa

SEQ ID NO: 1387 - DNA, 435 bp, Staphylococcus aureus
atgttttcaaaagtrawyratcmaragatgttagaagattgcttytatataagaaagaaagtgtttgtagaagaacaaggcgtcccwgaggaaagtgaaattgatgaatatgaatctgaatctattcacctcattggatatgataatggacagccagttgccacwgctcgwatacgycctatyaatgaaacaactgtcaaaatagaacgagtrgctgtgatraaatcacatcgyggacaaggmatgggtaraatgcttatgcaagctgtagaatcattagctaaagatgaaggtttttacgtagctacyatgaatgcccaatgtcatgcwatcccattytatgaaagtttaaaytttaaaatgagaggtaatatatttcttgaggaaggcatcgagcatattgaaatgacaaaaaagttracctcgcttaattaa

SEQ ID NO: 1388 - DNA, 471 bp, Staphylococcus aureus
atgagtagaaaaacatacgaaaagattgcaaatataaatggsatgtttaatatgttagaacaacaaatyattcatagccaagatatggctcattttagaagtgaatttttttacgtcaatcatgagcatcgagaaaactatgaagcactcctaatttattacaaaaatagtatcgasaatcctattgtagatggtgcatgttatattttagccctacctgaaattttcaatagtgttgatgttttcgaatcagagttaccattttcatgggtatatgatgaaaatggcattacygaaacaatgaaatcactwagyattccattacaatatttagtygcagcagcwttagaagtracwgatgtraatatmtttaarccttcwggrtttacaatgggaatgaataattggaatattgctcaaatgcgaatcttttggcaatatacagcaattattagaaaagaagcaytataa

SEQ ID NO: 1389 - DNA, 1218 bp, Staphylococcus aureus
atgaataaatttttaaaatactttttgatccttctagcattggttctcattgttgttccaatagtcttcgctacgttactttttaaaacgtcccaagatgcattcgaatcttctcaagacagcaaaaatgctaatcgtcaatccaacttaagagataataaagtcaatcccgaagaacaacctatctctattcttttcttaggtatcgatgataacgatggaagaagaaaaaaaggacaggatgctgaacactctagatcagacgctatgattttaactacttttaatcaatcaaaacatcaaattagaatgcttagtattccacgtgatactatcagctacattcctaaagttggctattacgataagattacccatgcacatgcatatggtggtccaattgccgcaatggattcggtagaagctaccatgaatgtacctgttgattattatgtgagagtcaatatgaaagcatttgtcgaggctgtaaatgagcttggtggcatatactatgatgtgccatacgacttaaatgaacctaacacagatgatactggtaagattaaaattaaaaaagggtaccaaaaattaaatggtgatgaggctttagcagttgctagaactagacatcatgattcagacttaaaacgtggacaacgtcaaatggaattaattaagattttattccaaaaagcacaggaagttgattctattgataaacttgataacgtgattcaaattgtaggyaaaaatgcaaagcataatttaactaactctgaaattaaagctttagcaaaaatgtacttaacaaatgatgttgaaattaaaactgcgcaattaaaaggtaaagatgatatgttaaatggtatttactattatcatccaagtgttgaaagcattcaaaaatatgcaaacttacttcgtaaagacttagaattatcacctattaatgataaaaatgatttcttagatcaacgtgtcattaatcattatggttcattaataccrttaacgcctttagatartagtttattgagaaaagaacaaaatgatacgacagataaagataagacatctaacgagaacartgattcaactaataacagtgattccagcaatcaacaacaacctgctacagatcaaaactyaaatcaaaatcaaggtggcacacaacaagcgccacaagcttcaaataaccaaaatggtgttgtaaattaa

SEQ ID NO: 1390 - DNA, 1227 bp, Staphylococcus aureus
atgaataaatttttaaaatactttttgatccttctagcattggttcttattgttgttccaattgtcttcgctacgttactttttaaaacgtctcaagatgcatttgaatcttctcaagatagtaaaaatgctaatcgtcaatcaaatttacgagacaataaagtcaatcctgaagaacaacctatctctattctcttcttaggtatcgatgataatgacggaagaagaaaaaaaggccaagatgctgaacactctagatcagacgctatgattttaactacttttaatcaatctaaacaccaaattcgaatgcttagtattcctcgtgatacaatcagctacattcctaaagtcggctattacgataagattacccatgcacatgcatatggtggtccaattgcagcaatggactctgttgaagcaacgatgaatgttcctgttgattactatgtacgcgttaatatgaaggcctttgtagaagctgtaaatgaacttggtggcatatactatgatgtaccatatgatttaaatgagccaaacacagatgatactggtaagattaaaattaaaaaagggtaccaaaaattaaatggtgatgaggctttagcagttgctagaactagacatcatgattcagacttgaaacgtggacaacgtcaaatggaattaattaagattttattccaaaaagcacaggaagttgattctattgataaacttgataacgtgattcaaattgtaggtaaaaatgcaaagcataatttaactaactctgaaattaaagctttagcaaaaatgtacttaacaaatgatgttgaaattaaaactgcgcaattaaaaggtaaagatgatatgttaaatggtatttactattatcatccaagtgtagaaagcattcaaaaatatgcaaacttacttcgtaaagacttagaattatcacctattaatgataaaaatgatttcttagatcaacgtgtcattaatcattatggttctctcatacctttaacacctttagatagtagtttattaagaaaagaacaaaacgataccactgataaagataaatcttcgaataatactgatgacagtaataatagtaataacaacaatagcgtcaataatcaacaacaacctgctacagatcaaaacttaaatcaaaatcaaggtggcactcaacaaacgccacaagcttcaaataaccaaaatggtgttgtaaactaa

SEQ ID NO: 1391 - DNA, 279 bp, Staphylococcus aureus
atgaaacatactgtaggatttatcgcatctatcgtattaacgcttttagcagtttacgtaacactatacacgtcattaacattccacgcgaagttgacaattatctttggctttgcattcrtccaagcwggacttcaattattaatgttcatgcatttaactgaaggtaaagatggacgtttacaaacattcaaagttatctttgctcttgtaatyacactttgtttcgttgtcggaacatattgggttatgcaaggcggtcactcttcacacttataa

SEQ ID NO: 1392 - DNA, 606 bp, Staphylococcus aureus
atgagtcatgatacaaacactattgattcacgcacacatgaaggcgaattaaataagcttggcttttggattttcattacagccgaatttgcgttattcggtaccctatttgcgacactattaactttgcaacatggtggcgattatgcaggtaaaatgactactgagttatttgaattgcctcttgttttaataatgacgtttgcattattattcagttcttacacatgtggtattgctatttactacatgcgccaagaaaaacaaaagttaatgatgttttggatgatcattacgttacttttaggtttagtctttgttggattcgaaatttatgaattcgcacactatgcatcagaaggcgttaacccaacaattggttcttactggtctagtttctttatcctattaggaacgcatggttgtcacgtatcgctaggtatcgtttgggccatttgtttattaatccaaatccaacgacgcggattagacaaatataatgcgccaaaattatttatagtaagtttatactggcacttcttagatgttgtttgggttttcatctttactgccgtatatatgatagggatggtgtatagcggatga

SEQ ID NO: 1393 - DNA, 429 bp, Staphylococcus aureus
atgaaatacgatgattttatagtaggagaaacattcaaaacaaaaagccttcatattacagaagaagaaattatccaatttgcaacaacttttgatcctcaatatatgcatatagataaagaaaaagcagaacaaagtagatttaaaggtatcattgcatctggcatgcatacactttcaatatcatttaaattatgggtagaagaaggtaaatacggagaagaagttgtagcaggaacacaaatgaataacgttaaatttattaaacctgtatacccaggtaatacattgtacgttatcgctgaaattacaaataagaaatccataaaaaaagaaaatggactcgttacagtgtcactttcaacatacaatgaaaatgaagaaattgtatttaagggagaagtaacagcacttattmataattcataa

SEQ ID NO: 1394 - DNA, 1662 bp, Staphylococcus aureus
atgtcggttacagaagtcattttctcctttttaggtggtttaggtattttcctttacggcttaaaaatcatgggagacggrcttcaagcatcagcaggagacaggctacgagatattttaaacaaatttacatcaaatccagtattaggtgttattgcaggtatcgttgtaactattttaatacaaagtagttcaggtacgacmgttatcacaatcggactggtaacagctggatttatgacrttraaacaagcyattggagtgataatgggtgcyaatatcggaacaacggtaacwgcatttattatcggtatagatttaggcgaatatgcaatgccaattttagcattaggtgcattyttaatctttttctttaarcgctctaaaatyaataacattggccgcatactattcggtttcggttcwctattcttcggtctagaatttatgggtgatgccgttaaacctttagcatcattagatggatttaagcaattaatgcttgatatgtcwwcaaatccaatactygctgtyattgtcggcgcagggttaacagcactagttcaaagttcaagtgcgacgattggtattttacaagaattttatcaacaagatttaatyagcttaaacgcagcaatccctgtgttactaggygataayattggtacmacrattacagctatcttagctagtttagccggctcaatcgctgcaaaacgtgcggcgcttgtacacgtcatctttaayttaatcggggtaattatcttcacaattttcttgccagttgtgattcatttgattagtttgttacaagatktatggcacttaaaaccagcgatgacgattgcagtatcacatggtatcttcaacataacaaatactttgattcaattaccatttgtagcaggtttagcatggatwgttacaaagcttgtcccaggtaaagatattgctgatgactataaacctcagcacttaaacaaagatcttgtttatcacgcacctggtgttgcattacaagaaactcaaaaagaattacaaaatgtkggtcagattgtcttatcaatgtttgaagacattcgcgaaattacaaaagacgayaaaaaattratcaaraagcttgaacaaaagcaycaagctgttgaaacaatcaatgatagyattcgaaattatttagttagaatttctacaaaagccatwacgaaggcwgacgttgagcgtttagcagttatgtttgatgtcaatcgctctattttaaaagtagcagagctaacagaagagtatgtcgctcaattaaaacgccaacatgatgaagatattcgcattacagaagatgcacaacgcggtatggataaattattcaaccatgttgctgagtcatttgataaagccatygacatgttagatgtttatgacaaaacgaaaaaagatgaaattgtagarcgtagtagagaatcatttaatattgaacataaactacgcaaaggtcatattaaacgccttaatcgtggygaatgtacaacaaaaggcggattactatatatcgatatgattggtgttcttgaacgtatcggttatcattcacgaaatgtttctgaagcacttgttggycttaacgatgatgtacctacagatgaagaaattgcaacaactgaaatttaa

SEQ ID NO: 1395 - DNA, 1989 bp, Staphylococcus aureus
atgaattttccatgggatcaattactagttaaaggtaactggatgattacaatggcacaaattggtgccccattcttagttattggtttaatcgcagtaattacttactttaaattatggaaatatctttacaaagaatggttcacatctgtagaccataagaaaatcggtrttatgtatttaatctgtgccgtattaatgttcgtccgtggtggtattgatgcgttacttattcgtgcgcaaytaacagtacctgataacaaatttttagaatctaaccactataacgaaatttttagtacacatggtgtaatcatgattatcttcatggcaatgccatttatctttggtttatggaatatcgttgttccattacaaattggagcacgtgatgttgcattcccagtattaaacaacgtaagtttctggctattctttgcaggtatgattttattcaacctgtcatttattattggtggttcaccagcagctggttggacaaactatgcgccactagcaggtgaattcagtcctggtccgggtgttaactattacttaatagctatacaaatttcagggcttggtaccttagctacaggtatcaacttctttgtaacaattttaagatgtaaaacaccaactatgaagtttatgcaaatgccaatgtttacagtaacaacatttattactacattaattgttattcttgctttccctcctttaacagtagcgttagcattaatgacaactgatagaatatttgacacagcattcttcacagttgcacatggyggtatgccaatgctttgggctaacttcttctgggtatgggggcaccctgaagtttatatcgttatccttccagcatttggtatttactcagaaattatyccgacattcgctcgtaagcgtttattcggacatcaaagtatggtatgggcaactgccggtatcgckttccttagtttcttagtttgggttcaccatttcttcacaatgggtaatggtgcgttaatcaactcattcttctcaatttcaacaatgctgattggtattccaactggtgtgaaattgtttaactggttattaacattatataaaggacgtattacatttgagtcaccaatgytattctcattagcattyatccctaacttccttttaggtggtgttacgggtgtaatgttagcaatggcatcwgctgactatcaatatcacaatacgtacttcttagtagctcacttccactatacattggttactggtgttgtatttgcctgcttagctggtttaatcttctggtatccaaagatgatgggttacaaattaaacgaaacattaaacaaatggtgcttctggttcttcatgatcggatttaacgtttgtttcttaccacaattcattcttggattagatggtatgccacgtcgtttatacacttatatgccatcagatggttggttcttattaaacttaatttcaactatcggtgcattattaatggcaatcggattcttattccttgttgttagtatcgtatacagtcacttcaaatctccacgtgaagcaactggagataactgggatggccttggycgtactctagagtggactactgcatcagcaattccacctaaatacaactttgccattacaccagattggaatgrctacgacacatttgttgatatgaaagaacatggtcgtcattayttagacaaccataattacaaagacattcatatgccaaacaatactcctgttggattctggattggtatctttatgactatcggcggtttcttcttaattttcgaaactgtaattccagcattaatttgtttattcggtatttttggtactatgatttatcgcagtttccaaatcgatcacggatatcatatccctgctgctgaagttgcwgaaactgaagctagattaagagaagcgcgtattaaagaaagggaggctgtaagtcatgagtcatga

SEQ ID NO: 1396 - DNA, 117 bp, Staphylococcus aureus
gtgatttgctttggtgataaaaatggcgaaaatgcaatttcaaatgatgtmgttgccagtctaggtaaggcgaaaaatggtccgataactagatataaggcaatcgtgaaaatrtaa

SEQ ID NO: 1397 - DNA, 1101 bp, Staphylococcus aureus
gtgtcaaaatttaagtctttgcttctattatttggcacactaattttacttagtggttgttcaaatatagaaattttcaacgcaaaagggccagtagcaagtagtcagaagttcttgattctttattcaatcgtcttcatgcttgttatttgtttcgttgtacttggcatgttcgccatttttatttacaagtatagttataataagaatgccgaatctggtaagatgcaccataatgccatcattgaaacaatatggtttgtaatacctatcataatcgttgctgctttagctattcctacagttaaaactttatacgattacgaaaaaccaccgaagagtgagaaagatccaatggttgtatatgcagtaagtgcaggatacaaatggttctttgcttatccagatgaacatatagagactgttaayacattaacaatccctaaagatcgtcctgtygtatttaagcttcaagctatggatacaatgacaagtttctggattccacaattaggtggtcaaaaatatgccatgactggcatgacaatgaattggacgttagaagcatctcaaactggtacgttcagaggtcgtaaytctaacttcaatggtgaaggattctcrcgtcaaacatttaaagtaaatgccgttagtcaaaaagactacgacaaatgggtgaaagaagttaaaggtaagaaaacgttagatcaagatacatttgataaacaattattaccaagcacacctaataaagctttagaatttaatggtacacatatggcgtttgttgatccagcagccgatccagaatacatcttctatgcatataaacgtttcaatttcgaattgaaagatccaaacttcactagtgaagaaaatatgtttaaagatgtatcagacaaaccattaatacctgctcgtaaagctcaaattacaaatgcgaactataaacgacatggtatgaarttgatgattcttggaaatgacgaaccatataacaatgagttcaagaaagatgaatcgaaaaatgcgaaagaaatgaagaaaatttcaaaagatgcgcaagatcaagacaatgatgatcatggaggtggacattaa

SEQ ID NO: 1398 - DNA, 318 bp, Staphylococcus aureus
atgaataaactattacagtcattatcagccctcggtgtttctgctacactagtaacaccaaatttaaatgcagatgcaacgacgaatactacaccacaaattaaaggcgctaatgatatcgttattaagaaaggtcaagattataaccttctaaacggcataagtgcatttgataaagaagatggagatttaaccgataaaattaaagtcgatggccaaattgatacatctaaatctggtaaatatcaaattaaatatcatgtcactgattcagatggtgcaattaaaatttccactaggtatattgaggttaaatag

SEQ ID NO: 1399 - DNA, 861 bp, Staphylococcus aureus
atggttgctaaaattttagatggtaaacaaattgccaaagactacagacaggggttacaaratcaagttgaagcgctaaaagaaaagggttttacacctaaattatccgttatattagttggtaatgatggcgctagtcaaagttatgttagatcaaaaaagaaagcagctgaaaaaattggtatgatttcagaaatcgtacatttggaagaaacagctactgaagaagaagtattaaacgaactaaayagactaaataatgatgattctgtaagtggtattttggtacaagtaccaytaccaaaacaagttagcgaacagaaaatattagaagcaatcaatcctgawaaagatgtggacggwttycatccaataaatatagggaaattatatatcgaygaacaaacttttgtaccttgcacaccgctcggcatcatggaaatattaaaacatgcwgatattgatttagaagstaaaaatgcagttgtaatyggacgaagtcatattgtcggacaaccagtttctaagttactacttcaaaaaaatgcatcagtaacaatcttacattctcgttcaaargatatggcatcatatttaaaagatgctgatgtcattgtcagtgcagttggtaagcctrgtttagtaacaaaagatgtkgtcaaagaaggagcagtaattatmgatgttggcaatacgccagatgaaaatggcaaattaaaaggtgacgttgattatgatgcggttaaagaaattgctggagctattacaccagttcctggtggcgttggtccattaacaattactatggtattaaataatactttgcttgcagaaaaaatgcgtcgaggtattgattcgtaa

SEQ ID NO: 1400 - DNA, 807 bp, Staphylococcus aureus
atgtatgagcaatggaargttcggcaatcatttgttgatgatgtcaacattataacgaaactatttcttggaattatactatttttctttattatatttgtgcataatttcgattttatgctttatatcactatcttaatgttagttttcttattgatgtttaatggtactcagtttaaaattacagcaatttttataactataagtattggctttgcattactctcttccctgttcatgattttatacgggaatggtagccatacaattttgaaattcggatttatccatattacaacagaaagtttagttcgtggtttacatgtatcattaagaacyattgctatttcatttttcggtatcttaatcgcactyacatctcaggttgtcatgatwttttatagtttaatgcaacatttaaaggttaaatcaaaagttgcttatgcattcatggctgccattcgtatgatacctttaatgattagttctttaatacagcttcgcagatctttaaaaatgcgctatcagatgatagacgcrgcaaattatagaggrttaaagmgatttaagcatttaatyatacctctattaagycaaaayattagaaaggcacatcaattatcagttgcgatggagtcsaaaggatttagagatggtcctcgtacttactattacaacgtacctttctcatataaagatrtaatctttattatagttttaattgccattattaytwtggcatattattgttcaatcaccttacccatcacgggcatwgatgatgttcgtcttggtcgtgtaggttaa

SEQ ID NO: 1401 - DNA, 234 bp, Staphylococcus aureus
atgatrgcacttaaaacgaaagtattacctaaaacagttgttataattactgtaataagtgcactaaycccgaaagattgtattgatttattccataaaacgatacctggtatggttgcaaayaatgcaaatattagtccyaaaccaggcactagatataaagctaaagcgacaaataccaacgyaatcgttgcaatyattgttgctttaggttgtatttttgaaaacacataa

SEQ ID NO: 1402 - DNA, 1401 bp, Staphylococcus aureus
gtgttaaaagtaagtgatttacgattaaaatatccaartggtcarcgtaaarttttcgatcatttaaatatcactattcaagacaaagaaaaagtacttttactcggtccttctggttgcggtaaaagtacacttctgaatgtattaagtggtattgttcctaatttaattgaattacctatgaaatatgatgaactaatcgttgacccattaagtggcgttattttccaagaccctgatagccagttttgtatgccaaaagtatacgaagaacttgcattcgttttagaaaatagacaaktaccacgtgaagacatggatgcgttaattatcaatgctttaaatatggtcaatttaaatgttacccctgaaacgtatatcaaagatttaagtggcgggatgaaacagaaattggcaattgttgaaaccattcttcaacaatcaaaaacattgtttttagatgaaccgacagcaatgttagatgttcaagcaacrgaagatttatggactaaactaattgaactttgggaagatcaaackgttgtaatcgttgaacataaagttaaacacatctggaatcatgtcgaccgcgtcattttgatggattataacggaaatatcattgccgatgaatgtcctgaaatcatattacagaagtatgttcatttactcagtgaatatggtgtgtggcatccacgtgcatgggaattcgcaccaagtcgtgttgactttccaacaacaaactcacacttattacaatttaaaaatggacgtattattcgcggtaaatcaacrttgctctcattctcagatttagaaattggtctaggtgagtggattacaattacaggggcaaatggtagtggtaaaacaaccttgcttgaatcaattatgcaattgattaaatatcaaggtgatgtttattttgaaaatcagcrtttaacaaaaattaaacatgcagcaaaacacatgtayctagtttatcaaaacccagarttacaatttataacaaattcggtttatgatgaaattaacattcattttaatcacctttctaaagatcaaagtgatgatgaaacgatacaacttttaaaacttttagatttasaaaatgtwaaagatcaacatccttatgagttgtctattggtcaaaaacgacgccttagcgtagctaccgcactaagttctaaagctgatatyatctttttagatgaaccgacatttggacttgatagccataatacattccagttgatcaaacttttccaaaarcgaattaatttgggacaaagtattgtcatggttacacatgacgatgaaataattgaacgttayccatcaagaagacttaaaatttcagatggtgcgttactagattgtgatggtgatacgaatgtatga

SEQ ID NO: 1403 - DNA, 198 bp, Staphylococcus aureus
atggctgaaacaaaccagagtattgcagatacaaagttgcataatactaaagcrataatagccaatacaattaatatgacaccwtttgaaatcctttctttaaataagtcagatgccaatacgatgacaggtacgattgaaagtataattacaaatatagaaattattgccgatataactatygttactattraataa

SEQ ID NO: 1404 - DNA, 576 bp, Staphylococcus aureus
atgtcaaaaggtttaaagctatctgaaatwctagtaaccgtacttatttcagtagtattcgcagttatttacaatttatggtggtttgtttacaatggtgtgcaagctacaggccttcacctcgaacaattaacaaacggggtttggttcatggcagcgattgtctgctatctaattattccaaaaccaggtattgctttaytggctgaatttgctgcaggtgccggcgaaactatcattatgggtcgtttcgatattccgacaatcgtttacgctttyatacaaggtttagcgtgtgaacttgtctttgcaatttttaaatatcaatcwcgttcagttatggtagctatgttagcaggtttttgtacagcwatcgcggctttccckatmgattatttctatggttatttaaatgaagttgcaggttggaacttaacattattcatcgtatttagattaattagtggtgcagtagtcgccggcgtcctatcttaccttttagtaaaagctttagataagacaggcgtaacaaaattatttagrccagctgctaaagaagattacgacaacttataa

SEQ ID NO: 1405 - DNA, 1002 bp, Staphylococcus aureus
ttggttaaattaagcgtattagactatgccttaatagatgaaggtaaggatgcacaaaaggcrttgcargattcagtgacacttgcaaaattagcagatcgacttggctttaagcgaatttggtttacrgaacatcataatgtaccagcgtttgcgtgtagtagtccagaacttttgatgatgcatacattggcgcagacaaatcacatacgagttggytctggtggtgtgatgctgccgcactatcgaccttataaaattgctgagcattttagaatgatggcagcgttatatccaaatcgtattgatttaggtattggtaataatccrggtactactatggtaaagcaagctttagatggaataaatcctacatatgatagttacgatgaatcgatttcgttattacgtgattatcttacaataaaggataarccaagtgcgcatacgttaggtgtccaaccacacattgatcattttccagaaatgtggttattaagtagtagcgmaacatctgccaaaatagctgccgaactaggtatagggctttctgttggaacatttttgctaccagatataaatgcgatacatrcagcgaaggataacattgatatttacaaaaaayatttccaagcatcaacgattaaaatggacgcaaaggtgatggcatctgtatttgtcattgtagcwgataacgaagcggaagtagcagcattrcaacatgccttagatgtttggttattaggtaaattacaatttgcagaatttgaasattttccwtcrgtagacacwgcrcaaaagtataagctyaatgatcgagacaaagagatgattcaagyacatcaagcacgyatcattgcaggyacacaagaamaggttaaagcacaattagatgatttcattgctacgtttgaagttgatgaggtgttagtagcaccgcttattccaggyattgaacagcgttgtaaaacattaaaattactcgcggaaatytatttgtag

SEQ ID NO: 1406 - DNA, 234 bp, Staphylococcus aureus
atgtcagaaataatcgtttatacrcagaatgattgyccaccttgtacatttgtaaaaaattatctwaatgagcrtcamattgattttgaagagagaaatatcaamaatcaacaatatcgaaacgaaatgatagattttgatgctttttcaactccgtttattttgttgaatggyaatccaatgtaccatgttgatcttgatgaaatcaacaaagtattaaatatccaagattaa

SEQ ID NO: 1407 - DNA, 333 bp, Staphylococcus aureus
atgaaaaagttagccaattatttatgggtagaaaaagtaggagatttgtatgtgtttagtatgacacctgaattgcaagatgatattgggacagtaggttatgttgaattcgtragtccagatgaagttaaagtggatgatgaaattgtgagtatcgaagcatcgaaaacggtcattgatgtgcaaacgccattgtcaggaacgattattgagcgaaatacaaaagcggaagaagaaccgacaattttaaactctgaaaaaccagaagaaaattggttgttcaaattggatgatgtcgataaagaagcattcctrgcattaccggaggcttaa

SEQ ID NO: 1408 - DNA, 255 bp, Staphylococcus aureus
atgattaaaaatggtgcttggctaatgacacctaaagagttaacaactgagataccggctggtacgaagagtaagccaatgttatttgttagtgtcgttcctactttttcgacttcgcctaacttaacagcaccagtacataataatacaaataataatactaaaccgattactgatgcaggcataggaattggcataaatgattcaattattttcgatacaaagagtactaaagcaattacaatgacttggtga

SEQ ID NO: 1409 - DNA, 1776 bp, Staphylococcus aureus
atgtattacagttatggaaattatgaagcatttgcgcgccctaaaaaacctgaaaatgtagaaaacaaatcygcttacttaatcggrtctggkytagcttcacttgckgcagcttgtttyttaatwagggatggtcaaatggaaggttckaagattcatattttagaagagttaccyaaagcrggyggtagtcttgatggtgaaaatatgcctttaaaaggctatgttgtccgmggtggtcgtgaaatggagaaccactttgaatgtttgtgggayttattcagatctatcccttcaytwgaaatygatmaygcgtcwgtattagatgarttctattggytaaacaaagaagaccctaactattctcgctgtcgwgttattgaraaacagggtcaacgtttagtyacmgayggagacttcactttgacyaaaamrgcgattaaagaaattttagatttatgcttaacgaatgaagaagatttagatgatgtcaaaataacagatgtattttccgaygayttctttaattcaaacttttggatttactggaaaacgatgtttgcatttgaaccgtggcattctgcwatggaaatgcgtcgytatctaatgcgattcgttcatcatattrgtggtctcgcagacttttcagctttaaaattcactaaatataatcaatatgaatcyttagtattacctatggttgaatatttaaaatcgcatggggttcaatttgaatacgrtgtaaaagtmraagatattaaartagatgttacgacaagtcaaaaaattgcccgagaaatattaattsaccgwmatggyaawgcagartcwattaaactgactrtaraygatcttrtcwtwrwrayaawykktagtattacrgaaagctctacktatggtgataatgatacaccagcrccaccaactgacgaattaggtggtagttggacactatggaaaaatttagcrcgacaaagtcctgaatttggtaatcctgataagttttgccaaaatattcctmaaaaragttggtttgtttcwgcaacwtckacaacaaacaataaagakattatcgatacaatagaaagyatttgtaaacgtgacccwcttgcaggcaaaacrgttacwggcggwattattacaatcaatgattctgcatggcaaatsagttttacaatcaatcgtcagcaacagtttaaagaccaacctraaaatgaaatatctacrtggatttatgccttatattcagatgtaaacggcgattatattaaaaagccaatyacagaatgtagtggtaatgaaatatgycaagaatggctrtatcacttaggtgtaycaactgacaaaattgaagacttagcaaaacatgyatctaatacgattcctgtttatatgccatatatyacmtcttatttcatgacgcgtgctatcggcgacagacctttagtcgtcccgcatcaatcwcaraayttakcatttattggtaactttgcagaaacagagcgagayactgtatttacaacagaatattcggttcgtactgccatggaagctgtttatcaattactaaatatagatcgtggtattccagargtcatcaatagtmcatttgatcttcgcgtcttaatggatgccrtatacgaactgaatgaccaycaagatttgcgygagattactaaagattcgaaaatgcaraaactcgcattagcaggattccttaaaaagataaaaggtacgtacattgagwcattattaaaagarcacaaattgttataa

SEQ ID NO: 1410 - DNA, 1758 bp, Staphylococcus aureus
gtgttatcatcttttttaatgttaagtataatcagttcattgctcacgatatgtgtaatttttttagtgagaatgctctatataaaatatactcaaaatattatgtcacataagatttggttattagtgctcgtctccacgttaattccattaataccattttacaaaatatcgaattttacattttcaaaagatatgatgaatcgaaatgtatctgacacgacttcttcggttagtcatatgttagatggtcaacaatcatctgttacgaaagacttagcaattaatgttaatcagtttgagacctcaaatataacgtatatgattcttttgatatgggtatttggtagtttgttgtgcttattttatatgattaaggcattccgacaaattgatgttattaaaagttcgtcattggaatcgtcatatcttaatgaacgacttaaagtatgtcaaagtaagatgcagttctacaaaaagcatataacaattagttatagttcaaacattgataatccgatggtatttggtttagtgaaatcccaaattgtactaccaactgtcgtagtcgaaaccatgaatgacaaagaaattgaatatattattctacatgaactatcacatgtgaaaagtcatgacttaatattcaaccagctttatgttgtttttaaaatgatattctggtttaatcctgcactatatataagtaaaacaatgatggacaatgactgtgaaaaagtatgtgatagaaacgttttaaaaattttgaatcgccatgaacatatacgttatggtgaatcgatattaaaatgctctattttaaaatctcagcacataaataatgtggcagcacaatatttactaggttttaattcaaatattaaagaacgtgttaagtatattgcactttatgattcaatgcctaaacctaatcgaaacaagcgtattgttgcgtatattgtatgtagtatatcgmkyttmayayragcaccgttactatctgcacatgttcaacaagacaaatatgaaacaaatgtatcatataaaaaattaaatcaactagctccgtatttcaaaggatttgatggaagttttgtgctttataatgaacgggagcaagcttattctatttataatgaaccagaaagtaaacaacgatattcacctaattctacttacaaaatttatttagcgttaatggcattcgaccaaaatttactctcattaaatcatactgaacaacaatgggataaacatcaatatccatttaaagaatggaaccaagatcaaaatttaaattcttcaatgaaatattcagtaaattggtattacgaaaatttaaacaaacatttaagacaagatgaggttaaatcttatttagatctaattgaatatggtaatgaagaaatatcagggaatgaaaattattggaatgaatcttcattaaaaatttctgcaatagaacaggttaatttgttgaaaaatatgaaacaacataacatgcattttgataataaggctattgaaaaagttgaaaatagtatgactttgaaacaaaaagatacttataaatatgtaggtaaaactggaacaggaatcgtgaatcacaaagaagcaaatggatggttcgtaggttatgttgaaacgaaagataatacgtattattttgctacacatttaaaaggcgaagacaatgcgaatggcgaaaaagcacaacaaatttctgagcgtattttaaaagaaatggarttaatataa

SEQ ID NO: 1411 - DNA, 801 bp, Staphylococcus aureus
atggaaacgttaaaatcaaataaagcgagacttgaatatttaatcaatgatatgcrtcgagagagaaatgacaatgacgtattggtaatgccatcttcatttgaagatttgtgggaattatatcgaggyttrgcaaatgtcagrccggcattacctgtaagtgatgaatatttagctgtacaagatgctatgttaagtgatttgaatcrtcaacatgttacggatttgaargatttgaagccrataaaaggtgacaatatctttgtttggcaaggtgatatcacgacgttaaaaatcgatgcwattgttaatgctgcraatagtcgytttctaggatgtatgcaagctaatcatgactgcattgataatattattcatacaaaagcgggtgttcaagttcgacttgattgtgcagagatyattcgacaacaagggcgcaatgaaggtgtaggtaaagccaaaawaacacgtggatataatttgycagcaaagtatataattcatacggttggtccgcaaatacgtcgattgcctgtttcaaagwtgaatcaggacttgttagctaaatgytatytkagytgtcttaaattggctgatcaacawagtttaaatcatrtmgcwttttgctgtatatctacaggtgtatttgcttttcctcaagatgaagcagcagaaattgctgttcgaacagtagaaagctatctcaaagaaacaaattcaacattgaaagtcgtgttcaatgtatttacagataaggatttacaactrtataaggaggcattkaaccgtgatgcagagtag

SEQ ID NO: 1412 - DNA, 1698 bp, Staphylococcus aureus
atgaaacaattacatccaaatgaagtaggtgtatatgcacttggaggtctaggtgaaatcggtaaaaatacttatgcagttgagtataaagacgaaattgtcattatcgatgcaggtatcaaattcccwgatgataacttattagggattgattatgttatacctgactacacatatctagttcaaaaccaagataaaattgttggcctatttataacacatggtcacgaagaccatataggcggtgtgcccttcctattaaaacaacttaatatacctatttatggtggtcctttagcattaggtttaatccgtaataaacttgaagaacatcatttattacgtactgctaaactaaatgaaatcaatgaggacagtgtgattaaatctaagcactttacgatttctttctacttaactacrcatagtattcctgaaacttatggcgtcatcgtagatacacctgaaggaaaagtagttcataccggtgactttaaatttgattttacacctgtaggcaaaccagcaaacattgctaaaatggctcaattaggcgaagaaggcgttctatgtttactttcagactcaacaaattcacttgtgcctgattttactttaagcgaacgtgaagttggtcaaaacgtagataagatcttccgyaattgtaaaggtcgtattatatttgctaccttygcttctaatatttaccgagttcaacaagcagttgaagctgctatcaaaaataaccgtaaaattgttacgttcggtcgttcgatggaaaacaatattaaaatmggtatggaacttggttatattaaagcaccacctgaaacatttattgaacctaataaaattaatacygtaccgaagcatgagttattratactatgtactggttcwcaaggtgaaccaatggcagcattatctagaattgctaatggtactcataagcaaattaaaattatacctgaagataccgttgtatttagttcatcacctatcccaggtaatacaaaaagtattaacagaackattaattccttgtataaagctggtgcagatgttatccayagcaagatttctaacatccatacttcagggcatggttctcaaggtgatcaacaattaatgcttcgattaatcaagccgaaatatttcttacctattcatggtgaataccgtatgttaaaagcacatggtgagactggtgttgaatgcggcgttgaagaagataatgtcttcatctttgatatyggagatgtcttagctttaacacacgattcagcacgtaaagctggtcgcattccatctggtaatgtacttgttgatggtagtggtatcggtgatatcggtaatgttgtaataagagaccgtaagctattatctgaagaaggtttagttatcgttgttgttagyattgattttaatacaaataaattactttctggtccagayattatttctcgaggatttgtatatatgagrgaatcaggwcaattaatttatgatgcacaacgcaaaatcaaaactgatgttattagtaagttaaatcaaaataaagatattcaatggcatcagattaaatcttctatcattgaaacattacaaccttatttatttgaaaaaacagctagaaaaccaatgattttaccagtcattatgaaggtaaacgaacaaaaagaatcaaacaataaataa

SEQ ID NO: 1413 - DNA, 241 bp, Staphylococcus aureus
atggcagtatttaaagttttttatcaacataacagagacgaggtaattgtgcgtgaaaatacacaatcactttatgttgaagctcaaacagaagaacaagtacgtcgttacttgaaagatcgtaattttaatatcgaatttatcactaaattagagggcgcacatttagattacgaaaaagaaaactcagaacactttaatgtggagattgctaaataatgaaacaattacatccaaatga

SEQ ID NO: 1414 - DNA, 1023 bp, Staphylococcus aureus
atgtacttaatagaaccgattagraatggagaatatattactgatggtgcgattgcactsgctatgcaagtttatgttaaycagmatatctttttagatgaagatattttattcccttattattgtgatccaaaagtggaaattggacgttttcaaaatactgctatagaagtgaatcaagattatatagataaacacagtattcaagtagttcgccgagatactggtggtggcgctgtgtatgttgataaaggtgccgttaatatgtgttgtattttagaacaagacacttcaatttatggtgattttcaacgattttatcarccagctataaaggcrttgcatacattaggtgcaasagatgtgrtacaaagcggtagaaatgatttaacattgaayggyaaaaaagtgtcaggcgccgcmatgacattaatgaayaatcgtatttatggcggttattcgctattacttgatgttaattatgaagcaatggataaagtgttaaagcctaatcgcaaaaagattgcatcgaaagggattaaatctgtgcgygcacgtgttggtcatcttagagaagcactggatgaaaagtatmgkgrtataaccattgaagaatttaaaaatttaatggtgacrcagattttgggaatcgatgacattaaagaggcraaacgataygaattawckgatgcagattgggaakcgattgawgaattrgytgataaaaagtataaaaattgggattggaattatggsaagtcaccyaaatatgaatayaatcgaagtgaaagattatcwtcaggtackgtagayatwacmatttctgttgaacaaaatcgtatygcagattgtmgwatttwtggkgatttctttggacaaggtgatataaaagatgtggaasaagcattacaaggaacaaaaatgacaagagaagatttaaygcatcagttaaagcaattagacatcgtttattattttggyaatgttacggtwgrakcattrgtkgakatgattttaagttaa

SEQ ID NO: 1415 - DNA, 552 bp, Staphylococcus aureus
atgttaacaatgaaagacatcattagagatggtcatccaactttgcgtcaaaaagcagctgagytagaattaccattaactaaagaagaaaaagaaacattaatcgccatgagagagtttttagtaaatagtcaagatgaggaaatcgcgaaacgwtayggtttacgttcaggcgttggtttggctgcacctcaaattaatatttctaaacgtatgattgctgttttaataccagatgatggcagtggcaaatcttatgactatatgcttgtgaacccwaaaattgtaagtcatagcgttcaagaagcttatttaccaactggtgaaggttgccttagtgtcgatgataatgttgctggtctagttcaccgtcataatagaattacaattaaagccaaagacatcgaaggtaatgatatacarttacgwctaaaaggatatccagcaattgttttccaacatgaaattgaycatttaaatggtgtaatgttctatgatcacattgacaaaraycacccattacaaccacatacagatgcwgtagaagtttaa

SEQ ID NO: 1416 - DNA, 180 bp, Staphylococcus aureus
atgtcgattgaaatacaagcagatatagaatttaaactagatgaaatggtagactgtgcagckgcgaaaatggctgcaataagtaatcctgctacaaatggtggcatctcagtcaaaatgaaatatggcactacagatgatgtattgaagccttttggtaaaacagcttcatgtgyataa

SEQ ID NO: 1417 - DNA, 1026 bp, Staphylococcus aureus
atgaataataaagtattagyraccggtggtacwggktttgttggcatgcgaattatttcacgattattagaacaaggttatgasgtacaaacracgatacgtgatttaagtaaagctgataaagtaattaaaacratgcaagacaatggcatttccacagagcgattaatgtttgtcgaagcggatttatcacaagatgaacattgggatgaagcaatgaaagattgyaartatgtsttgagtgtrgcatctccggtgtttttcggtaaaacagacgatgcagaagtgatggcgaagcctgcmattgaaggyatacaacgtattttaagagctgcasaacatgckggygtkaarcgtgtggtratgactgcaaactttggtgcagttggttttagyaataaagataaaaattcaatcacaaatgaaagtcattggacaaatgaagatgaaccaggcttatcagtatatgaaaaatcaaaattgttagctgaaaargcagcgtgggattttgttgagaatgaaaatacrayagtagaatttgccacaatcaatccagttgcaatttttggrccatcattagatgcacaygtttcaggaagyttycayttrttagaaaayttattraatggttcaatgaaacgtgtacckcaaattccrttraatgttgttgatgtgagagaygtagcwgaactrcacattttggcaatgacmaatgarcargcyaryggyaarcgatttattgckacrgctgatggrcaaattratttrttggaaattgcaaaattaattaaagaaaarmgacctgaaatagctcaaaaagttkctactaaaaaattrccagactttrttttgagtctaggtgctaaatttaatcatcaagctaaagaaggtaaacttttattagatatgaaycgmaatgtaagtaacgaacgtgcaaaaayaytwcttggttgggaaccgattgcgacacaaraagaagcaattttagcagcwrtygatagtatggctaartwtcatttaatataa

SEQ ID NO: 1418 - DNA, 1353 bp, Staphylococcus aureus
atgaataataaacgacattcaacaaatgaacaattaagtttagacgaaataaacaatacaattaaattcgatcatcgcagttcaaataaacagaaatttttatcatttcttggrcctgggttattagtcgctgktggttacatggatycckgraactggayaacatcwwtgcaaggtggcgcscmmtatggctatactttgctattcgkaawtcttatttcaagkttatcagcaatgttacttcaaagcatgacagtgagattaggaatagcaacaggtatggacttagctcaaatgacacgacattatttatcaagacctattgctataatcttttggatyattgcagaactagcaattatcgcyacagatattgctgaggttattggtagtgctattgctctyaatctcctatttaacatacctttaatygtcggtgcactaatwactgtacttgatgtatttttactactwtttataatgaaatatggttttagaaaaattgaagctattgttggtacattwattttcacagtgttattcatctttatatttgaagtctatatttcatcaccacagttgaaygctgtgttaaatggatttatwccacatagtgaaatcattacaaataacggcattctctatattgcattargtattattggmgcwacaattatgcctcataatttgtacttacattcatcaattgtacaatctagaacatactcaagacataacaatgaagaaaargcgcaagcgattaaatttgctacgatagattcgaacattcagttatcaatcgcatttgtagtcaattgcttattattagtgttaggwgcatcactatttttcaactcraaygctgacgatttaggtggtttctatgatttatatcacgccttaaaaactgaacctgtactaggtgcaacaatgggtgcaatcatgagtacattatttgcagttgcattattagcgtcaggtcaaaattcaacgattactggtactttagcaggacaaattgtaatggaaggatttttaagattacacataccaaattggttaagacgtttaattacacgttcycttgctgtcattcctgttatcgtatgyttaatcatttttaaaggtaatgcagctaaaattgagcaactacttgtattctctcaagtatttttaagtattgctctgccattctgtttaataccattacaattrgctactagtaataaagacttgatgggacctttctataataaaacatgggttaatatcatttcatggacacttattattattctaagtattttaaatgtctatttaatcgttcaaacattccaagaactacaargttaa

SEQ ID NO: 1419 - DNA, 303 bp, Staphylococcus aureus
ttgtttgtttacgatagtgattttattttcaatttgaattatccaaaaataagtaaagcgacggggatggtgattaatagcgacaaygccacgcgtaaaaaccaaatgatgatgagtttccagacaggtattttaatttcagttgctagtatacatggcactaatgctgagaaaaagataatggctgatacgcttactacaccgacgacaaatttagtactcattgcagctttagttactaacaaagatggtagaaacatytctacaatagaaatcgctgamgcttttgcwagtamagcctga

SEQ ID NO: 1420 - DNA, 420 bp, Staphylococcus aureus
atggaattcacttattcgtatttatttagaatgattagtcatgagatgaaacaaaaggctgatcaaaagttagagcaatttgatattacaaatgagcaaggkcatacgttaggttatctttatgcacatcaacaagatggrctgacacaaaatgatattgctaaagcattacaacgaacaggtccaactgtcagtaatttattaaggaaccttgaacgtaaaaagctgatctatcgctatgtcgatgcacargatacgagaagaaagaatataggrctgactacctctgggattaaactygtagaagcattcacttcgatatttgatgaaatggarcaaacactcgtatcgcagttatctgaagaagaaaatgaacaratgaaagcaaacttaactaaaatgttatctagtttacaataa

SEQ ID NO: 1421 - DNA, 615 bp, Staphylococcus aureus
atgacaaaatatacatttaaacctaaagatttcaaagcrttcaacgtagaaggcttagacgcacgaatggaagctktaaacgaatacatacgaccacaactccrtgaattaggagaatattttagtgacttctttacaagtcaaactggtgaracattttatcctcacgtagcaaarcatgctagaagaagtgtgaatsctcctaaagatacatgggttgcttttgcwacaaryaaamgaggctataaaatgttacctcatttccaaattggtatgtttgaagatcaactgtttgttatgtttggaatcatgcatgaagcaaaagataaagcaacacgtgcaaaagtttttgaaagaaamtttaaagctattcaacaattacctgatgattatcgtgtwtgcttagatcatatgaaacctgataaaccatttattaaagatttaacggatgatgatttaawagaagcgatacaaagagccatcaatgtgaaaaaaggtgaattctttatagcgcgtgcaatcacaccacaagataaaagattaaaaagtgacaaagcatttattgcatttttagaagaaaccttcgatcagttcttaccattttattctgcataa

SEQ ID NO: 1422 - DNA, 1356 bp, Staphylococcus aureus
atgaaagacgaacaattatattattttgagaaatcgccagtatttaaagcgatgatgcatttctcattgccaatgatgatagggactttattaagcgttatttatggcatattaaatatttactttataggatttttagaagatagccacatgatttctgctatctcwctaacactgccagtatttgctatcttaatggggttrggtaatttatttggcgttggtgcaggaacttatatttcacgtttattaggtgcgaaagactatagtaagagtaaatttgtaagtagtttctctatttatggtggtattgcactaggacttatcgtrattttagttrctttaccattcagtgatcaaatcgcagcaattttaggrgcgagaggtgaaacgttagctttaacaagtaattatttgaaagtaatgtttttaagtgcaccttttgtaattttgttcttcatattagaacaatttgcacgtgcaattggrgcaccaatgrtttctatgattggtatgttagctagtgtaggcttaaatattattttagatccaattttaatttttggttttgatttaaacgttgttggtgcagctttgggtactgcaatcagtaatgttgctgctgctctgttctttatcrtttattttatgaaaaatagtgacgttgtgtcagttaatattaaacttgcgaaacctaataaagaaatgctttctgaaatctttaaaatmggtattcctgcatttttaatgagtatcttaatgggattcacaggattagttttaaatttatttttagcacattatggaaacttcgcgattgcaagttatggtatctcatttagacttgtgcaatttccagaacttattatcatgggmttatgtgaaggtgttgtaccaytaattgcatataactttatgkcaaataaaggycgtatgaaagacgttatcaaagcagttatcatgtctatcggygttatctttgttgtatgtatgaktgckgtatttacaattggacatcatatggtcggactatttactactgatcaagmcatygttgagatggcgacatttattttgaaagtaacaatgrcatcattrttattaaatggtataggtttcttgtttactggtatgcttcaagcractggkcaaggtcgyggtgctacaattatggccattttacaaggtgyrrttatcattccwgtaytatttattatgaatgctttgttyggmctmacaggtgtcatwtggtcattattaattgctgagtcactttgtgctttrgcagcaatgttaatcgtytatttattacgtgatcgtttgacagttgatacatctgaattaatagaaggttaa

SEQ ID NO: 1423 - DNA, 192 bp, Staphylococcus aureus
atgaaacaaaaaaaatctaaaaatatcttttgggtattttctatattagctgttrttttcttagtattatttagttttgctgttggtgcatcaaatgtaccaatgatgattttaacatttatattactcgttgcaacctttggaattggatttactacaaagaaaaaatatcgagaaaacgattggctataa

SEQ ID NO: 1424 - DNA, 441 bp, Staphylococcus aureus
atgtgtaaatctaaaatactgttgaaaaatatttttagtgaagaatcagaagttaaagatttaactgaagaaaaatataatcaagattacgaagcattaacatttagctttaaagaggaaacatatcaaagtaggttagctaagaaaacaccgactaaatcgggatatttcgtgacatgttggacaaaagacgaagataattataatcggccatacaaaattgaagagtttgctgattacctgattgttgctgttatcgatgatgaattaaatggctactttctatttcctagggaattattggtagaaaaaggtatcttagcttcatctaagtatcaagggaaaatggcttttagagtttatcctaagtggtgtaatcaattgaataaaacagcagggcaaacacaaaagtggcaatgtaaatatttttttgaatactaa

SEQ ID NO: 1425 - DNA, 168 bp, Staphylococcus aureus
ttgagacaagtgcaatgcattatctgtgatgcaaaagtatttatagatgagcgcacaactgagtctaaacgacttaaaaacaatcctattcgaacatttatgtgygatgattgtaaaagtcgaytagacacmcctaaacaacgtgcgcaacactatccgctcgattaa

SEQ ID NO: 1426 - DNA, 483 bp, Staphylococcus aureus
atgatacaaattaaaggagcygtaaagtttcctataacattagatagtacgacttggattttcgatgatagaaaagttagcatcgaagatttagaaaaaggtgtatttgatggttcaaaaccaatcgactttgaagataatcatgaatggaatcgtgctatcctagaaggacaaactaatccgcctactttaaattcagaaataaaatataaaaaacgtgccatgttagaaggttcatttgtcattaatatgacaccwtttttcaaacattccgaaccacatgactctgcaactactattcgattatcaaatgagcatgatcatttagatataccgatagatctattrccctatttatttttccaatttgcaaaagacggtaaacgactttacagcgataatggtgtagatagttttatttacaatcaagaagatggttattcatatcgaatcaaccatgtaactcatattgaggtgatttaa

SEQ ID NO: 1427 - DNA, 927 bp, Staphylococcus aureus
atgaatatagtagggcatcatcacatatccatgtatacaaaagatgcaaaacgtaataaggatttttacacaaatgtccttggattacgattrgttgaaaagtckgttaatcaagacaatccttcaatgtatcatttgttttatggggacgaagtaggtacagccggaacaattttaagyttttttgaaattcccmatgcgggtcataagcagccaggtactgaaacgatttatcgattttcwttattagtaccaaatcaagcggcacttcattattttgaaaaacgycttgakaataatggtattamgtctgaacgtttgtactatcttggacaagaaggtgttgtytttaaagatgaagacgacttagaaatcataytgcttgttaatgatagttttgaagtaccacatcaatggcaacataacgyttatagtgaaatacctcaagyatatcaaattttaggaatagggccagtcgaattaagagttagaaatgcagcgcgtacggtagaatttttggaaaatgtcttaggttatcgcaaaagagataataaatcattcgatgtgctgacattagcaccacaaggtttatattcggattttgtagttattgagcaacagggacaacgtgaaagacctggacgaggttatatccatcatattgcarttaatacaccacaaatgartgacttagatgcaatttacaagaaaytacaacaacaamcacaaagtaattcaggtataattgatcgctatttctttaaatcattatactatcgccataattcaattatgtatgaatttgcgactgaagcgcctggatttactattgatacacctsttgaacaattaggaagtyaattgaacttgcctgactttttagaagcagaacgtgaacaaattgaaagtaagttacacgaaatataa

SEQ ID NO: 1428 - DNA, 1062 bp, Staphylococcus aureus
atggcmaaattagaaatgaataaaaatacrcctcttgagtttggtttgtattccttaggtgatcatttattgaatccattkaaaggtgaaaaagttagttatgagcaacgtattaatgaaattattgaagcaagtaaattagcagatgaarcrggtattgatgtttttgcagttggtgaaagtcaycaggarcattttacracacaggcacmtacggttgtgttaggtgcaattgcccaagcgacaaagcatatyaaagtttcaagttcttcaacgattattagtgcaacagatcctgtaagagtatttgaagacttcgcgacattagatttgatttctcatggtagagccgaaattgtagctggcagagcatcaagaacaggtrtttttgacttgtttggctatgatttaaaagactatgatgaattgtttgaagaaaaattaggtttacttttagagttaaataaaactgagcgtattacttggtctggaaaatatcgtccagaacttagaaatatgaaaatattcccaagaccaatcgataatayattgccaatatggcgtgctgttggtggtccacctgcaagtgctatyaaagcgggaaaacaaggtgtgccaatgatgattacaacccttggtggcccagcaatgaactttaaaggttctatagatgcttatcgtcaagcrgcaactgaagcaggtttcgatgcttcgcmtaagtctttaccagtaagtayagcgagtctgttttatacagctraaacaactcaggatgctatgagagaattttatccacatttgaatacagggatgtcatttattcgtggygttggttatccgaaacagcaatttgctaattcrycagattatmgagaagcgctaatggttggaagcccgcaacaaattattgaaaagatattgtatcaacacgagttrtatggtcatcaacgttttatggcacagcttgattttggcggtgtgccatttgaaaatgttatgaagaatatwgagttaattggcaacgamattataccrgcgattaaaaagcatttatcaaaatag

SEQ ID NO: 1429 - DNA, 1071 bp, Staphylococcus aureus
atgtcgtccacatacaatacttgtaaaattaaatcatatttcctgygttggatcccatctyttcawatccwacwrtyaggtyhattyatagtatyawctcaarkycrgctattaawtcwaawtctcagtgatgcgtttttttatgatggggtgtataaattgtttggcaaaaagaatttaaaatggttaggtgtcgtagcaacgttaatgatgacatttgtacaacttggtggagccttagttaccaaaaccggatcagctgatggttgtggttcttcttggccactatgtcatggtgcgttgattccagaattctttcctattgatacgattattgarttaagtcatagagccgtttcagctttgtctttattaatggtcttatggttagttatcactgcatggaaacatataggctatattaaagaaattaaacctttatcaatcattagtgttggattcttattattgcaagcattaatcggagctgcygctgttatttggcaacaaaacgattacgttttagcattgcactttggtatatcattaatcagtttctcatctgtatttttaataacattgattattttctctatagatcaaaaatatgaagctgacgaattatatatcaaaaagccattaagacgtttaacatggttaatggcaatcatcatttattgtggtgtttayactggtgcactagtgmgacatgcggatgcaagtttagcatatggtggttggccattgccattccacgatcttgtaccacattcagaacaagattgggtycaactcacgcatcgtatcatggcttttatagtgtttacgattattatgattacttatattcacgctgttaaaaattatccaaataaycgtactgttcattatggttatacagctgcatttatacttgttatattacaagttatcacaggtgcattrtctattatgacwaatgttaayytgmtaatcgcactwttccatgcattatttatcacttatttatttggtatgacaacatactttatcatgctaatgttacgatcagtaagaagtgacaagcaataa

SEQ ID NO: 1430 - DNA, 930 bp, Staphylococcus aureus
atgaaaaaagtaaacagaaacattttaaatgcggtactagtcggtgctggatttktaagtagtytrttaatgatmaataaaaataaagtgaktactaaaaagcaaaccatccctgcttttttcaaaggcaatgcaccatatatatttgcgcatcgcggtggtatggctttaagaccagagcaaacgcaacttgcatttgactatgcwaaacaattaggcgttgatggytttgaaacrgatgtgagactcacaaaagatcaacagcttatcgtttttcatgacgcaacwgtygatagaacgacgaacggctctggaaaagtyagtgcccayacmttagcagaattaaaraaattagacgcagsttatcacttcaaagatatcaatggactaacaccatatcgtggtcatgcacacacarctatactaaccttcgatgagttgctgaagcaatatcctgatatgtatataaacgtagacttaaargatgctcctgaatcctatgaaggctcaatcgcaccacaaattatgtttgatacaattgcagaraatcaagcatttgaccgygttcttgtgacaagtttttataaagaacaaatcgtwcgttttaataaaattgcacaargatcygtygcaattggtgctagccaacaggaagttacagargcatttttaaaatatcatttattaggtggtagrtactaccaaccattagcacaaacgttccaaatgcctactcattttaaaggyattratttgacttcatctcgttttatcaaatggttaaatgatatgaatrtcattccaggctattatggcgtaaatagtataratctgatgaatgatttataccaaaaaggtgcacacacgattgtgacagatcgaccagatttagcacaacaattcaaacaawcaatmmmsaayaaayaataa

SEQ ID NO: 1431 - DNA, 1113 bp, Staphylococcus aureus
atgaagttaaatacactccaattagaaaattatcgtaactatgatgaggttacgttgaaatgtcatcctgacgtgaatatcctcattggagaaaatgcacaaggaaagacaaatttacttgaatcaatttataccttagctttagcaaaaagtcatagaacgagtaatgataaggaactcatacgttttaatgctgattatgctaaaatagaaggtgagcttagttatagacacggcacgatgccattaacaatgtttataactaaaaaaggtaaacaagtcaaagtgaatcacttagagcaaagtcgtctaactcaatatattggacacctyaatgtggttctatttgcgccagaagatttgaatattgtaaaaggctctcctcaaataagacgacgctttatagatatggagttgggccaaatttctgctgtttacttaaatgatttagctcaataccaacgtattttaaagcaaaagaataattacttaaagcagttacaattaggccaaaaaaaggacttaacaatgttggaagtattaaatcarcagtttgctgaatatgcaatgaaagtaactgataaacgtgcacattttattcaagagctagagtcgttagctaaaccgattcatgctggtatcacaaatgataaagaagcgttgtcgctraattatttacctagtcttaaatttgattatgctcaaaatgaagcggcacgacttgaagaaattatgtctattcttagcgataatatgcaaagagaaaaagaacgaggcattagcttattcggaccacrtcgagatgatataagttttgatgtgaatggcatggatgctcaaacatatggttctcaaggacagcaacgtacaacggctttgtccattaaattagctgaaattgagttaatgaatatcgaagttggggaatatcccatcttattattagacgatgtactcagtgaattagatgattcgcgtcaaacgcatttattaagtacgattcagcataaagtacaaacatttgtcactacgacatctgtagatggtattgatcatgaaatcatgaataacgctaaattgtatcgtattaatcaaggtgaaattataaagtaa

SEQ ID NO: 1432 - DNA, 2007 bp, Staphylococcus aureus
atgaaaaagataaaaattgttccacttattttaatagttgtagttgtcgggtttggtatatatttttatgcttcmaaagataaagaaattaataatactattgatgcaattgaagataaaaatttcaaacaagtttataaagatagcagttatatttctaaaagcgataatggtgaagtagaaatgactgaacgtccgataaaaatatataatagtttaggcgttaaagatataaacattcaggatcgtaaaataaaaaaagtatctaaaaataaaaaacgagtagatgctcaatataaaattaaaacaaactacggtaacattgatcgcaacgttcaatttaattttgttaaagaagatggtatgtggaagttagattgggatcatagcgtcattattccaggaatgcagaaagaccaaagcatacatattgaaaatttaaaatcagaacgtggtaaaattttagaccgaaacaatgtggaattggccaatacaggaacagcatatgagataggcatcgttccaaagaatgtatctaaaaaagattataaagcaatcgctaaagaactaagtatttctgaagactatatcaaacaacaaatggatcaaaaktgggtacaagatgataccttcgttccacttaaaaccgttaaaaaaatggatgaatatttaagtgatttcgcaaaaaaatttcatcttacaactaatgaaacagaaagtcgtaactatcctctagraaaagcgacttcacatctattaggttatgttggtcccattaactctgaagaattaaaacaaaaagaatataaaggctataaagatgatgcagttattggtaaaaagggactcgaaaaactttacgataaaaagctccaacatgaagatggctatcgtgtcacaatcgttgacgataatagcaatacaatcgcacatacattaatagagaaaaagaaaaaagatggcaaagatattcaactaactattgatgctaaagttcaaaagagtatttataacaacatgaaaaatgattatggctcaggtactgctatccaccctcaaacaggtgaattattagcacttgtaagcacaccttcatatgacgtctatccatttatgtatggcatgagtaacgaagaatataataaattaaccgaagataaaaaagaacctctgctcaacaagttccagattacaacttcaccaggttcaactcaaaaaatattaacagcaatgattgggttaaataacaaaacattagacgataaaacaagttataaaatcgatggtaaaggttggcaaaaagataaatcttggggtggttacaacgttacaagatatgaagtggtaaatggtaatatcgacttaaaacaagcaatagaatcatcagataacattttctttgctagagtagcactcgaattaggcagtaagaaatttgaaaaaggcatgaaaaaactaggtgttggtgaagatataccaagtgattatccattttataatgctcaaatttcaaacaaaaatttagataatgaaatattattagctgattcaggttacggacaaggtgaaatactgattaacccagtacagatcctttcaatctatagcgcattagaaaataatggcaatattaacgcacctcacttattaaaagacacgaaaaacaaagtttggaagaaaaatattatttccaaagaaaatatcaatctattaamtgatggtatgcmacaagtcgtaaataaaacacataaagaagatatttatagatcttatgcaaacttaattggcaaatccggtactgcagaactcaaaatgaaacaaggagaaastggcagacaaattgggtggtttatatcatatgataaagataatccaaacatgatgatggctattaatgttaaagatgtacaagataaaggaatggctagctacaatgccaaaatctcaggtaaagtgtatgatgagctatatgagaacggtaataaaaaatacgatatagatgaataa

SEQ ID NO: 1433 - DNA, 261 bp, Staphylococcus aureus
ttgtatgtagtatatcgagcttcacatgaaacagctaaagaagctttgggcgataaagagttaagagccattgcacatgagttaactaaaacagttaaggataacatgagtgttgattggtctaaacgagacagtgctaaagctaaaatgagagttcaagttagacgcctattaaagaaatatggctatccaccagatcttcaaaaaatggctgtggaacaagttgtagagcaagcagaattaatggcaagtcagcaataa

SEQ ID NO: 1434 - DNA, 873 bp, Staphylococcus aureus
atgaataaacttcgagacactacttttctatcatatttatttactatcatattgtggggatctgcatttccaatgataaagattgcgttaaatgattttagtgcagaatcattgtcggcatttcgtttaattttagcaacaataattctcttgccgttcgtaattataaagaaattgcctacccctgaactaagagatatccctgttatttttattttaggattttgtggatttgtgatatatcacacagctttaaattttggtgaaactttgattagtgcrggtatatctggaattctagtctctacaacgcctattttttctagtgctttagcttatatatttttaaaagagcatttttcaaaatggaattggttaagttcactcgtcgcatttataggaatatccattatttcaataagtaaagatgattacacaactattaatgtattaggtgtttttattattttacttgcatcttttagtgaaagtttgtattttactttccagaaaaaatacatagaaaaatacggcttcatcgctttcacactatatacaataatggcaagctcaccatttatgcttatttttattcctgaaatcatcaacgatatacacggcgccacttttacatcaatagtatcggtactttatttagctatattccctactataattccatacgttttgcttgcttatattgtgaagtcagttggtgtctctgatgcaacaatgtctctttatttaacacctatcgtttctttattattatcttatctgttattagacgagctaccaacaacccttgctattataggcggaattatcactctactaggcgttagtttaagtaacttctttcaaaatacataa

SEQ ID NO: 1435 - DNA, 390 bp, Staphylococcus aureus
atgaaacaaacatttattacacttggtgaaggtctaacagatttgttcgaattcatgacgatgattgaatataaccatcaacgtattgataaaattatctattttcattcaccacaagctgaaaataaaaagtcatctgtagcaatcattatgaaccctacaactggcaatcatttccaagcattttatatcatgatwaacgctattaaatatccatatccagattcaaataaaaagtttcaaatgatwaatgattgygctgaaaaattcgacataccaattttaggtatcgatgtacagccycctcaagcatttcatgatttatcgttatattataattatttaattagtgtgttaaggctccaaaaatggataccagaacttcaataa

SEQ ID NO: 1436 - DNA, 546 bp, Staphylococcus aureus
atgtttggaatgaaagtgaatgaacaaataabattaaaaattttagaagcycatgacacagaagcgcttttcaatttagtcaatcgttcaagaaattcacttagggaatggttaccttgggtagatgcaacygagcaaccatcagatacgcgtgcrtttattaaaagwggacttttgcaatttkctgatggtaatggatttcagtgtggcatttggtatgaaggaacgctagttggtgtcatcggtttacatgaaattaatcrcatgcacagaaaaacttcattaggrtaytatttagataaasaatttgagggtcatgggattatgacacaagcagttgaggcattgataaagtattgyttcgawgagmttgamttaaaycgaattgagatyagtgccgcagttaataatgaaaaaagccrrgctattcctgaaaggctgggatttactagrgaaggtatgttacgtgacaatgaattactaaatggtatttattcatcgagttacatctatagtttattaaaatcagaatayraysaarratga

SEQ ID NO: 1437 - DNA, 1140 bp, Staphylococcus aureus
atgaaaagcgttggcttaatcacagaatataatccctttcataatgggcatcaatatcatattaatcaatctaaaaaacttacaaatgctgacgttactattgcaataatgagtggtaactttgtcatgcgtggcgaaccagcaatctataataagtttactcgtgcaaaaatggcrttatcaacagctgatttagttatcgaactaccagcaactgccagtttatcatctggcgatcattttgccgaactagcagttaaagtcgcagattatatgagtgtcgatacaattgcatttggtagtgaaaataatratatcaaaacattaaagcaattagcwcacagcattaatgaaattgaacaatcygaatccttttcacaaaaagtaaaagaaggtaaaagctaccctcgtatcattagcgaattattagagcatcatgaagcactagcaagtcctaacaacatacttggtattagttayctgaaagcaattgctaaamatgctaaaaacatcaatgcaatttctatyaarcgagaaaatgctcaacatcatgattcattaattcaacaycatmagtttgcaagtggtacatctattagaacatcaatcattagtcaagatgatcattggcatcatgtggtacctaaagatattcaacacytgtacgtaacacctcatataacattaaatcaaatattyccatatttgaaatatcaaatcatagctatgactacagaktcattaaaraatatttatactgttactgaaggttttgaaaatcgtttraaatctwacattwatgaagcaactgattttcatcattttgtaaaatyactaaaaacaaagcgttatacatatacgcatatccaaagactgttaatgaatgtattattaaacattaaacctacagatgttacgagwaacattcacgcagttaaagtattagcratgaacgaccgtggcagacaatatttaaagcatttaaaaacagygttcccagaaagacaatatataaccaatattaacaaaagcaatgcacattacttcacaaatgaaatcaaagcaacacacatatacaatgcaataagcgggcaacaacaaacagatttcaacacgcctgtcatacagcaatatcgttaa

SEQ ID NO: 1438 - DNA, 855 bp, Staphylococcus aureus
atgaaaaagttaacaacgctattattagcatcaacgttattaattgctgcatgtgggaacgacgatagtaagaaggatgattcaaagacatcgaaaaaagatgatggtgttaaagcagaattaaaacaagcaacaaaagcatatgataaatatactgatgaacagttaaatgaatttttaaaaggtacagaaaaatttgttaaagcgattgaaaataatgatatggcccaagcaaaagcgttatatccaaaagttcgtatgtattatgaacgctctgaaccagttgcagaagcatttggagatttagatcctaaaattgatgcacgtcttgcagatatgaaagaagagaaaaargaaaaagaatggtcaggatatcataagattgaaaaagcattatacgaagataagaaaattgatgatgtgactaaaaaagaygcacaacaattattgaaaratgcaaaagaattgcatgccaaagctgatacattagatatcacaccaaaattaatgttacaaggttctgttgacctattaaatgaagttgcaacttctaaaatcacaggtgaagaagaaatttattcacatacagatttatatgattttaaagcgaacrttgaaggygcacaaaaaatttatgacttatttaaacctattttagagaaaaaagataaaaaattaagtgatgatatycaaatgaacttcgataaagtgaatmaattattggataartataaagataacaacggcggttatgagtcatttgaaaaagtatckaagaaagaccgtaaagcatttgcggatgctgttaatgcattaggagagccactaagtaaaatggctgtgattactgaatga

SEQ ID NO: 1439 - DNA, 1939 bp, Staphylococcus aureus
atgaacaaacagcaaaaagaatttaaatcattttattcaattagaaagtcatcactaggcgttgcatctgtagcrattagtacacttttattattaatgtcmaatggcgaagcacaagcagcagctgaagaaacaggtgktacaaatacagaagcacaaccaaaaactgaagcagttgcaagtccaacaacaacawctgaaaaagctccagaaactaaaccagtagctaatgctgtctcagtatctaataaagaagttgwggcycctactwctgaaacaaaagaagctaaagaagttaaagaagttaaagcccctaaggaarcaaaagmrgwwaaaccwgcagcaaaagcsactaacaatacatatcctattttgaatcaggaactwagagaagcgattaaaaaccctgcaataaaagayaaagatcatagcgcaccaaactctcgtccaattgattttgaaatgaaaaaagaaagatgghrmkcaacarttttatcattatgcmagytctgttaaacctgctagagttattttcactgattcaaaaccagaaattgaattaggattacaatcaggkcaattttggagaaaatttgaagtttatgaaggtgacaaaaagttgccaattaaattagtatcatacgatactgttaaagattaygcttacattcgcttctctgtwtcaaayggaacaaaagchgttaaaatygtwagttcaacwcacttcaataacaaagaagaaaaatacgattacacattaatggaattcgcacaaccaatttataacagtgcagataaattcaaaactgaagaagattataaagctgaaaaattattagcgccatataaaaaagcgaaaacactagaaagacaagtttatgaattaaataaaattcaagataaacttcctgaaaaattraargctgartacaagaagaaattagargakacraaraaagctttagatgarcaagtgaaatcmgckatwactgaattccaaaawgtacaaccaacaaatgaaaaaatgacygatttacaagatacaaaatatgttgtttatgaaagtgttgagaataacgaatctatgatggatrcttttgttaaacaccctattaaaacaggtatgcttaayggcaaaaaatatatggtmatggaaactactaatgacgattactggaaagatttcatggttgaaggtcaacgtgttagaacwatwagcaaagatgctaaaaataayactagaacrattatyttcccatatgttgaaggtaaaactctatatgatgctatcgttaaagttcacgtaaaaacgattgattatgatggacaataccatgtcagaatcgttgataaagaagcatttacwaaagccaatrccgataaawctaayaaaaargaacaacaagayaactcagctaagaaggaarctactccagctaygcctagcaaaccaacamcaycacctgttgaaaaagaatcacaaaaacaagacagccaaaaagatgacaataaacaatyaccaagtgttgaaaaagaaaatgacgcatctagtgagtcaggtaaagacaaaaygcctgytacaaaaccarctaaagstgaagtagaatcaagtagtacaactccaactaaggtagtatctacgactcaaaatgttgcaaaaccaacaactgcttcwtcaraaacaacaaaagatgttgttcaaacttcagcaggttctagcgaagcaaaagatagtgctccattacaaaaagcaaacattaaaaacacaaatgatggacacactcaaagccaaaayaataaaaatacacaagaaaataaagcwaaatcattaccacaaactggtgaagaatcwaataaagatatgacattaccattaatggcattahtagctttaagtagyatcgttgcattcgtattacctagaaaacgtaaaaactaa

SEQ ID NO: 1440 - DNA, 1230 bp, Staphylococcus aureus
atgacaaattatgaacaagttaacgatagtacgcaattttcaagacgtacatttttgaaaatgttaggtattggcggtgccggtgttgcaattggcgcaagtggtgttggtagcatgtggtctttcaaatcaatgttcaatacaccagaagatccggaaaaagatgcgtatgaattttatggtaaagtgcaaycaggcattacyacacccacgcaaaaaacatgcaatttcgttgcrttagatttgaagtcaaaagatagagatgcaattaaggcaatgtttaaaaagtggacggttatggctgatcgtatgatggatggtgatamagttggcaagmcgagtaacaatcctttaatgccrccagtagatacyggtgaatcgatwggattaggtgcaagcaagttaacgattacctttggrattagtaagtctttgatgaagaaaattgggttatctagtaaaattcccgatgcctttaaagatttaccgcattttccgaatgatcagttaatagacgattacagcgatggtgatattatgattcaagcatgctcaaatgattcgcaagtatcctttcatgcggttcataatttagttcgtccatttcgagatattgttaaggtacgttgggcgcaatctggttttatctctgctaaaggtaaggaaacayctagaaatttaatggcatttaaagatggaacaattaatcctagraagartaatcaacttaaagattatgtgtttattgatgacggatgggcgaaacatggaacttattgygttgtcagacgtattcaaatacacattgaaacgtgggatcgtactgcrctggaagaacaagaggctacatttggtcgsaarcgacatagtggtgcrccgttaacaggtgggaaagagtttgatgaaattgacttaaaagcgaaagatagtcatggcgagtatattattgataaagatgcccatacgagrctagcgaaagaagcaaatacgtcaattttacgtagagcctttaattatgtkgatggtacggatgaccgcacaggtaacttcgaaacaggcttrytkttyattgcttttcaaaaagcgacmmaacaatttatcgatatwcaaaayaatttaggtagtaatgataarttaaatgaatayattacacatagaggttctgcttcatttttagtattaccaggtgttagtaagggaggataccttggtgaaacattatttgaytaa

SEQ ID NO: 1441 - DNA, 804 bp, Staphylococcus aureus
atggatgactatatgcaacaccctggtaaagtaattaaacaaaataataaatattatttccaaaccgtgttaaacaatgcatcattctggaaagaatacaaattttacaatgcaaacaatcaagaattagcaacaactgttgttaacgataataaaaaagcggatactagaacaatcaatgttgcagttgaacctggatataagagcttaactactaaagtacatattgtcgtgccacaaattaattacaatcatagatatactacgcatttggaatttgaaaaagcaattcctacattagctgacgcagcaaaaccaaacaatgttaaaccggttcaaccaaaaccagctcaacctaaaacacctactgagcaaactaaaccagttcaacctaaagttgaaaaagttaaacctactgtaactacaacaagcaaagttgaagacaatcactctactaaagttgtaagtactgacacaacaaaagatcaaactaaaacacaaactgctcatacagttaaaacagcacaaactgctcaagaacaaaataaagttcaaacacctgttaaagatgttgcaacagcgaaatctgaaagcaacaatcaagctgtaagtgataataaatcacaacaaactaacaaagttacaaaacataacgaaacgcctaaacaagcatctaaagctaaagaattaccaaaaactggtttaacttcagttgataactttattagcacagttgccttcgcaacacttgcccttttaggttcattatctttattacttttcaaaagaaaagaatctaaataa

SEQ ID NO: 1442 - DNA, 1065 bp, Staphylococcus aureus
atgacaaaacattatttaaacagtaagtatcaatcagaacaacgttcatcagctatgaaaaagattacaatgggtacagcatctatcattttaggttcccttgtatacataggcgcagacagccaacaagtyaatgcggcaacagaagctacgaacgcamctaataatcaaagcacacaagtttctcaagcaacatcacaaccaattaatttccaagtgcaaaaagatggctcttcagagaagtcacacatggatgactatatgcaacaccctggtaaagtgattaaacaaaataataaatattatttccaagctgtattgaacaacgcatcattctggaaagaatacaaattttacaatgcaaacaatcaagaattagcaacaactgttgttaacgatgataaaaaagctgacactagaacaatcaatgttgctgttgaacctgggtataagagtttaactacaaaagtacatattgtcgtgccacaaattaattataatcatagatatactacgcatttagaatttgaaaaagcaattcctacattagctgacgcagcaaaaccaaacaatgttaaaccggttcaaccaaaacctgctcaacctaaaacacctactgagcaaacgaaaccagttcaacctaaagttgaaaaagttaaacctgctgtaactgcaccaagcaaaaatgaaaacagacaaactacaaaagttgtaagtagtgaagctacaaaagatcaaagtcaaacacaaagtgctcgtacagtgaaaacaacacaaacagctcaagatcaaaataaagttcaaacacctgttaaagatgttgcaacagcgaaatctgaaagcaacaatcaagctgtaagtgacaataaatcacaacaaactaacaaagttacaaaacaaaacgaagttcataaacaaggaccttcaaaagattctaaagctaaagaattaccaaaaactggtttaacttcagttgataactttattagcacagttgccttcgcaacacttgcccttttaggttcattatctttgttacttttcaaaagaaaagaatctaaataa

SEQ ID NO: 1443 - DNA, 1713 bp, Staphylococcus aureus
gtgaaacattatttgaytaaawttrtagcraygmtaatwactkywgytatggtrtktagctttgggttaytgaaaagtcaggcagcaraacaacaaagtattagtgatgtatatagtgtgataacggatgcraaatctgcactttctaataattcgatatcgaawgacaataagcwgaaagcaattgagcaagtggtaagtgcagttaagaaattatcgcttgaagataatagygaargtaatgctgtcaaatcaratgtgagaaagcttgaagatgcaaaagcgaatgatratcaaaaagatacactttcgcaattaacgaagtcattaattgcttatgaagagaaattggctagtaaagatgcgggttctaaaattaaactrttgcaacagcaagtcgatgcyaaagatgcwgyratgacaaaagcgattaaagayaaaaataaagcrgarytagaatckytgaacaatagtttraatcagatttggacwagtaatgaaacrgtrattcgcaattatgacgcaaatcaatatggacaaattgaagtcgcattaytrcaacttagaatygcaattcataagtcrccattagatacrgcraaagtgtcacatgcttggacaacttttaaatcaaatattgatcatgtcgataaraaaagtrrtacgtctgcaaawgatcaataccatgtatcacaattaaatgatgmgttagagaaggcgattaaagctatcgacracaatcaattgtcggatgctgatgctgcgcttacacattttatagaaayttggccrtatgttgaaggtcaaattcaaactaaagacggkgctttgtatacgaaaattgaagataaaataccatattatcaaagtgtattagacgaacataataaakcrcatgtsaaagatggtttagtagatwtaaayaaycaaattaaagaggttgttggccatagttatagcttygtygatgtgatgattatctttttacgtgaaggdctagaagtgttrttaattgtaatgacattgactacyatgacgcgtaawgtmaaagataakaarggkactgcaagtgtgattggtggtgcaattgccggacttgtaytgagtatyrtyttagcaattacrttygtagaaacwytaggkaatagyggyatkcttcgtgaragtatggaagcgggattaggtatygttgcggtcatattaatgtttatcgttggtgtttggatgcayaaacgttcraatgcraaacgytggaatgayatgattaaaaatatgtatrcyaatgcgattagtaatggtaatttggtattgttagcgacgattggtttaatatctgtgttgcgtgaaggtgtygaggttatcattttctatatggggatgataggygarytagcgacmaaagattttrtyatwggtattgcyttrgcyatmgtkatwttaatyrtctttgcrbtattatttagatttatmgtyarattratacctatwttctatatatttagagtrttgtcgatytttatttttattatgggattcaaaatgcttggcgtaagtattcaaaagttacaattattaggtgckatgccragacatgtyattgaaggattcccaacgattaactggttrggmttytatccaasttaygaaccattgatagcacaagstgcytatattatggtagttgctatcttaatctttaaatttaaaaaataa

SEQ ID NO: 1444 - DNA, 171 bp, Staphylococcus aureus
atgactgataatactaagtttattaatattgatacgaacacaccaaagtatcgagttaataaaaagttgagcggtatcaatggtagagatactacatacatcaacaatattgtcaccaataacaacatagcattaaccggatgtggattaataattaggtcacctatataa

SEQ ID NO: 1445 - DNA, 939 bp, Staphylococcus aureus
atggcgaatatcgtttttaaattgtcggataaagacataacgacattaatgtcacgcattwcttttgatactgagaatttacctcaaggtatgaaagcacgtgcaaagtatcaaaatacaactgtaaatatttaccaatcaggtaaagtcatgtttcaaggtaatcatgcagaagctgtgtctraagaacttctaccgcagcattctcaattgaatactaataaaactaaaaagaaaaatayggcyaattcttytcttgaacaractttaatgtatgatcaatttaactgtattggtagtgatgargctggaagtggcgattactttggtccdttgactgtrtgtgctgctttygttaccaaagagcatgtycctattttaaaaactttgggtgtagatgattcaaaaaaattaaccgatacyaaaattgtagaacttgctgakcaattggttrctttcatmccacattcaytattaacactacacaatgawaaatataatattcagcaagcaaaaggctggactcaagtaaaaatgaaagctgyycttcataatgaagccatcaaaaatgtacttgaaaaaattgattcgtctcaattagaytatatcgtcattgatcagttcgcaaaacgcgaagtgtatarccattacgcattatchgatataccacttccaaagaaaacaaaatttgaaacaaaaggagaatcgaagtcattagccattgcagtggcaagcataatytctmgatacgcatttrttacatatatggatcaaatatcaaaawatattaatatgacgattcctaaaggtgcyggtgctaaagtcgatgtaatygccgcmaaaatwataaaaaawtacggtmtttcacrtttagatwccatttcaaaaaarcatttyaaaaatcgtgaaaaagcccaaaaaattttaaagcctctttga

SEQ ID NO: 1446 - DNA, 714 bp, Staphylococcus aureus
wtgaaaatactaagatatatcggatatcttttactrggtggamttgtaggkggtatcatwggtggaattttaggtaaytttgatggattkggtattgagaayttgacgttygcracdyatamcaatgtcgttgtaatatcrattrttgcgackatdatyatcatattrrtagaarycattgttttgatgaatcaaagacgtgcattgaagtataagcracttgtagatraagaggtagatawcgawgmaacagatcaatatgarttgcttgcgaatcgtyatgttttaaatggaagtatattaagyrttmtrcagacarttattgcyttkktagtrttrctwatttttgtggtaggrcamgctgmagyaaatgsaatrctattmtttttaataccattttttgctagtgctattttcaatacacaatttacrctgtttaatagaarrtttgatgayagaatrccaaaaattgcagataagaattacactgaaaagcgattggaaatattggatgaaggtgaacrccatatagaattaattgcattatttaaaacatatgcratcaacttatcmatattgatactagccattrtwktwatwgggyyttattcaattrctacwggaattaatcaaagctttagtttgctacttatcattgctattttcatatataacgcctttagytatttattgaagagaagacgtttttattaa

SEQ ID NO: 1447 - DNA, 93 bp, Staphylococcus aureus
atgctagattatcatttaacgttcatagatttattaatcccaccattctcaagtcgtaaacaatatgatgacttatcattcaactttttatat

SEQ ID NO: 1448 - DNA, 402 bp, Staphylococcus aureus
atgaaaaaaaatatcacaaaaactattatcgcatctacagtaatcgctgcaggtcttttaactcaaactaatgatgctaaagctttctttagttatgaatggaaaggtttagaaatcgcaaaaaatttagcagatcaagctaaaaaggacgatgaacgtattgataagttaatgaaagagtctgataaaaatctaactccttacaaagctgaaactgttaatgatctgtaccttattgttaaaaaattaagccaaggtgatgtgaagaaagcagttgtcagaattaaagatggtggtcctagagattactatacttttgacttaactcgtcctttagaagagaacagaaaaaatattaaagttgttaaaaacggtgaaatcgactcgattwmttggkattaa

SEQ ID NO: 1449 - DNA, 843 bp, Staphylococcus aureus
atgacaacattgttaaacktagatmgtgtgaacaaacaatacaarkmttcggattttaaattrcaagatgcatctttaacgatttctacyaatgagacagttggattaattgggaaaaatggctcaggtaaatcgacattaattaatattctagtaggcaatcgacataaagataacggtagtatyrcattttttggrgaagaacatrcyrykgatgatgtcgaatataaagaacacataggtgtwgtgtttgatgatytgagagtrcctaataaattgactattaaagatattgataaagtatttcaatctatttataygacttggaatagtcaaaaattctttgatttaatcaaatatttcgagttrccackacaaactaaaattaaaactttttcaagagggatgcgaatgaagatagctttracgattgcgctttctcatgatgtgaagytattratcttagatgaagcaactgcrggtatggatgtttctggamgagaagaagtaatggaamtaytagaagattttgtcgcdcaaggtggaggcatcttaatatcatckcatatttctgaagatatagaacawttagckgataaattagtgtttatgaaagatggacgaatgattttaactgaacagaaagatatacttttagcacamtatggaattgttacgacagragataaagatgtwgaaattmctaagcatttaatcattgcttctagattrtcraaggggaaatatcaaattttagttaaagattatgcagaaattgaaaatgcagarcctttaaaacacattgatgacgctacraaaatcataatgcgaggtgaagtataa

SEQ ID NO: 1450 - DNA, 291 bp, Staphylococcus aureus
atgtattctaaaatcttaaatatgacaatgataaatactaatcctaatcctgaatatgatatggcaaaaaatacattactaattgagtcyacaattcctctggatattgctgatgctaataaaataattggacaaaacagcagcaaaagtgatattaaaaataatgctaatacaaataatccaactatagatactggtataaggatgacaaaaatagatagaatgcctaaacttaatgaagcagcaacagctcttgaaatattttcaaawgttggtttagattcagcataa

SEQ ID NO: 1451 - DNA, 630 bp, Staphylococcus aureus
atgaaaggtatgttcctaagtagtttttatgcaacgagaaagcaaacatatatttattttatagtcgctatyatagctgcrggatactttgcagtatttaatccgttgatgagttcggcaatggctggggttatgttaatyacaccyattactgataatattaaacatgaaaaagactcaagatggatgtattatgtatctactttaccggttaaacgtagtgattatattaagtcatactttgccttttatttaatcttattcggtgcaagtttaatgattggattagttgtgactacgatygtgacccaaagtgtgatgattggtattatgtcaggtttaatgagttttggtatcataggggcatactctatcattttcccattgacatttaaatttggcgctgaaaactcyaatgtcattatgatakktgcatctatmctactacttwtttctttcgtggtctttttctttatatatggtatggttagyggtgcatckgcattagaatttgaaaaaattagcactgraggatggytagttgtcatagyatatgcggtyatyggtatmgttataacragygtttcttatatrtygtctattaaaatttttaacaaacaagaactataa

SEQ ID NO: 1452 - DNA, 1182 bp, Staphylococcus aureus
atgacgagagtcgtattagcagcagcatacaggacacctattggcgtttttggaggtgcgtttaaagacgtgccagcctatgatttaggtgcgactttaatagaacatattattaaagagacgggtttgaatccaagtgagattratgaagtyatcatcggtaacgtactwcaagcaggacaaggacaaaatccagcacgaattgctgctatgaaaggtggcttrccagaracagtrcctgcatttacrgtgaataaagtatgtggttctgggttaaagtcgattcaattagcatatcaatctattgtgactggtgaaaatgacatcgtgctagctggcggtatggagaatatgtctcartcaccaatgcttgtcaacaacagtcgcttyggttttaaaatgggacatcaatcaatggttgatagcatggtatatgatggtttaacagatgtatttaatcaatatcatatgggtattactgctgaraatttagyrgarcaatatgrtatttcaaragaagaacaagatacmtttgctgtaaactcacaacawaaagcaktacgtgcacarcaaaatggtgaatttgatagtgaaatagttccagtatcgattcctcaacgtaaaggtgaaccaatcktwgtcactaaggatgaaggtgtacgtgaaaatgtatcagtygaaaaattaagtcgmttaagaccagctttcaaaaaagacggkacagttacagcaggtaatgcatcaggaatcaatgatggtgctgcgatgatgttagtcatgtcagaagacaaagctaaagaattaaatatcgaaccattggcagtgcttgatggctttggaagtcatggygtagatcctkctattatgggtattgcmccagttgrcgctgtwgaaaaggctttgaaacgtagtaaaaaagaattaagygatattgatgtatttgaattaaatgaagcatttgcagcacaatyattagctgttgatcgtgaattaaaattacctcctgaaaaggtgaatgttaaaggtggcgctattgcattaggacaycctattggtgcatctggtgctagagtwttagtgacattattgcatcaactgaatgatgaagttgaaactggtttaacatcattgtgtattggtggcggtcaagctatcgctgcagttgtatcaaagtataaataa

SEQ ID NO: 1453 - DNA, 234 bp, Staphylococcus aureus
atggtttttaatgattgggaaattaacgttgtatactcaggagagcatgaggttgtaacaaaygaaaagagtttatttgtcattgacgaattttacgatgttgcaatcgcaatctattatttagatggaaaattaaaagtagctcatgtcaactatggttctgattttacaattgacgtagctaataaagtttttgaattgaatattcaaaatccaaatgttgatgagcattaa

SEQ ID NO: 1454 - DNA, 1578 bp, Staphylococcus aureus
gtgtatgattttttagaatacttacatcgttattgtataaaatcaattaataattgggaggctgttgcagacatatcatgcaaagttgaacgtggaaatgttagtacgggctattatgttaaacaagatagaattgtaatagatgatagtgatatacctccaattattaaaataagtggaagttatatagcagcagacatattagttactagatatttagatggaatgggtgaatttataaaggtatcaaaattagatcaatcgagctattacgaatggtttatgtttgttgaagaaacgagaagaatatttagaggtacagaaatagtttatcaatttttaaaatatctatttacgcatacctatgaacataaaaatgaagaaaaaagaatagaaaaacatatgaaaaacattatcatagataatcaatttagagggcagcatatcaatgatatcgttcgtttagacatgaaagatgataatatgttattttacaattttgatatatacgatacaaatgttctttataaagaaatagacgaggaaaaattacttagaattttagatgaaataagtaatactgacaattacaaagcgctatttaacattataagtgagaatcaaaagaaattttggaaatcaaatattaaaccaattgtaagtgaatgttcagatggtataaatacaaccacatttgatttatatgcttatgtaaataagtatataagtaataaaatatttgactgtgataattatttaattactaaaaatgaggttgtggatttctattttaatcatggtagtgactttaataatttcaagatgggacagacaggcacaaagtccaaatttaagcagggaaataaacttaaaatacacgaatatatcattgcagtaacttatgtaaatttattaaatcattcatatatgaaatatatcaatgctgaaagttactatgaccctagcaaaaaaataataaaaggaatgaaaaatgattatcataaatttacagattcattcagtgattttgtagaaatggtggacgatataacatggagaatccgtgattcgtttgattatattggaggattaaaaaataaagaaattagcgaagatgagaacgaatatatcgaacaattaattcaatttgttatattatctaaattcggctatatgaatgtggaaaatcattttaattatattgagaacttaaatacacttaataacgaattaacgactatattaagaagtgaattcgcgcacatttcaaatgatatgtataataatttatttggtaatttattcgatgttgtaaatacatggaaaaaagattattcaaataatttttataataatactcagaatactatacctacagaaaaattagatataatatcttcatttataaaacaatatgataaaccaattgaacgagacgaacatggcaaacacgttaaagcaaaagtgtttgaaggtataagtgattttcataagcgtgtaaaaaaaggatttgataataatgatgtgctattgcatttgagattggaaatgagtgtacatgaaaataagtatgattaa

SEQ ID NO: 1455 - DNA, 846 bp, Staphylococcus aureus
gtgagtgaattgtcaaaaagtgaagatcaacgtattactaaaacaaaagatgaacaaattaagcaaatagatatatcggatatcaaaccgaatccgtatcagccccgaaaaactttcgatgaaaatcatttaaatgatttggcagattcaattaagcaatatggwattttgcaaccaattgtgcttagaaaaacagttcaaggttattacattgtagttggtgaaagaaggtttagagcttcgaaaattgctggtctaaaatacgtatcagcgattatcaaagatttaacagatgaagatatgatggaactggcggtcatcgaaaatttacaacgagaagacttaaatgcgattgaagaagctgaaagttatcaacgtttgatgacagatttgaaaattacrcaacaagaagtagcgaarcgattgagtaagtcgcgcccgtatatagcgaatatgttgaggttattacatttrccgaaaaagattgctgacatggtaaaagatgggcgactgacaagtgcacatggacgaacgttattggcaattaaagatgaacaacaaatgcttaggttagcgaaacgggttgttaaagaaaagtggagtgtyagatatttagaaaaccatgttaatgaattaaaaaatgtttcgtcaaagtcggaaacagacaaagtagatataactaagcctaaatttataaagcarcaagaacgacagttgcgagaacagtatggyrcmaaagtagatatatcrataaaaaaatcrgtyggyaaaatctcatttgagtttgawtcrcaagawgaytttstragaatmattraacaattaaatcgtargtatggtaaatag

SEQ ID NO: 1456 - DNA, 717 bp, Staphylococcus aureus
atgagtaagaacatcacgaaaaatataattttaacgacaacattattactattaggtactgtattacctcaaaatcaaaaaccagtatttagtttttactctgaagctaaagcttatagcattggtcaagatgaaactaacatcaatgaattaattaaatattacacacagcctcatttttcattttcaaataaatggctatatcaatatgataatggaaacatttatgttgaacttaagagatattcatggtcagcacatatatctttatggggcgctgaaagttggggaaatattaatcagttaaaagrtcgttacgtagatgtgtttggactaaaagacaaagatactgatcagttatggtggtcttatagagagacatttacaggtggcgttacaccagccgcaaaaccttctgataaaacttataatctttttgtgcaatacaaagataaactacaaacgattattggtgcgcataaaatataccaaggcaataaaccagtattaacattgaaagaaatcgatttccgtgcacgagaagcgttaataaaaaataaaatattatatamcgaaaatcgtaataaaggtaagcttaagatcaccggtggcggtaataactacactattgatttaagcaaaagattacattcagatctagcaaatgtttatgttaaaaatcctaataaaataactgttgacgtcctctttgattag

SEQ ID NO: 1457 - DNA, 1098 bp, Staphylococcus aureus
atggctttaacagcaggtatcgttggmttrccaaacgttggtaaatcaacattatttaatgcaatwacaaargcrggtgcyttrgcagcraactatccrttcgcwackatwgayccwaaygtrggkatwgtagaagtgccagatgcwagaytacttaaattagaagaaatggttcaacctaaaaaracattrcckactacatttgaatttacagatatygcyggwattgtkaaaggtgcttcwaarggwgaaggkttaggtaataaattcttatcacatattagagaagtagatgcratttgtcaggtygttcgtgcwtttgaygatgataaygtaacwcatgtwgctggtcgagtwgayccwattgatgayatygaagttatyaatatggaattagtactwgcrgacttagaatcwgttgaraaacgyttrcctagaattgaaaaattrgcacgtcaaaaagataagactgckgaaatggaagtrcgtattttaacaactattaaagaagctttagaaaatggtaaacccgctcgtagtattgactttaatgaagaagaycaaaaatgggtgaatcaagcgcaattactgacttctaaaaaaatgctttatatcgctaatgttggtgaagatgaaattggtgatgatgataatgataaagtaaaagcgattcgtgaatatgcagcgcaagaagactctgaagtgattgttattagtgcaaaaattgaagaagaaattgctacattagatgatgaagataaagaaatgttcttagaagatttaggtatcgaagaaccaggattagatcgattaattagaacaacttatgaattattaggattatcaacatattttactgctggtgtgcaagaagtacgtgcttggacatttaaacaaggtatgactgcacctcaatgtgctggtatcattcatactgattttgaacgtggatttatccgtgccgaagtaacaagttatgaygactatgtacaatatggyggcgaaagtggcgctaaagaagcgggcagacaacgattagaaggtaaagaatatattatgcaagatggygatatcgttcatttcagatttaatgtataa

SEQ ID NO: 1458 - DNA, 726 bp, Staphylococcus aureus
atgaacaataacatcacgaaaaaaattattttatcaacaacattgttactattaggtacagcatytacacaatttcytaatacacctatcaattcttcatctgaagcgaaagcttattatataaatcaaaacgaaactaacgttaatgagttaactaaatattactcgcaaaaatatttaaccttctctaacagtacgttatggcaaaaagataacggtacgattcatgcaacgtygttacagttttcttggtatagtcatattcaagtttatggacctgaaagttggggcaatatcaaccaattaagaaataaaagcgttgatatttttggcataaaagaccaagaaaccattgattcttttgcattatctcaagaaacgtttactggtggtgttactcctgcagcaacatctaacgataaacactataaactgaatgtracatataaagataaagcagaaacgtttactggcggatttccagtttatgaaggcaataagcctgttttaactttaaaagaattagattttcgtattcgtcaaacattaattaaaagtaaaaaattatataataattcttataataaaggacaaattaaaataacaggtrcagacaataactacacaatagatttaagtaaaaggttgccatcaactgatgcaaatagatatgttaaaaaacctcaaaatgcaaaaattgaagttatcctcgaaaaatcaaactaa

SEQ ID NO: 1459 - DNA, 504 bp, Staphylococcus aureus
atgctaaatagagttgtattagtaggtcgtttaacgaaagatccggaatacagaaccactccctcaggtgtgagtgtagcgacattcactcttgcagtaaatcgtacgttcacgaatgctcaaggggagcgcgaagcagattttattaactgtgttgtttttagaagacaagcagataatgtaaataactatttatctaaaggtagtttagctggtgtagatggtcgcttacaatcccgtaattatgaaaatcaagaaggtcgtcgtgtgtttgttactgaagttgtgtgtgatagygttcaattccttgaacctaaaaatgcrcaacaaaatggtggccaacgtcaacaaaatgaattccaagattacggtcaaggattcggtggtcaacaatcaggacaaaacaattcgtacaataattcatcaaacacgaaacaatctgataatccatttgcaaatgcaaacggaccgattgatataagtgatgatgacttaccattctaa

SEQ ID NO: 1460 - DNA, 948 bp, Staphylococcus aureus
atgagacttcaaaaagcacctctagtaacgtcaggactagtcttaggattattaggcctgggtaatctattaaaagacttatctcttactttaaacgctrtttgcggaatctttgctttcttgatttggattcaccttttatgtactatgmtcaaatattttaataatgtgaaagaacaattaaacagycctctagtttcatcwgtgttcacaacatttttcatgtctggctttttaggtactacttatttaaatacattttttagtaayataacwtttatcaataryttaataacgcctatttggattttatgccttgtgggaattatgaygcatatgattattttttcaatwaaatatttaaaagatttttcacttgaraatgtttatccttcrtggactgtactttttattggtattgctatcgcaggattgacggcacccgtyagcggatrttttttcataggtcaattaacagtaatatatggctttgtagctacttstattgtcttacctatwgttttcaagcgattaaaagcatttccattgcagacgtcaatcaaaccgaacacatcgacaatttgtgcaccattttctttagtcgctgcagcatatgttatagcytttcctaargcgaatgcttttatcgtaattatayttttamtattagctcaaatattttatttttayatcattatacaattgcctaaattactaaaagaacctttttcgccmgtattttcagctttcacattccctttagtaatctcwgcaactgctttaaagaacagtttgcctgtrcttatgtttccagwyatttggaarggycttttgtttatcgaagtgttattagccactgtaatagtacttagagtctttataggataycttcacttctttttaaaaaaggaaaahcaagataaatttcttcgtaatgcgtctcagtaa

SEQ ID NO: 1461 - DNA, 243 bp, Staphylococcus aureus
atggcaggtggaccaagaagaggcggacgtcgtcgtaaaaaagtatgctatttcacagcaaatggtattacacatatcgactacaaagacactgaattattaaaacgttttatctcagaacgcggtaaaattttaccacgtcgtgtaactggtacttcagctaaatatcaacgtatgttgactacagctatcaaacgttctcgtcatatggcattattaccatatgttaaagaagaacaataa

SEQ ID NO: 1462 - DNA, 446 bp, Staphylococcus aureus
atgagtgaaatcaaacgtcttgaaattaattacaaaactgacgaattattcgaaaactttagagcgtttggcaacaaagacttatacatggtcaatgagttaaacggtcaaatgattgaygcaagttcagattcaccattttatggcatatttgtcggagatcaattaggagctagaatggcattactwaaaaaaggtgatgtcgaagaaatctacttcccagattttgaagattatatattattatggaagttagaagtattaccaaaatatcaaaacagagggtacgcttcagaattgattgattttgcaaagagtttcaatatgccaattaaagccattggcagaaatgattctaaggatttctttttacatcatggatttacagatgtggaagctaaaaatatagagggacatgatgtcttattgtggaaaccmtaagataa

SEQ ID NO: 1463 - DNA, 612 bp, Staphylococcus aureus
atgttcaaaaaawatgactcraaaaattcaatystattaaaatctattctatcgctaggtatcatctatgggggaacatttggaatatatccaaaagcagacgcgtcaacacaaaattccycaagtgtacaagataaacaattmcaaaaagttgaagaagtaccaaataattcagaaaaagctttggttaaaaaactttacgatagatacagcmarratacaataaayggaaaatctaataaatctaggaattgggtttattcagagagacctttaaatgaaaaccaagttcgtatamatttagaaggaacatacasagttgctgryagagtrtatacacctaagagraatattactcttaataaagaagttgtcactttaaargaattggatcatatcataagatttgctcatatttcytatggcttrtatatgggagaacatttgcctaaaggtaacatcgtcataaatacaaaagatggyggtaaatatacattagagtcgcataaagagctacaaaaagatagggaaaatgtaaaaattaatacagccgatataaaaaatgtaactttcaaacttgtgaaaagtgttaatgacattgaacaagtttga

SEQ ID NO: 1464 - DNA, 1698 bp, Staphylococcus aureus
atggcttatgatggmttatttacaaagaaaatggttgagtctctacaatttttaacaacaggacgygttcacaaaatcaatcaacctgataatgacacgatactaatggttgtacgtcaaaatagacaaaaccatcaattgttattgtcaatccatccaaacttttcaagattacaattractactaaaaaatatgataatccatttaatccacccatgtttgcgcgtgtttttagaaaacacttagaaggtggtattatcraatcgattaagcaaattggtaatgatcgtcgcattgaaatcgawataaagagtaaagatgaaattggcgatactatttaccgcactgtcatccttgagattatgggtaaacatagtaacttaattttagtagatgaaaatcgyaaaataattgaaggatttaaacacttaacaccaaatacgaatcactatcgwacagtaatgccaggatttaattatgaagcaccacctactcagcacaaaatraatccgtatgatattacaggtgcagaggtgttgaaatatatcgattttaacgcaggtaatattgctaaacaattattgaatcagtttgaaggrtttagccctttaattacgaatgaaatygttartcgtcgtcaatttatgacttcatcaacwttaccagaagcattygacgaagtaatggcagaaaccaagttaccacctactcctatttttcataaaaatcatgaaacaggtaaagaggatttctattttataaagttaaatcaatttaatgatgatacagttacrtacgattcattaaatgatttrcttgatcgtttttatgaygcgcgtggcgaacgkgaacgcgttaaacaacgtgcgaatgatttagttcgatttgttcaacagcagttgcacaaatatcaaaataaattagcgaagttgattgaagaatatgagcagtctaaaaataaagatacygaacagttatatggtgaattgatyactgctaatatatatcgaattaagcaaggcgataaagaagtgacrgcattgaattattatacgaatgaagaagttgtcattcctttaaatcctacaaaatccccatcwgcaaatgctcaatattattataaacaatataatcgtatgaaaacgagagaacgtgaattacaacatcaaattcaattgacgaaagayaatatagattatttttcaacaatcgaacaacaattacatcatatttctgtccatgacattgatgaaattagagatgaattagcagaacaaggctttatgaaacagcgtaaaaatcaaactaagaaaaagaaagcgcagattcaattacaacattatgtatcaactgatggcgacgatatatatgttggyaagaataacaagcaaaatgattatttaacaaataaaaaagctaaaaaaactcacacatggttacacacaaaagatattcctggttcacatgtcgttatatttaatgatgcaccaagtgatacgacaatcaaggaagcggctatgttagcaggatacttttcaaaagctggtaattctggacaaatacctgttgattayacrttaattaaaaatgtgcayaaaccatcaggtgcaaagcctgggtttgtaacatatgacaatcaaaaaactttgtatgctacacctgattatgaacwtattcaaaaaatgaaacaatyataa

SEQ ID NO: 1465 - DNA, 401 bp, Staphylococcus aureus
ttgaaaacgattttaaaaacaataacatatctwgyayttactatcattggcgcttatgctgctttattcattttaaaaacaatagactcycatggtataacagatcaatttaacccattagtaaagrargatgwttcttatgttaaaacgacwgaggtgtctactagaatggatgatcaactccgaagttatastcaaagtgyttttaataaagaagggaaagagacgcaattaatgtatactgctacatttgatgttaaaccgcatagatacttgaaaattacacataaaggtcatcaygtagaaacttttgaagaagtwgaaaaggrrsaagtaccaaaraaagcattagacaaaytgagtcgatwatagcgtgcttatattacatggttcaattataa

SEQ ID NO: 1466 - DNA, 279 bp, Staphylococcus aureus
atgtttgaactaaaagtgggtataataaaaagagaagctaatgwcattataagcaattcaactggagggaaagaaatgcaagtaaacaaagttatttatattttattagcattgttcttaggtagttttggtattcataaattttatgccggcaagaatatgcaaggtattctacacttaatattctgttggacaggtatcccacacattttagcaattattagtgcagtgattactgttttcaaacctgctgatgaacaaggtaatgtcactttataa

SEQ ID NO: 1467 - DNA, 573 bp, Staphylococcus aureus
atgaaattaaaatcattagcagtgttatcaatgtcagcggtggtgcttactgcatgtggcaatgatactccaaaagatgaaacaaaatcaacagagtcaaatactaatcaagacactaatacaacaaaagatgttattgcwttaaaagatgttaaaacaagcccagaagatgctgtgaaaaaagctgaagaaachtacaaaggccaaaagttgaaaggaatttcatttgaaaattctaatggtgaatgggcttataaagtgacrcaacaaaaatctggtgaagagtcagaagtacttgttgmtgataaaaataaaaaagtgattaacaaaaagactgaaaaagaagatacartgaatgaaaatgataactttaaatatagcgatgctatagattacaaaaaagccattaaagaaggacaaaargaatttgatggtgatattaaagaatggtcacttgaaaaagatgatggyaaacttgtttacaatatcgatttgaaaaaaggtaataaaaaacaagaagttactgttgatgctaagaacggtaaagtattaaagagtgagcaagatcamtaa

SEQ ID NO: 1468 - DNA, 189 bp, Staphylococcus aureus
atgggtaaacaatgtttcgtaacaggtcgtaaagcttcgactggtaacagacgttcacacgctttaaactctactaaacgtagatggaacgctaaccttcaaaaagttagaatcctagttgacggtaaacctaaaaaagtttgggtttctgcacgtgctttaaaatctggtaaagtaactagagtttaa

SEQ ID NO: 1469 - DNA, 261 bp, Staphylococcus aureus
ttggaatataataaaaagatgattaatcgtattcatcgcatacaaggacagcttaatggagtcattaaaatgatggaggaagaaaaaaattgtaaagacgtcattagtcaattaagtgcatctaaaagttctattcaacgtttaatgggtattattattagcgagaacttagtagaatgcgtcaaaatgtctgaagaaaatagtgaagattctcaggcactaattaatgaagctgttgaattattaataaaaagtaaatga

SEQ ID NO: 1470 - DNA, 753 bp, Staphylococcus aureus
atgaaatataataaccatgacaaaattagagattttataatcattgaagcatatatgtttcgttttaagaaaaaagtcaagcctgaagtcgatatgactataaaagaatttatattactgacttatttatttcatcagcaagaaaacacacttccatttaagaagattgtttcagatttatgttataaacaatcggatttagtacagcatataaaagtacttgtgaaacattcatatattagtaaagttcgaagtaaaattgatgagcgtaatacttacatttcaatatctgaagaacaacgagagaaaattgcagaacgtgttacattgtttgatcaaatcattaaacaatttaaycttgcagatcaaagtgaatcacagatgataccaaaagatagtaaagaatttctaaacttgatgatgtatacaatgtatttcaagaatattatcaaaaarcatctaacattaagttttgtagaattcacaattctagctattatcacttctcaaaataaaaacatcgttcttcttaaagatttaattgaaacaatccaccataaataccctcaaactgttagagctctcaataatttaaaaaagcaaggctatctaataaaagaacgctcaactgaagatgaaagaaaaattttaattcatatgratgacgcgcagcaagaccatgctgaacaattattagctcaagtgaatcaattattrgcagataaaratcatttacatcttgtttttgaataa

SEQ ID NO: 1471 - DNA, 255 bp, Staphylococcus aureus
atgtttggatttattggaatgttaattrtcggtggcttaattggatgggctgctggtgctattatgggtaaagatatcccaggtggtattttaggyaatattatcgcaggtattattggatcatgggtaggtggcaaactattcggacaatggggtcctgaattaggaagtatttacatcttgccagcwttaatyggttcaattatcttwattgcaatcgtaacgttaattttaagagckrtkcgtaaawaataa

SEQ ID NO: 1472 - DNA, 582 bp, Staphylococcus aureus
atgacgatttatttagttagacatggcgaatcaaaatcgaattatgataataaacattttmgatcttatttttgtggacaattagatgtgccgttaacggatactggcacaaaaagtgcrgacgatttatgtgattattttaaagagaaacagattaaacatgtatatgtttcagacttattaagaacacagcaaacgtttgaacatatttttccatatgacattgcatcaacgactacscctctattaagagaacgttcacttggcgtatttgagggtgaatataaagatgaaatcagtgcgaatccgaaatatgaaaaatatttcaatgatccaaactttaaagactttcgwcatagtttttcacaaaaagcgcctgaaggagaaagttatgaagatgtatatcaacgcgtmgaacattttatgaatcatgttgtcaatgaagatacacaaaaagatgatatygtcattgttgcacatcaagttgtcattcgttgtttgatggtttattttaacaaagtttcaagggmagaagctgtggatttaaargtwgaaaattgcaaaccatatatcattgaatag

SEQ ID NO: 1473 - DNA, 756 bp, Staphylococcus aureus
gtgtcagawyatgtatataatcttgtgaaaaagcatcattctgttagaaaatttaagaataaacctttaagtgaagacgttgttaagaaattggtagaagctggacaaagcgcttcgacgtcaagtttcctrcaagcatactcaattattggtatcgacgatgagmagattaaagaaaatttacgagaagtttctggacaaccttatgttgtagaaaatggctatttattcgtctttgttattgattattatcgtcatcatttagttgatcaacatgctgaaactgatatggaaaatgcatatggttcaacggaaggtttgctagtaggtgcaatcgatgcagcattagttgcygaaaatattgcggtaactgctgaagatatggggtatggcattgtctttttaggatcattragaaatgatgttgmacgmgttcgagaaattttagacttacckgactatgtcttyccrktatttggtatggcagtaggggaaccygcagawgaygaaaatggygcagccaarccacgcttaccatttgaccatgtcttccatcataataagtatcatgctgataaggaaacacagtatgcacaaatggcagattacgaycagacaatcagcragtactatratcaacgtacaaacgggaatcgcaaagaaacatggtcgcagcaaattgagatgttcctagrwaacaaagcaagattagatatgttagaacaattgcaaaaatcaggcttaatacagcgatag

SEQ ID NO: 1474 - DNA, 2607 bp, Staphylococcus aureus
gtgttaaaaaartggytaaattcaamcgtcaaacaattcttkgtyataactttcatkagygtaatattaacgcttattttattttctactcatatctatgawtatattgtgaatggtactgtttttagyggrkctggagatggattccgtcaaatgatgccatttcaaatgtatttgtatgaacatytamgtagtttttctagtttatatgatgcatcgtttggattaggtggcgattatatgaaaggactatcatattattattcgctgtcacctttaatgtggctmaattttctattcattaaaataggagaaackgttggtatatttaatccgacracaatacatttttggccgacaaaccaacttattatggcyatgrtamgagctatcataacatttgtcgtgaccttctacttatttaaaatattacactttaaacgctcarcaaatatgatcgctacgattttatacggcatgtcaactgtcgttatatactttaattttacttggtcattttatggaartttattatatttattrccattatcgattcttggtttggaaagatattttcaacaacgcaaaatcggtattttcattgttgcgatagccttaacactatttagcaatttttatttcagttattatcaagctattattataggttgctactatttatatcgactcattttcacttacaaatatgacattgtctctagaacacaaaaattwatttgcgtcatatctgctacagttttgagtgtgttatcaagtgtatttggtttattcactggcatttctgcgtttttggaaaatgacagaaagcaaaatcccaatgttgatataccgtttttgacaccacttgattaycattattttttctttagcgatggattttwyattacgatttcaattctyactatcgttgcattattgtcattcaaactgtatcgtttttacttttatagacttttcgcaatagtaacatggdtattatttatwggttcattatcacagtatttygacagtgcttttaatggtttttcatttccagaaaggcgttgggtgtatatcttagcactatcatcaagygctctttgcggattgtttattcaacatttatcaacattaaatatgaaatattatttaatcagaacaataccmgtawgyatcatcgcawtactttatgtattactatcaccgacacacccactygcacttatagtaggtattatcctgcwaatrgtgcttgcygttattttaaaatttagtttatggcgttataaaaaattaaccgttgcaatattagtattaatcgttatgattcaacaaatcgtcattttagataacaayaaaaayatggcaatcaaaccttatcaacaatcattatcawcgttgaaacaacatgattaccatagtaactatgtaaaccagcttataaaaaagataaatmaaaatgcaacwggyycatttaatcgcattgattatatgtcagactatgcattaaattcaccatttatatatcattataatggcatttcattatattctagtatttttaatggagacatwttaaaatattatgacaagacactccaaattaatatgccaatygataaaaacagcacttatagaytacttggcaatcgtcaaaatttactatcactttggaatgttaatgatcgaattagagtgaatcatgatgacaacttaccatatrgatttaaaattaastctgaacacaaagacaataaagttcgttggattcattctaaaaataccatccattatccaagtgcacatattacaaataaggtcttttccaataaagaattaaaatctccattagataaagaacaagcaatgttgcaagggattgtttctaacaakaytaaagatgttaatacacattttaaagccaataaaaatttactatcagattcaacaattaaattaaatagtkcagcctggcaatctcctacaaaacatttattacaagttaaacaaaataatggtggtctaactgtacagttgccaaaatcagtttctaatcaatttaaagatttgtattttgaaatggatttagaattactttcgccggataaagctcatgatgttaaagtgaatgaatatacacaagaaagaaataaactcacttataaatatcgacgckttgtaacacccgtaacratacgcattaaagctycagatagrattagattatcattgcctaaaggtaagtatcgwgtaaatttaaaagggatatacggcgaagattataccacgcttaaagacgcttcaaattcattagargctgtcaaagttagwaagacaaagcawggttatactattactaaaaataaaaattcatctgggtatattgttttgccaacagcatataatcaaggtatgaaagcgacatcaggtgatcaaagtcttaaagttgmacaagtaaatggtgttatgaccggcattaaagcacctaaaaatataacaaagattcaattgagctatrccccaccatactattatttacttataacaattactatatttggcattatatgtagtattattttcacgagatgggcaagacaaaaataa

SEQ ID NO: 1475 - DNA, 579 bp, Staphylococcus aureus
gtggagttactaggacaaaaagtaaaggaagacggcgttgtcattgatgagargattttaaaagtcgatggatttttaaatcatcaaattgatgcaaagttaatgratgaagttggtcgcactttttacgagcaatttaaagataaagggattactaaaatcttaaccattgaagcttccggtatcgcaccwgcaatcatggctgcactgcattttgatgtgccatgtttatttgcgaaaaaagcaaaacctagcactttgacggatggttattatgaaacatctattcattcatttactaaaaataaaacaagtacggtcattgtttcaaaagartttttatcagaagaagatactgtactyatcatcgatgactttttagcaaatggtgatgcttcattaggattatacgatatcgcacagcaagcgaatgctaagacagctggtattggtatwgttgttgaaaagagtttccaaaatgggcatcaacgtttagaagaagcaggyttaacagtttcttctctctgcaaggttgcttcactagaaggaaayaaagtgacattggtgggagaagaataa

SEQ ID NO: 1476 - DNA, 216 bp, Staphylococcus aureus
atgtctattaatattgatccagaaaaatttgcagaattagtggttatgtctaacccatcaaaattcgaagatgcagaggatatagctaaagaaagtttaaagctttacattaatgcatatcgtttagcagagagatattcaacaattgcaacaaattgttatgatactgcagaagttataaaagaattaaagaaaacagatttacaattaaaataa

SEQ ID NO: 1477 - DNA, 207 bp, Staphylococcus aureus
gtgatgagagggacaatcataatacckacaactaagccgggacttatagcattaaactctccaagaccwgrtatgaaagatcttaatactggtgtaacaaaggttaatgcaaagaaaccaaacacaattgttggtattcctgctaaaatttctaatatcggtttwattatgcgtcgtgcacggtcacttgcatattcacttaaataa

SEQ ID NO: 1478 - DNA, 1269 bp, Staphylococcus aureus
atgaaaaatttaatcctaagtgttcaacatcttttagctatgtacgcaggtgcyatcttagttccaatcattgttggtacaagtttgaagtttacrcctgaacaaatcgcttacttagttacagtagatatatttatgtgtggrgttgccacatttttacaagccaataaagtaacaggaacaggattaccaatcgttcttggatgtacattcacggctgttgcgcccatgattttaattggtcaaacgaaaggaatagatgtactttayggttcgctatttttatcagggatattagttattatcatcgcgcctttcttttcacatcttgtraaattcttcccaccagtagtaacgggtagtgttgttactatcattggtatcaatttaatgccagtagcaatgaattacttagctggaggtcaaggtgcaaaggactatggagatgttaagaacattttgttaggtttaatgacattaatcattattcttsttttacaaagattcacaactggatttattaagagtattgccatattaattggactcgttttaggaacgataggtgctggcttacttgggatggtcgatattaatcaagtcaatcatgccggttggttaggcatcccagtgccgtttarattctcwggatttagctttgatgtgacatcgacgttagtgttctttattktagctatcgttagtttaattgagtcgacaggtgtctatcatgcgttaagtgaaattaccggtaagaagttagaaagaaaagattttcgtaaaggttatactgcggaaggtctagcgatagtgttaggttctatattcaattcatttccgtatacagcctattcgcaaaatgtaggacttgtttctttatccggcgctaagaaaaayaatgttatatacggcatggtcgtgttattacttatatgtggttgtatacctaagcttggygcattagcaaatatcataccgctacctgtgttaggyggtgcgatgatagctatgtttggcatggtaatggcatatggtgttagtatattaggwcatatcgattttaaaaatcaaaacaatttattaattatygctgtatcagtaggattaggtactggtataagcgctgtaccacaagcatttaaaggtttaggtgaacaatttgcatggttgacycaaaacggaattgttttaggcgcaatctctgcaattattcttaatttcttttttaatggaataaagtataaacaaacggaagaaaatgtgaaataa

SEQ ID NO: 1479 - DNA, 1467 bp, Staphylococcus aureus
atgtgggaaagtaaatttgcaaaagaatcattaacgtttgatgatgtgttattaattccagcacaatctgatattttaccgaaagacgttgatttaagcgtacaattatcagacaaagttaaattaaatattccagttatttctgctggtatggatacwgtaactgaatctaaaatggcgattgctatggctcgtcaaggtggtttaggtgttattcataaaaatatgggcgttgaagaacaagcggacgaagttcaaaaagtaaaacgctcagaaaatggtgtcatttcaaacccatttttcttaacrccagaagaaagygtttatgaagcrgaagcattaatgggtaaataccgtatttcaggtgtaccaattgttgataataaagaagatcgcaacttagtaggtattttaacaaaccgygacttacgttttattgaagacttctcrattaaaattgtagatgtaatgacgcaagaaaatttaattacagctccagtgaatacaacacttgaagaagcagaaaaaattctccaaaaacataagattgaaaagttaccattagttaaagacggrcgtctagaaggtcttattactattaaagatattgaaaaagtwatcgaattccctaatgcagcaaaagatgaacatggtcgtctacttgtagccgcagcaatyggtatttcaaaagayactgatattcgtgctcaaaaattagtcgaagcaggtgtggatgtcttagttatcgatacagcacatggtcactctaaaggygttatcgatcaagtgaaacatattaagaagacttacccagaaatcacattagtagcwggtaacgtagcaactgcagaagcaacaaargatttatttgaagcgggtgcagatattgttaaagttggtattggcccaggttcaatttgtacracrcgtgttgtagcaggtgttggtgtaccacaaattacagcaatttatgattgtgcaactgaagcacgcaaacatggtaaagctatcattgctgatggtggtattaaattctcaggagatatcattaaagcattagctgctggtggacatgcggttatgttaggtagcttattagcaggtactgaagaaagyccaggygcwacagaaattttccaaggtagacaatataaagtataccgyggtatgggctctttaggtgcgatggaaaaaggttcaaacgaccgttacttccaagargacaaagcgcctaagaaatttgtwcctgaaggtatcgaaggacgtacrgcwtataaaggtgcgttacaagatacaatttaccaattaatgggcggtgtgcgtgctggtatgggttatactggttcacacgatttaagagaattacgcgaagaagcacaattyacacgtatgggycctgctggtttagcagaaagycayccacataatattcaaattacgaaagaatcaccgaactactcattctaa

SEQ ID NO: 1480 - DNA, 1542 bp, Staphylococcus aureus
atggaaatggcaaaagaacaagagttaatccttgtcttagactttggtagccaatacaaccaattaattacacgccgaattcgtgaaatgggcgtttatagtgaattacacgatcatgaaatttcaattgaagaaattaagaaaatgaatccaaaaggtatyatcttatcaggtggtccaaattcagtttatgaagaaggttcatttacaattgatccggaaatatataatttaggaattccagtacttggtatttgttacggcatgcaattaactactaaattaytaggtggtaaagttgarcgtgccaatgaacgtgaatacggtaaagcaatcattaatgcgaagtcagatgagttattcgctggcttaccagcagaacaaactgtttggatgagtcattctgataaagttattgaaattccagaaggctttgaagttatcgctgatagyccaagyacagactatgcagcaatygaagataagaaacgtcgcatttatggtgtkcaattccatccagaagtacgtcatacagaatatggtaatgatttrttaaayaayttygtmcgtcgtgtttgtgaktgtaraggwcaatggacratggaaaactttatcgaaatygaaattgaaaagattcgtcaacgcgtaggmgaccgtcgtgtattatgtgcgatgagtggyggcgtagattcatctgttgtwgctgtaytattgcataaagcaatwggkgatcaactaacatgtatctttgtagaccatggcttacttcgtaaaggtgaaggcgayatggttatggarcaattcggtgaaggkttcaacatgaatattatycgtgttaatgcgaaagatcgytttatgaataaattaaaaggtgtttcagatcctgaacaaaaacgtaaaatcattggtaatgaatttgtataygtrtttgatgatgaagcatcaaaactkaaaggtgtagacttccttgcgcaaggaacactwtatacagacgtyatcgaatcaggtacyaaracagcacaaacaatcaaatcacaycacaatgttggtggattaccagaagacatggaattcgaattaatcgaaccaatcaatacattgtttaaagatgaagtacgtaaattaggtattgarttaggtattccagaacatttagtrtggmgacaaccattcccaggacctggtcttggtattcgtgtacttggagaaattactgaagataaactagaaatcgtwagagaatcagacgcgattttacgccaagtgattagagaagaaggtcttgaaagagaaatttggcaatacttcacagtgttaccaaacattcaatcagtaggtgttatgggagactaccgtacgtatgatcacacagtaggtatycgtgcagtaacatctatcgacggyatgacaagtgacttcgcacgcatcgattgggaagtcttacaaaagatttcwagtcgtatcgtaaacgaagtagaycacgtcaaycgcgtagtctatgacattacatcaaaaccaccaagcacaattgagtgggaatar

SEQ ID NO: 1481 - DNA, 477 bp, Staphylococcus aureus
atggagacaatttatgattttgtagtagaaacaaataaaggtgttacttacaaattagatgcatataarggtgacgttatgctaattgtyaatacagctagcgaatgtggctttacttcacaattygaaggtttgcaatcattatacgagaaatacaaagatcaagggtttgtaattctaggtttcccttgtaatcaatttggtggycaagaacctggwtcaggcgargaagcagctcaaaactgtaaattaaactatggtgttaccttccctatgcatcaaaaaatagacgtaaaaggggaacatcaattacctttatttagatatttgactgcggcacaacayggattctttaatgagaaaatcaaatggaatttcactaagtttttagtggatcgygaaggtaacgttgttaaacgatttgcacctcaaaaaaaacctgttcaaatcgaaagagaaatagaaaarttattatra

SEQ ID NO: 1482 - DNA, 681 bp, Staphylococcus aureus
atgaaatttaaagcgatagcaaaagcaagtttagcattgggaatgttagcaacaggtgtaattacatcgaatgtacaatcagtacaagcgaaagcagaagttaaacaacaaagtgaatcagagttaaaacactattataataaaccaattttagagcgtaaaaatgtgactggatttaaatatactgatgagggtaaacactatttagaagtcacagtagggcaacagcattctcgaatcactttacttggatctgataaagataaatttaaagacggagaaaactcaaatatagatgtgtttatccttagagaaggtgacagtagacaagcaacaaattactcaattggtggcgttacaaaatcaaatagtgtgcagtatattgattatatcaatacgccaattttagaaatcaagaaagataatgaagatgtacttaaagatttttactacatttcaaaagaagacatctcattaaaagaacttgattatagattaagagaacgtgcgattaaacaacacggcttgtattcaaatggtcttaaacaaggtcaaattacaattacaatgaatgatggcacaacacatacaatcgatttaagtcaaaaacttgaaaaagaacgtatgggtgagtcaatcgacggcactaagattaataaaattctagtagaaatgaaataa

SEQ ID NO: 1483 - DNA, 1026 bp, Staphylococcus aureus
gtgatytcattygaaaatgattatttagaaggtgctcatgaaaaagtattaaaacgattagtagatacaaatcttgtacaagcttcgggatatggctttgatcaattcacagctcaggcaattgaaaagattaaagatacaattgaytgtccaaatgctacwatycgttttttagtaggtggaacrcaaaccaatcaggttgttattaattcaatgttagaaagttacgaaggggtyatttcagcagacactggtcatgttgctgtgcatgagggyggtgcaattgaatatagtggacataaagtaattactataccctctaaggaaggaaaagttagtgcttcagatgttgaaacttacatggagacatttaaaagtgattttaaaaaggaccatatggtattcccaggaatggtatatatttctcatcctacwgaatatggcacwttatactctaaatcagaattggaagagttatgcaaagtatgtaagcaatatcagcttccattatttatggatggtgcacgattagggtatggattgatgagtgaycaatcagatatgactattaaagacatcgctaaatattgtgatgtattttatataggtggtacgaagataggtgcattatgcggrgaagcmattgtttttacgaaraataatgaaccgaaacaatttaccactcgaatcaarcatcacggtgcmcttttagcaaaaggacggttaacaggcatacaatttttagaattatttacggayaatttatattttaatataagcagacatgctatcgaaatggcaaataagatgaaagacgggtttawaaataaaggctatcgtctttactttgattctccaaccaatcaacaattttttattttaagtaacgagaaaatagcagagttagaacaaaaagttaaatttgctgtttgggaaaaatacgatgatcaacatcgtgttgttagattcgcaaccagytgggcgacaaccgaagaaaatttaaayaaactattagaattaatctaa

SEQ ID NO: 1484 - DNA, 144 bp, Staphylococcus aureus
atgtcaatgrtgatagacagtaatatggcaaatgcgaaacttgcaaaaaattgtgatgtaaatactgctgtttgcgttaaaaatgctggcccaattgcagaagttgccatcaaaaatacagaacctaataataaccttttatga

SEQ ID NO: 1485 - DNA, 855 bp, Staphylococcus aureus
atgtctttttatgttgtacttatcattatcattgtagcattaattggtatattagttttaaatcaaaggtatagtaatagtaaaatagataccgaagtttatgcaagaaagcaacttattaaaaagaayaaagcattaagtgcagaaaatgctgaattaagaagtcaaatgctgagttctaataatgatgttggmcaccatgcatacaaaaatgctaaaagagaattacgcaagattttagayagctatctcgaaaatggtaaattaaaatattacgatattatcgttacaagcaatttagctactaaacatccgtttttcgagtatgcacgttcatttgattttatcattgtttcagatatcggtttaataaacgttgatgtaaaaagytggggtgaaaaaacattttatcactttgatgtacctgatgagcatgatacagaaatragcaatagtaatattgaaaaagttgtcggtcattacattagycagcaatatcatgatcagtttaattcatcaagaaagtctatctatacttttacagaaacwgttcaaccaaatcgtgttatttatgatttttatgattatgatccrtatcaattagcagcaaataatgckaaagcattaaaggatcatattgaacaaaactttaactttaaagtccaaagtaccggtgttatttactttagtgatggtacagttaatatcattcaaggytctgaagaaagagataaatatgttgatacmgtttcaacaaaatcttcrttacgacgtattattagcgaagccatagagctatctaaacaccctttaaataaagaacaggttratcaaatcacagctatattcaagtaa

SEQ ID NO: 1486 - DNA, 390 bp, Staphylococcus aureus
gtgcgtgtattgccccaatcttttttaagtaatgtgaatataaacaccgacgaaagtgcaatratgattaraggtttcaatatttgtgacggaaccatsgttgcaatatatgcgccacatgcagatgccaaaaatacaaaaccaaataatttggcaacaacawataagtccactttaccggaccttataaactttatcryactagttaaagaaccaaaygaacttgccaatttatttgtacctaaagccacagatggtggtagaccgattgctaataatgctggcgtagaaattaaaccrccaccccctacaaccgaatctataaacgccgcgataaaaccaaataaaattatgattataatcatcgttaarttcaaatccatagtttaa

SEQ ID NO: 1487 - DNA, 1071 bp, Staphylococcus aureus
atgaawatgaraacaattrctaaaaccagtttagcactagggcttttaacaacaggcgcaattacagtaacgacgcaatcggtcaaagcagaaaaaatacaatcaactaaagttgacaaagtaccaacgcttaaagcagagcgattagcaatgataaacataacagcaggtgcaaattcagcgacaacacaagcagctaacacaagacaagaacgcacgcctaaactcgaaaaggcaccaaatactaatgaggaaaaaacctcagcttccaaaatagaaaaaatatcacaacctaaacaagaagagcagaaawcgcttaatatatcagcaacgccagcgcctaaacaagaacaatcacaaacgacaaccgaatcyacaacgcmgmaaactaaartgacaacacctccatcaacaaacacgccacaaccaatgcaatctactaaatcagacacaccacaatctccaaccataaaacaagcacaaacagatatgactcctaaatatgaagatttaagagcgtattayacraaaccgagttttgaatttgaaaagcagtttggatttwtgctcaaaccatggacgacggttaggtttatgaatgttattccaaataggttcatctataaaatagctttagttggaaaagatgagaaaaaatataaagatggaccttacgataatatcgatgtatttatcgttttagaagacaataaatatcaattraaaaaatattctgtcggtggcatcacgaagactaatagtaaaaaagttratcacaaagyagaattaagcrttactaaaaaagataatcaaggtatgatttcacgcgatgtttcagaatacatgattactaaggaagagatttccttgaaagagcttgattttaaattgagaaaacaacttattgaaaaacataatctttacggtaacatgggttcaggaacaatcgttattaaaatgaaaaacggtgggaartatacgtttgaattacacaaaaaactgcaagagcatcgtatggcagaygtcaywgawggyacwaayattgataamattgaagtgaatataaaataa

SEQ ID NO: 1488 - DNA, 1383 bp, Staphylococcus aureus
atgaaagtttccaaattcggtggtagctccgtctccaatgctactcaaattaaaaaggttttaaatattgttaattctgatccagagcgaaagattgttatcgtttctgctccaggtaaaagacatgataatgatattaaaacaactgatttgttaatcagattatatgaaaaggtcattaatcatcttgattatcatgataaaaaaagagaaattattcagcgttatgatgatattgtaaaagaattgcaaatggatgaaagtattttacggacgatagatgtgactttggaacattatatwaatcaattaaaaaatgaaccraagagactattagatgcattactttcttgtggtgaagattttaatgcgcaattgatagctttatataataatagtcaaggtataccaacaaaatatatatcaccgaaggaagcgggtatttttgttactgacgtcccacaagaagcacaaatattagatagtgcttactctgaaattaaaaaattaagagattatgatgaraaactaattatcccaggatttttyggcgtatctcatgaaggatatatagttacatttccacgtggcggatcagatataactggcgccatcatatcaagtggtgttagagcyacaatttatgaaaatttcaccgatgtgtctggtatttataaagctaatccaaatatcatcaaagatcctgaattaatcgaagaaatcacttatcgagaaatgcgtgaattatcttatgctggttttagtgttttccatgatgaagccttacaaccactttataaagatcgcatccctgtrgtkattaaaaatacgaaccgccctcaagataarggtacatttatagtgcatgatagagaaataaatgcgaaaaatgtgattagcggtataagttgtgataaagattttacygtyattaatatcaaaaagtatttaatgaatagacaagtcggstttactagaaagatattaggtgtcttagaggataataatatttcatttgatcatatgccttcaggtattgatactatcagtatcgttatgcgttcaaaacaaattcaaaataaagaaacaaaagtattaaatgaaattcgtcaaaaatgtgatgttgatgagctaagtattgagcatgatttagcaatwttaatgattgtcggcgaaggtatgaataaagtcatyggtactgcaaataaaattacacatgccttagctgaatcaaaaattaacttaaaaatgattaaccaaggtgcttcggaaatytcgatgatgtttggaattcatgtagatgatgctgaaaaagctgtattatctacatatgagttttgctatcacggggttgcattaaaaaacttgtgtgataaaaactaa

SEQ ID NO: 1489 - DNA, 732 bp, Staphylococcus aureus
atgttagttattggtatattaggaggatttatttctggattagtcggtatagggggagccattgttatttaccctgctctcttattattaccaccattatttggtttacctacttatagtgcttatattgcctcaggattaacttcaagtcaggtgttttttagtacattgagtggatctttaaaagcatataaaaataaaaatttttctagaacgcttatacttaatatgggaagtggaatggtaataggtagtattctaggtgcgttattagcaactgtatttaatagtcagtttgttaatgtaatttatataattattgctttgttagctcttattctaatgtttattaaagtcacaccatctactagtcatattaagtttaatcgcgtacttttaattacaataggtggtatcatcggtttagtatctggtattgtaggagctggtggagcattcattattattccagtactacttgttatatttaaattaccaatgaatatggttgttacaaatagtattgtaattgcattcatttcttctattggagcatttattattaaattattacagggttatattcctatcaatagtgcaataccgttaattttaggtagtatactatttacgcctctaggcatgaaaatagggcaaaaaatacctgattctattcaaaaagggattgtaagtattttaatcgtcattgcaatcattaagttgatattttaa

SEQ ID NO: 1490 - DNA, 135 bp, Staphylococcus aureus
ttgtttgtaaaagtggcatttctatgtcttaaaagtgacgaawcytcaaatgtgccaagtgttgaatcacatcaaaatcakttttatttaacgaacattatggatttcttaatttacttaacgatgattcaaata

SEQ ID NO: 1491 - DNA, 315 bp, Staphylococcus aureus
atgattggacaaacaaatttatttgatgatgtactaaagcaagatgaragatttgttattgtagttcaagcattagaagaaaagaacggacaattattaaagagaactttaagggaatatcccggtttaaaccataaacaaatgaatgatttatttaygcacttaaaggaattattttccgaagaatcatttgctgaaaaccaatcagcgttcagtattacagtttatacaaatttagattatactgctgaccaaatatatgctcatgtaaaacgyttcagaggkaagcatgactggacacaaacagctaaataa

SEQ ID NO: 1492 - DNA, 927 bp, Staphylococcus aureus
atgaaaataacaacgattgctaaaacaagtttagcactaggccttttaacaacaggtgtaatcacaacgacaacgcaagcagcaaacgcgacaacacyatcttccactaaagtggaagcaccacaatcaacaccgccctcaactaaaatagaagcaccgcaatcaaaaccaaacgcgacaacaccgccctcaactaaagtagaagcaccgcaacaaacagcaaatgcgacaacaccgccttcaactaaagtgacaacacctccatcaacaaacacgccacaaccaatgcaatctactaaatcagacacaccacaatcgccaaccacaaaacaagtaccaacagaaataaatcctaaatttaaagatttaagagcgtattatacgaaaccaagtttagaatttaaaaatgagattggtattattttaaaaaaatggacgacaataagatttatgaatgttgtcccagattatttcatatataaaattgctttagttggtaaagatgataaaaaatatggtgaaggagtacataggaatgtcgatgtatttgtcgttttagaagaaaataattacaatctggaaaaatattctgtcggtggtatcacaaagagtaatagtaaaaaagttgatcacaaagcaggagtaagaattactaaggaagataataaaggtacaatctctcatgatgtttcagaattcaagattactaaagaacagatttccttgaaagaacttgattttaaattgagaaaacaacttattgaaaaaaataatctgtacggtaacgttggttcaggtaaaattgttattaaaatgaaaaacggtggaaagtacacgtttgaattgcacaaaaaattacaagaaaatcgcatggcagatgtcatwratagtgmacaaattrawaacatygaagtgaatwtraaataa

SEQ ID NO: 1493 - DNA, 1455 bp, Staphylococcus aureus
atggaagataataaaatgaaccgtagtcttaactcaagacacatttccatgattgctataggtggtgcaattgggactggtctatttgtagctactggtaatatcatttctcaagctggtcctggaggcgctatactcgcttatcttgttattggtgtcatgctatatttcttaatgkcatcaattggagagttggcaacattttatccagtatcaggttcattcagctcttattcaacacgctttattgactcatctctwggctttaccatgggatggttgtattgggcattgtggtcattagttacaagtgttgatgtcatagtagcgtcaaatgtgctttatttctgggacacatttaaatttttccaccccattacttggagcttaatctttattacaattttactattattaaacattttttctgtaaaatcatttggagaaactgagttttggttatcattrattaaagtgttaacaatyatcgtattcgttatttttggctttttaatgattttcggtatcttaggtggtcatrcatatggatttgaaaactatacaaaaggccaagcaccgtttgttggtggtatctctggtttcytaggcgtattattagtcgcyggattytcrgttggtggtacwgaagtagtagcagtaactgctggygaatcagatgaycctaaaaagtctatgcctaargcaattaaacaagtrttttggcgtattcttttattctatgtmttatcaattgcagtmattggtgcaattattccgtacacagatccatcattattaagagcaagtagttcaataagtcaaagcccatttacaattgtattcgatagagtaggcatagcctttgcagcatcagtaatcaaygcggttattttaacttcaytattatccgctgcaaattcaggtgtttatacaacaggcagaatgttgtattccttaagttcagacaaaaaagcaccymaatttttaagtaaattaaacaagacaacwaarttaccwttaagagcattattaactacwtatgcagtcgttgttattgttattatttatgcaaactttaattcaaatgccgtttttaatttacttgaaattattggttcaatgattatagttgtttggggatcaagcatttggtcacaaatacgattgcgacaagctattaaaaaacaaggtcaagaycctaataaggtcctaccatataaagcacctttttatccattaggaccaatcattgtcatcrctacrctattattcttgctatttggtggytcagttgaatatattttaaaagatcaatggttaaatgcttttaaaaactttttacctttaatcattctagcgttgatttactttattcataaaatcattcacaaaacaaaatttgtaaagctagaaacaattaatttaaaaccacacgattatgacaatcaaaamtaa

SEQ ID NO: 1494 - DNA, 879 bp, Staphylococcus aureus
atgaaaataacaacaattgctaaaacaagtttagcactaggccttttaacaacgggtgtaatcacaacgacaacgcaagaagcaaacgcgacaacaccatcttccactaaagtggaagcaccacaatcaacaccgccctcaactaaagtagaagcaccgcaatcaaaaccaaacgcgacaacaccgccttcaactaaagtggaaacaccgcaacaaacaccgaacgcgacaacaccatcttcaactaaagtggaaacaccacaatcgccaaccacaaaacaagtaccaacagaaataaatcctaaatttaaagatttaagagcgtattatacgaaaccaagtttagaatttaaaaatgagattggtattattttaaaaaaatggacgacaataagatttatgaatattgttccagattatttcatatataaaatagctttagttggaaaagacgataaaaaatatgatgaaggagtacataggaatgtcgatgtatttgtcgttttagaagaaaaaaataaatatggagtggaaagatactcggtcggtggtatcacaaagagtaatagtaaaaaagttgatcacaaagcaggagtaagaattactaaagaagataataaaggtacaatctctcatgatgtttcagaattcaagattactaaagagcagatttccttgaaagaacttgattttaaattgagaaaacaacttattgaaaatcataatctgtacggtaacgttggttcaggtaaaattgttattaacatgaaaaacggtggaaagtacacgtttgaattacacaaaaaattacaagaaaatcgcatggcagacgtcatagatggcactaatattgataacattgaagtgaatataaaataa

SEQ ID NO: 1495 - DNA, 963 bp, Staphylococcus aureus
atggagcatacaactatgaaaataacaacaattgctaaaacaagtttagcactaggccttttaacaacaggtgtaatcacaacgacaacgcaagcagcaaatgcgacaacaccgccttcaactaaagtggaaacaccgcaacaagtagcaaatgcaacaacaccatcttcaactaaagtggaagcaccgcaacaagcagcaaacgcgacaacaccatcttcaactaaagtagaagcaccgcaatcaaaaccaaacgcgacaacaccatcttcaactaaagtggaagcaccgcaacaagcagcaaacgcgacaacaccaccttcgtctaatgtagacacatcaccaccacaatcgccaaccacaaaacaagtaccaacagaaataaatcctaaatttaaagatttaagagcgtattatacgaaaccaagtttagaatttaaaaatgagattggtattattttaaaaaaatggacgacaataagatttatgaatgttgtcccagattatttcatatataaaattgctttagttggtaaagatgataaaaaatatggtgaaggagtacataggaatgtcgatgtatttgtcgttttagaagaaaataattacaatctcgaaaaatattctgtcggtggtatcacaaagagtaatagtaaaaaagttgatcacaaagcaggagtaagaattactaaggaagataataaaggtacaatctctcatgatgtttcagaattcaagattactaaagaacagatttccttgaaagaacttgattttaaattgagaaaacaacttattgaaaaaaataatctgtacggtaacgttggttcaggtaaaattgttattaaaatgaaaaacggtggaaagtacacgtttgaattgcacaaaaaattacaagaaaatcgcatggcagatgtcatagatggcactaatattgataacattgaagtgaatataaaataa

SEQ ID NO: 1496 - DNA, 102 bp, Staphylococcus aureus
atgaatggtttaaattctgttattggcgcaatgatartaattgataaaaaygcaacaacagttactatgaattttttaatttacatcacctactataaatat

SEQ ID NO: 1497 - DNA, 624 bp, Staphylococcus aureus
atgagagaattaacaaaacgacaaagcgaaatatataactatattaaacaagttgttcaaaygaaaggttatccgcctagtgttcgcgaaattggtgaagcagttggcttagcatccagttcaactgttcatggtcayctttcacgtcttgaagaaaaaggmtatataagaagagatccaacgaaaccacgtgctatagaaattgtaagtgatcaaacaaatgataatattaatatggaagaaacgattcatgtgccagttattggtaaagtcacagcaggtgttcctattaccgcwgtagaaaatattgaagartattttccattacctgaacacttaacatcgacacayaatagcgacatattcatattaaacgtcgtaggcgacagtatgattgaggctggtatattagacggagacaaagtaattgttcgcagtcaaaccatagcagaaaatggagacattattgttgctatgactgaggaagatgaagcaactgtcaaacgcttctataaagaaaaaaatygttatcgattacaacctgaaaatagtacaatggagccaatttacctmgacaatgttgctgtaatygggaaagtaattggtttgtaccgcgaaatgtaa

SEQ ID NO: 1498 - DNA, 1473 bp, Staphylococcus aureus
atggatgcgagtgaattccgtaattacattttaggcttgattttctatcgcttcttatcygaaaaagcrgaacaagaatatgcagatgcsttgkcaggtgaagayatyacrtatcaagarrcatgggcagaygaagaataycgtgaagacttaaaagcwgaattaattgaycaagtyggttacttcattgarccasaagatttattcagtgcgatgattcgtgaaattgaaacgcaagatttcgatatcgaacayctsgcracggcrattcgtaaagttgaaacwtcaacaytaggtgaagaaagtgaaaatgactttatcggwctgttcagcgatatggayttragttcaacgcgwytaggtaacaatgtcaaagaacgtactgcdytaatytcyaaagtyatggttaaycttgaygayttaccattygttcacagtgayatggaaattgatatgttaggtgatgcataygaattyctwatygggcgctttgcggcgacagcrggtaaaaaagcaggcgagttctatacaccacaacaagtatctaagatactggcgaagattgtcacagacggtaaagataaattacgtcaygtrtaygacccaacatgtggttcmggttcaytrytgttacgygttggtaaagarrcrmaagtgtatcgttatttyggwcaagaacgtaacaatacyacwtacaacttagcrcgcatgaayatgttrttacatgatgtrcghtatgaraayttygatatccgtaatgatgayacrttggaaaayccagcyttyttaggmmatacatttgatgcggttatwgcgaacccaccrtayagygcgaaatggacwgcagaytcaaartttgaaaatgaygaacgmttcagyggwtacggcaarcttgcgccwaartcyaaagcagactttgcctttattcaacayatggtacattacytagaygatgaaggtaccatggcmgttgtactcccacatggtgtmttattccgwggtgcygcagaaggyrtcattcgtcgttatttaattgaagaaaagaactacttagaagcygtgattggyttrccagysaayattttctatgggacaagtattccaacatgtatyttagtatttaaaaaatgtygccaacaagamgacwaygtaytatttatcgatgcatccaatgattttgaaaaaggaaaaaaycaaaaycatttaascgatgcccaagtcgaacghattatwracacatayaagcgtaargaaacaattgataartayagytacagygcgacaytacaagagatygccgataacgattacaacytaaayataccgagrtatgtcgatacattcgaagaagaagcrccrattgatttagatcaagtccaacaagatttgaaaaatatcgayaaagaaatcgcagaarttgarcaagaaatcaatgcatacctgaaagaacttggggtgttgaaagatgagtaa

SEQ ID NO: 1499 - DNA, 438 bp, Staphylococcus aureus
ttgaataatctattttctaatttttttatttgttgtataattgaggttacatttaaaaaagagaggttgagtgtaatgttaaaagaattcaaagagttcgccttaaaaggtaacgtcttagatttagcaattgctgttgtgatgggtgcagctttcaacaagattatatcttcattagtagaaaatatcatyatgccattaattggtaaaattttcggatcagttgattttgctaaagaatggtcattctggggtattaaatayggtttatttatccaatctgttatcgactttattatcatcgcgtttgctttattcatcttygttaagattgcaaatacmttaatgaagaaagaagaagccgaagaagaagcagttgtggaagaaaatgttgtgttattaactgaaatcagagatttattrcgtgagaaaaaataa

SEQ ID NO: 1500 - DNA, 246 bp, Staphylococcus aureus
atgtattatctaaaactaacacggtggaaaaatgatggtttagctggatttactgcaggttctatttcggcaatacttgtatattggaccaatcaaaaaaatgaatttggaataaaagataaaaacgattggataggacataaactagacgttggtatagatgctgtagaaaaatctgcagaaaaaacagtagatggtgttgaaaatgtmatggtgaagcttcaaaaagtatttctaatcatataa

SEQ ID NO: 1501 - DNA, 1212 bp, Staphylococcus aureus
atgagtaatacacaaaagaaaaatgtgccagarttgagrttcccagggtttgaaggcgaatgggaagagaagcagttrggggatcttacagatagagtaattaggaaaaataaaaacttagaatcgaaaaagcctttaacaatatccggacagttaggtttaattgatcaaacagaatattttagtaaatcagtttcgtcgaaaaatctagaaaattatacactaataaagaatggagaattcgcgtataacaaaagttattctaatggatacccattaggggctattaaaagattaactagatatgatagtggtgtattgtcctctttgtatatttgtttttctattaaaagtgaaatgtctaaagacttcatggaagcatattttgattcgacacactggtatagagaagtttctggaattgcagttgagggtgcaagaaatcacggattattaaatgtttctgtgaatgatttttttactattctaattaaatatccaagtttagaagaacagcaaaaaataggcaagttcttcagcaaactcgaccgacaaattgaattagaagaacaaaagcttgaattacttcaacaacagaaaaaaggctatatgcagaaaattttctcacaggaactgcgattcaaagatgagaatggtgaagattatccagattgggaaaatagcaaaatagaaaaatatttaaaagagagaaacgaacgttctgacaaagggcaaatgctttcagtaactataaatagtggcattataaaatttagtgaattggatagaaaagataattcaagtaaagataaaagtaattataaagtagttaggaaaaatgatattgcatataattctatgagaatgtggcaaggggctagtggtaaatcaaattataatgggattgttagccctgcatatactgtgctttatccaacacaaaatactagctcattatttattggatataagtttaaaacacatagaatgattcataaatttaaaattaattcacaaggattaacatcagatacatggaacttaaaatataaacaattaaaaaatataaatatagatatacctgtattggaggaacaagaaaagataggtgatttctttaaaaaaatggatatattgataagtaaacagaaaatgaaaattgaaatattagaaaaagagaaacaatcctttttacaaaaaatgttcttataa

SEQ ID NO: 1502 - DNA, 297 bp, Staphylococcus aureus
atgcaaatagaacttactgatgcagcagtaacttggtttaaaaatgaacttgagttrcctgaaaataataaagtgctcgtgttttttgtaagatatggtggcgaattccaactcaagcaaggatttagtcctgcttttacagttgaaccaaaggaagatgttgatattggctatgaacaacaatatgacgatttaaatgttgtcrtagcggaaaaagatttgtggtactttgaagatgaccacattattgtaaatgtagttgatcacgaagatgaaatttcttattccamaaaataa

SEQ ID NO: 1503 - DNA, 1233 bp, Staphylococcus aureus
atgagtaatacacaaacgaaaaatgtgccagagttgagattcccagggtttgaaggcgaatgggaagagaagaaggttggcgagttattagaatttaaaaatggtttaaataaaggaaaagaatattttggctcaggatcgtcgattgttaacttcaaagatgtatttaataacaggagcttaaatacaaataatctgactggaaaagttaatgtgaatagcaaagaactaaaaaattattctgttgaaaagggtgatgttttttttacaaggactagtgaggtaattggtgaaataggttatccgtctgtaattttaaatgaccctgaaaatactgtgtttagtggatttgtattaagagggcggcctaaatcaggaattgatttaataaataataattttaaaagatatgtcttttttactaattcatttagaaaagaaatgattacaaaaagttctatgacaactagagctttaacatcaggtagcgcaattaataaaatgaaggtcatataccctgtttcggctaaagaacagagaaaaataggtgacttcttcagcaaactcgaccgacaaattgaattagaagaacaaaagcttgaattacttcaacaacaaaaaaaaggctatatgcagaaaatcttctcacaggaactgcgattcaaagatgagaatagtgaagattatccacattgggaaaatagcaaaatagaaaaatatttaaaagagagaaacgaacgttctgacaaaggtcaaatgctttcagtaactataaatagtggcattataaaatttagtgaattggatagaaaagataattcaagtaaagataaaagtaattataaagtagttaggaaaaatgatattgcatataattctatgagaatgtggcaaggggctagtggtagatcaaattataatgggattgttagccctgcatatactgtgctttatccaacacaaaatactagctcattatttattggatataagtttaaaacacatagaatgattcataaatttaaaattaattcacaaggattaacatcagatacatggaacttaaaatataaacaattaaaaaatataaatatagatatacctgtattggaggaacaagaaaagataggtgatttctttaaaaaaatggatatattgattagtaaacagaaaataaaaattgaaatattagaaaaagagaaacaatcctttttacaaaagatgttcttataa

SEQ ID NO: 1504 - DNA, 678 bp, Staphylococcus aureus
atgaaattaaaaaatattgctaaagcaagtttagcactagggattttaacaacagggatgattacaactactgctcagccagtaaaagcaagtacattagaggttagatcacaagctactcaagacttgagtgaatattataatagaccgttctttgagtatacaaatcagtcaggatataaagaggaaggaaaagtgacgtttactcctaattatcaacttatagatgtaactttaactgggaatgaaaagcaaaattttggtgaagatatttctaatgtagatatatttgttgtaagagaaaattctgatagatctggtaatacagcttcaattggtggtattactaaaacaaacggttcaaattatattgataaagtaaaagatgtaaatttaataattactaaaaacatcgatagtgttacatcaacgtcaacatcatctacatatacaattaataaagaagaaatttcattaaaagaacttgattttaaattaagaaagcatttaattgataaacataacctttataagacagaacctaaagacagtaaaattcgaattactatgaaagatggtgggttctacacatttgaattgaataaaaagttacaaacacaccgtatgggtgatgttattgatggcagaaatatagaaaaaattgaagtgaatttataa

SEQ ID NO: 1505 - DNA, 609 bp, Staphylococcus aureus
atgatgataatcgtcatgttactactaagttatcttatcggcgctttcccaagtggattcgtaattggaaaattatttttcaaaaaagatattagacaatttggtagtggtaatactggcgctactaatagctttagagtattaggtcgtcctgcaggattcttggtaacatttctagatattttcaaagggttcataactgttttcttccctttatggttacmagttcacgcagatggccctattagtactttttttacaaatggtttaattgtwggcttattcgctatacttggacacgtttayccwgtttatttaaaattccaaggtggcaaagctgttgcaactagtgcaggtgtcgtcttgggagtcaayccgatactwttactaatacttgcaattatcttctttattgtattgaagatttttaaatatgtttctttagcaagtatcgttgcagcaatttgctgtgtgattggctcgcttatcattcaagactatattttattagtcgttagtttcttagtttcaatcatattgataattagacatcgctctaatatcgcaaggatttttagaggcgaagaacctaaaataaaatggatgtaa

SEQ ID NO: 1506 - DNA, 1509 bp, Staphylococcus aureus
atgagkgaaaattttaagttacgtaaaatgaaagtcggtttagtatctgttgcaattacaatgttatatattatgacaaacggacaagcagaagcatctgaaaatcaaaacgctttaatctctaatataaatgtagacaatcaggaaaaacagaataatgtaaatcaagctgttcagcctcaaaataatactaatgaaacatcaaaagtaccggctaattttgtcaaattgaatgatattaaaccaggtgatacttctatacaaggaacaactttaccaaatcaatttatactattaactattgataaaaaagatgtgagctcagttgaagattctgacagcagctttgttatgtctgataaagatgggaattttaagtatgacttaaatggtcgcaaaattgttcataatcaagaaattgaagtgtcttcatcagatccctatttaggtgacgatgaagaagatgaagaagtagaagaaacttcaactgaagaagttggtgctgaggaagaaagtacagaagctaaagctacatatacaacaccgcgatatgaaaaagcgtatgaaataccgaaagaacagctaaaagaaaaagatggacatcaccaagtttttatcgaacctattactgaaggttcaggtattattaaaggccatacctctgtaaaaggtaaagttgctctatctattaataataaatttattaactttgagacaaatgctaatggtggtccaaataaagaagaagcgaaatctggatcagaaggaatctggatgcctattgatgacaaaggatactttaattttgacttcaaaacgaaacgtttcgatgatttagagttaaagaaaaatgatgagatctcattaacatttgcacctgatgacgaagatgaggcattgaagtcattaattttcaaaactaaggtaacgagtttagaagatattgataaagcagaaactaaatatgaccatactaaagtggaaaaagtaaaagtattgaaagatgttaaagaagatttacatgtagatgaaatttacggaagcttatatcatacagaaaaaggtaaaggtattcttgataaagaaggtactaaagtaattaaaggtaagactaaattcgcaaatgcagttgtgaaggtagactctgaactaggtgaaggtcaagaattccctgatttgcaagtcgatgaaaaaggtgaattcagctttgatgtagatcatgctggatttagattacaaaatggagaaacactaaacttcacagtagttgatcctattacaggtgaattattaagtggaaattttgtttctaaaaacatagatatttatgaatctcctgaagaaaaagcagatcgtgagtttgatgaaagaatggaaaacacacctgcatatcataaattacatggtgataaaattgtcggctacgatactaacggattcccgattacctggttttatccattaggtgaaaagaaagttgaacgtaaggcaccaaaattagaaaaataa

SEQ ID NO: 1507 - DNA, 96 bp, Staphylococcus aureus
atgaatcatgyaccttctataaaattagaccgaattgaamcttcagtaaatatagagatacatcatcatttcttatacaatacaagagatttatat

SEQ ID NO: 1508 - DNA, 510 bp, Staphylococcus aureus
atgaatattaatacagcttattttgccggaggttgcttttggtgtatgacgaaaccatttgacacctttgacggcatagaaaaagtaacttctggatatatgggcggacatattgaaaaycctacttacgaacaagtaaaatcaggtacgagtggwcatttagaaactgttgaaattcaatatgatgttgcattattctcatacaataagttattagaaatatttttctcagtcattgacccattagatacaggkggtcaatatcaagaccgtggtcctcaatatcaaacagctattttctacactaatgatcatcaaaaagaactcgctgagacwtatatcgagcagcttaaaaatacgattaatgctgataaggcaattgcaacaaaaatattaccmgcgtcacaattttacaaagccgaagactatcaccaagatttttataagaaaaatccagagcgytatgcagaagaacaaaaaatacgccaagaatacaaaaataarcaataa

SEQ ID NO: 1509 - DNA, 186 bp, Staphylococcus aureus
atgccaatcgtcaatgtaaaattattagaaggtcgttcggatgaacaattaaaaaatttagttagcgaagtwactgacgccgtagaaaaaacaacgggrgcaaatagacaagcaattcacgttgttatagaagaaatgaaaccaaaccattatggtgtggctggcgtaagaaagtcagatcaataa

SEQ ID NO: 1510 - DNA, 4647 bp, Staphylococcus aureus
atgaataaaaattcgaagaagaagctcgattttcttccaaacaagcttaataagtactcaattagacgtttcactgtagggacagcttcgattttagtaggagctactttaattttcggtgttgcaaatgatcaagcagaagccgctgagaataacacaactcaaaagcaagatgatagttcagatgcaagtaaagtaaaaggtaatgttcaaactattgaacaatcttctgcaaattcaaatgaatctgatattcctgaacaagttgatgtaactaaagatacaactgaacaagcatcaacagaagaaaaagcaaatacaactgaacaagcatcaacagaagaaaaagcagatacaactgaacaagcaacaacagaagaagcgccaaaagctgaaggaacagacaaagtagaaacagaagaagcgccaaaagctgaagaaacagacaaagcaacagaagaagcaccaaaaactgaagaaacagacaaagcaacaacagaagaagcgccaaaagctgaagaaacagacaaagcaacagaagaagcaccaaaaactgaagaaacagacaaagcaacaacagaagaagcgccagcagctgaagaaacaagcaaagcagcaacagaagaagcgccaaaagctgaagaaacaagcaaagcagcaacagaagaagcgccaaaagctgaagaaacagaaaaaacagcaacagaagaagcaccaaaaactgaagaaacagacaaagtagaaacagaagaagcgccaaaagctgaagaaacaagcaaagcagcaacagaaaaagcaccaaaagctgaagaaacaaacaaagtagaaacagaagaagcgccagcagctgaagaaacaaacaaagcagcaacagaagaaacaccagcagttgaagacacaaatgctaagagcaattcaaatgctcaaccatcagaaactgagagaactcaagttgtagatacagttgctaaagatttatataaaaaatctgaagttacagaagcagaaaaagctgaaattgaaaaagtattaccaaaagatatttcaaacttatctaatgaagaaattaaaaaaatagctttaagtgaagtacttaaagaaacagctaacaaagaaaacgcacaaccaagagcaacattccgttcagtaagcagcaatgctagaacaacaaatgttaactattcagcaacagcattaagagcagctgcacaagacacagttactaaaaaaggaactggtaactttactgcgcatggagatataatccataaaacttataaagaagaattccctaatgaaggcacgctaactgcattcaatacaaacttcaatcctaatacaggaactaaaggcgcattagaatataatgataaaatagattttaataaagactttacaattactgttccagtagcaaacaacaaccaaggtaatacaacaggagcagatggctggggcttcatgtttactcaagggaatggccaagacttcttaaaccaaggtggtattttaagagacaaaggtatggcaaatgcatctggttttaaaattgatacggcatataataatgttaatggtaaagtcgataaactcgatgcagataaaacaaacaatctaagtcaaattggcgcagcaaaagttggttacggtacatttgttaaaaatggtgcagatggtgtgactaaccaagttggtcaaaatgccctaaatacaaaagataaacctgtaaataaaataatttatgcagataatacaactaatcatcttgatggtcaattccatggccaaagattaaatgatgtagtattaaattatgatgcagcaacaagtacaataactgctacatatgcaggaaaaacatggaaagctactacagatgatttaggaattgataaatcacaaaaatataatttcttaattacttcaagtcatatgcaaaatagatattctaatggaattatgagaacaaatcttgaaggtgtaacaattacaacgcctcaagctgatttaattgatgatgtggaagtaacgaaacaaccaattcctcataaaactattcgtgagtttgatccaactctagaaccaggctcacctgatgttattgtacaaaaaggtgaagatggagagaaaacaacaactacaccaactaaagttgaccctgatacaggagatgtagttgaacgtggtgaaccaacaacagaagttacaaaaaatccagttgacgagattgtacactttgcacctgaagaagtaccacaaggtcataaagatgagttcgatccaaacttaccaattgacggtacagaagaagtaccaggtaaaccaggcatcaagaatcctgaaacaggtgaagtagtaacacctccggttgacgatgtcacaaaacatggtccaaaagcaggcgaaccagaggttactaaagaagaaataccattcgagaaaaaacgtgagttcaatccagacttaaaaccaggtgaagagaaagtaacgcaagaaggacaaactggagagaaaacaacaacaacgccaacaacaattaatccattaacgggagaaaaagtaggcgaaggtgaaccaacaacagaagtaacaaaagaaccagtagatgaaatcacacaattcggtggagaagaagtaccacaaggtcataaagatgagttcgatccaaacttaccaattgacggtacagaagaagtaccaggtaaaccaggcatcaagaatcctgaaacaggtgaagtagtaacacctccggttgacgatgtcacaaaacatggtccaaaagcaggcgaaccagaggttactaaagaagaaataccattcgagaaaaaacgtgagttcaatccagacttaaaaccaggtgaagagaaagtaacgcaagaaggacaaactggagagaaaacaacaacaacgccaacaacaattaatccattaacgggagaaaaagtaggcgaaggtgaaccaacaacagaagtaacaaaagaaccagtagatgaaatcacacaattcggtggagaagaagtaccacaaggtcataaagatgagttcgatccaaacttaccaattgacggtacagaagaagtaccaggtaaaccaggcatcaagaatcctgaaacaggtgaagtagtaacaccaccagtagacgatgtcacaaaacatggtccaaaagcaggcgaaccagaggttactaaagaagaaattccatatgaaactaaacgcgtattagatccaacaatggaaccaggtagtcctgataaagtagctcaaaaaggtgaaaatggtgaaaaaacaacaacaacaccaactacaattaatccattaacgggagaaaaagtaggcgaaggcgaaccaacaacggaagtaacgaaagaaccaatagacgaaattgttaactatgcacctgaaattattcctcatggtacacgtgaagaaattgatccaaacttaccagaaggtgaaactaaagttatcccaggtaaagatggcttgaaagatcctgaaactggagaaatcattgaagaaccacaagatgaagtaatcatccatggtgctaaagatgattcagatgcggacagcgattcagacgcagatagcgattctgatgcagacagcgactcagacgcagatagcgactctgatgcggacagcgattcagacagcgatagcgattcagattcagatagcgactctgatgcggacagcgattcagacgcagatagcgattcagattcagatagtgactctgatgcggacagcgactcagacgcagatagcgactctgatgcggacagcgactcagacgcagatagcgattctgattcagacagcgactcagacgcagatagcgactcagattcagacagcgattcagacgcagatagcgactcagacgcagatagcgattcagacgcagatagcgactcagacgcagatagcgattcagattcagatagcgactctgatgcggacagcgatagcgattcagattcagacagcgactcagacgcagatagcgattcagacagcgattcagacgcagatagcgactctgatgcggacagcgactcagacgcagatagcgactcagacgcagatagcgattcagattcagacagcgactcagattcagacagcgatagcgattcagattcagacagagactcagacgcagatagcgactcagacgcagatagcgactcagattcagacagcgattcagacgcagatagcgattcagattcagatagtgactctgatgcggacagcgattcagacgcagatagcgactcagattcagacgcagatagcgattctgattcagacagcgactcagacgcagatagcgactctgatgcggacagcgactcagacgcagatagcgattctgatgcagacagcgactcagacagcgatagcgattctgattcagacagcgattcagacgcagatagcgactctgatgcggacagcgattcagacgcagatagagatcataatgacaaaacagataaaccaaataataaagagttaccagatactggtaatgatgctcaaaataatggcacattatttggttcactattcgctgcgcttggaggattattcttagttggcagacgtcgtaaaaacaaaaataatgaagaaaaataa

SEQ ID NO: 1511 - DNA, 996 bp, Staphylococcus aureus
atgctacttaaaccaaaataccaaatcgttattgctggtttatgtcttgcaatagtagctatcttaagtttaatgattggaaatacgcttgtgtcaccaggtacggtgatacaggcgttattcaactttgatagtgaaaacgatttacatgatgttgtcactggtgcacgggcgtcgagaacaatcattgcgytattgacwggygcygcmctwgcwgtctcaggtttgttgatgcaagcacttacacgaaacccaatagcmtcrccrgggcttttcggtgtcaatgcaggcgcagtattttttgtcatytttagtattacatttatccaaattcaatcttttaaaatgattgtwgtyatygcrtttttrggkgcyattgttgttacwrtmttagtygttgcrctaggkatgtttagacaaacmctattytcacctcaccgtgtcattttrgcrggtgcygcgattgcgatgytatttacagcytttactcaaggcatwctyattatgaaygaaacagacttacaaggcctattattytggttragtggctccgtttcattacgtaayatttgggatatcmcatggattattccgcttgtattgatacttattttaattgcatttagcatggctgcacacatcaacatcttgatgacaagtgacgacattgcmayyggmctcggwcaaaacataaaattaatcaaatggatgattatwatgctcatyagtatgytagcmggyatytcggtwgcygtagctggakcaatcgtctttgtrggwcttatygtaccgaatattagyaaacgattattaccaccaaactataagtatttaattccttttactgcattarcyggmgcaatcctaatgatyatytcagacattgttgctcgtatwatwattaagccactagagttgcctatcggtgtcgttaccgctgtcattggcgctattgtcttaatctatmttatgaagaaaggacgtcaacgcttatga

SEQ ID NO: 1512 - DNA, 5097 bp, Staphylococcus aureus
atgaataaaaattcgaagaagaagctcgattttcttccaaacaagcttaataagtactcaattagacgtttcactgtagggacagcttcgattttagtaggagctactttaattttcggtgttgcaaatgatcaagcagaagccgctgagaataacacaactcaaaagcaagatgatagttcagatgcaagtaaagtaaaaggtaatgttcaaactattgaacaatcttctgcaaattcaaatgaatctgatattcctgaacaagttgatgtaactaaagatacaactgaacaagcatcaacagaagaaaaagcaaatacaactgaacaagcatcaacagaagaaaaagcagatacaactgaacaagcaacaacagaagaagcgccaaaagctgaaggaacagacaaagtagaaacagaagaagcgccaaaagctgaagaaacagacaaagcaacagaagaagcaccaaaaactgaagaaacagacaaagcaacaacagaagaagcgccaaaagctgaagaaacagacaaagcaacagaagaagcaccaaaaactgaagaaacagacaaagcaacaacagaagaagcgccagcagctgaagaaacaagcaaagcagcaacagaagaagcgccaaaagctgaagaaacaagcaaagcagcaacagaagaagcgccaaaagctgaagaaacagaaaaaacagcaacagaagaagcaccaaaaactgaagaaacagacaaagtagaaacagaagaagcgccaaaagctgaagaaacaagcaaagcagcaacagaaaaagcaccaaaagctgaagaaacaaacaaagtagaaacagaagaagcgccagcagctgaagaaacaaacaaagcagcaacagaagaaacaccagcagttgaagacacaaatgctaagagcaattcaaatgctcaaccatcagaaactgagagaactcaagttgtagatacagttgctaaagatttatataaaaaatctgaagttacagaagcagaaaaagctgaaattgaaaaagtattaccaaaagatatttcaaacttatctaatgaagaaattaaaaaaatagctttaagtgaagtacttaaagaaacagctaacaaagaaaacgcacaaccaagagcaacattccgttcagtaagcagcaatgctagaacaacaaatgttaactattcagcaacagcattaagagcagctgcacaagacacagttactaaaaaaggaactggtaactttactgcgcatggagatataatccataaaacttataaagaagaattccctaatgaaggcacgctaactgcattcaatacaaacttcaatcctaatacaggaactaaaggcgcattagaatataatgataaaatagattttaataaagactttacaattactgttccagtagcaaacaacaaccaaggtaatacaacaggagcagatggctggggcttcatgtttactcaagggaatggccaagacttcttaaaccaaggtggtattttaagagacaaaggtatggcaaatgcatctggttttaaaattgatacggcatataataatgttaatggtaaagtcgataaactcgatgcagataaaacaaacaatctaagtcaaattggcgcagcaaaagttggttacggtacatttgttaaaaatggtgcagatggtgtgactaaccaagttggtcaaaatgccctaaatacaaaagataaacctgtaaataaaataatttatgcagataatacaactaatcatcttgatggtcaattccatggccaaagattaaatgatgtagtattaaattatgatgcagcaacaagtacaataactgctacatatgcaggaaaaacatggaaagctactacagatgatttaggaattgataaatcacaaaaatataatttcttaattacttcaagtcatatgcaaaatagatattctaatggaattatgagaacaaatcttgaaggtgtaacaattacaacgcctcaagctgatttaattgatgatgtggaagtaacgaaacaaccaattcctcataaaactattcgtgagtttgatccaactctagaaccaggctcacctgatgttattgtacaaaaaggtgaagatggagagaaaacaacaactacaccaactaaagttgaccctgatacaggagatgtagttgaacgtggtgaaccaacaacagaagttacaaaaaatccagttgacgagattgtacactttgcacctgaagaagtaccacaaggtcataaagatgagttcgatccaaacttaccaattgacggtacagaagaagtaccaggtaaaccaggcatcaagaatcctgaaacaggtgaagtagtaacacctccggttgacgatgtcacaaaacatggtccaaaagcaggcgaaccagaggttactaaagaagaaataccattcgagaaaaaacgtgagttcaatccagacttaaaaccaggtgaagagaaagtaacgcaagaaggacaaactggagagaaaacaacaacaacgccaacaacaattaatccattaacgggagaaaaagtaggcgaaggtgaaccaacaacagaagtaacaaaagaaccagtagatgaaatcacacaattcggtggagaagaagtaccacaaggtcataaagatgagttcgatccaaacttaccaattgacggtacagaagaagtaccaggtaaaccaggcatcaagaatcctgaaacaggtgaagtagtaacacctccggttgacgatgtcacaaaacatggtccaaaagcaggcgaaccagaggttactaaagaagaaataccattcgagaaaaaacgtgagttcaatccagacttaaaaccaggtgaagagaaagtaacgcaagaaggacaaactggagagaaaacaacaacaacgccaacaacaattaatccattaacgggagaaaaagtaggcgaaggtgaaccaacaacagaagtaacaaaagaaccagtagatgaaatcacacaattcggtggagaagaagtaccacaaggtcataaagatgagttcgatccaaacttaccaattgacggtacagaagaagtaccaggtaaaccaggcatcaagaatcctgaaacaggtgaagtagtaacacctccggtagacgatgtcacaaaacatggtccaaaagcaggcgaaccagaggttactaaagaagaaataccattcgagaaaaaacgtgagttcaatccagacttaaaaccaggtgaagagaaagtaacgcaagaaggacaaactggagagaaaacaacaacaacgccaacaacaattaatccattaacgggagaaaaagtaggcgaaggtgaaccaacaacagaagtaacaaaagaaccagtagatgaaatcacacaattcggtggagaagaagtaccacaaggtcataaagatgagttcgatccaaacttaccaattgacggtacagaagaagtaccaggtaaaccaggcatcaagaatcctgaaacaggtgaagtagtaacacctccggttgacgatgtcacaaaacatggtccaaaagcaggcgaaccagaggttactaaagaagaaataccattcgagaaaaaacgtgagttcaatccagacttaaaaccaggtgaagagaaagtaacgcaagaaggacaaactggagagaaaacaacaacaacgccaacaacaattaatccattaacgggagaaaaagtaggcgaaggtgaaccaacaacagaagtaacaaaagaaccagtagatgaaatcacacaattcggtggagaagaagtaccacaaggtcataaagatgagttcgatccaaacttaccaattgacggtacagaagaagtaccaggtaaaccaggcatcaagaatcctgaaacaggtgaagtagtaacaccaccagtagacgatgtcacaaaacatggtccaaaagcaggcgaaccagaggttactaaagaagaaattccatatgaaactaaacgcgtattagatccaacaatggaaccaggtagtcctgataaagtagctcaaaaaggtgaaaatggtgaaaaaacaacaacaacaccaactacaattaatccattaacgggagaaaaagtaggcgaaggcgaaccaacaacggaagtaacgaaagaaccaatagacgaaattgttaactatgcacctgaaattattcctcatggtacacgtgaagaaattgatccaaacttaccagaaggtgaaactaaagttatcccaggtaaagatggcttgaaagatcctgaaactggagaaatcattgaagaaccacaagatgaagtaatcatccatggtgctaaagatgattcagatgcggacagcgattcagacgcagatagcgattctgatgcagacagcgactcagacgcagatagcgactctgatgcggacagcgattcagacagcgatagcgattcagattcagatagcgactctgatgcggacagcgattcagacagcgatagcgattcagacgcagatagcgattctgatgcagacagcgactcagacgcagatagcgactcagattcagacgcagatagcgactcagattcagacagcgactcagacgcagatagcgactcagattcagacagcgatagcgattctgatgcagacagcgactcagacgcagatagcgactctgatgcggacagcgattcagacgcagatagcgactcagattcagacagcgattcagacgcagatagcgactcagattcagacgcagatagcgattctgattcagacagcgactcagacgcagatagcgactctgatgcggacagcgactcagacgcagatagcgattctgatgcagacagcgactcagacagcgatagcgattctgattcagacagcgattcagacgcagatagcgactctgatgcggacagcgattcagacgcagatagagatcataatgacaaaacagataaaccaaataataaagagttaccagatactggtaatgatgctcaaaataatggcacattatttggttcactattcgctgcgcttggaggattattcttagttggcagacgtcgtaaaaacaaaaataatgaagaaaaataa

SEQ ID NO: 1513 - DNA, 795 bp, Staphylococcus aureus
atgaagtctataaaaaggattggattgtgcatwagtytgttgattttaatcatytttgywacatcttgtgrtrgtgataataagatyaytggagaytcaaaagaagaacaaatcaaaaagagytttgcgaaawcdttagahawstayccwayyraraayctmgargakttwtaygayaaagaaggatatmgagayggmgaatttraaaaagrtgataaaggkacttggstwattagatctgaaatgaaaatccaattaaaaggagaaaatctggaatctagrggagyagttwtagaaattaacagaaatactagaacggctaaagggmattatattgttagagaagttgttgaagatagcgatggaatgacacacaatcatacaaaaagrtatcctgtraaaatggaaaataataaaatsattccattaaaaymaatygwtgaygaaaaagtaaaaaaagaaatygaagaatttaamttctttgtacaatacgggaatttcaaagaattggaaaactataaagaggacgaagtgwcatataacccagaagyaccaatwtactctgcamaatatcaattgaaaaacagtgattayaatgtwgarcaattamgkaagcgatataatatcccgacgcaaaaagcgccyaaattattattgaaaggstcaggtaatytaaaaggytcatcagtyggatataaaaatattgaatttacctttrttgaaaayaaggragaaaatatttacttcacagatagtrtctactttaatccaagcgaggataaatawaattactaa

SEQ ID NO: 1514 - DNA, 1092 bp, Staphylococcus aureus
atgacaacagttttatttgttggrcttggattaattggtggaagtcttgctagcaatataaaataccataaccctaatactaatattattgcatacgatgcagatayttctcagttagataaagctaaatcaatcggyattattaatgaaaaatgtttaaattatagtgaagctattaaaaaagccgatgtaattatttatgcaacacctgttgctatcacaaataaatatcttagcgagcttatasatatgccaactaaacctggtgttattgtttctgatactggtagtactaaagcaatgatacagcaacacgaatscartttattaaagcataatattcatttagtcagtggtcatccaatggctggtagtcataaatcyggtgtactaaatgctaaaaagcacttatttgaaaacgcttattatattttagtctayaatgagccaagaaatgagcaagcagcaaacacgttaaaagaactgttatcacctactcttgctaaatttattgtaactactgctgaagaacacgactacgtaacaagcgtcgtaagtcatttacctcatatcgttgcatctagtttagttcatgttagtcaaaagaacrgtcaagaacatcatttagtyaataaacttgcagctggtggttttcgtgatatcactcgtatagctagtagtaatgcacaaatgtggaaagatatcaccttgagtaataaaacgtatattttagaaatgattcgacagctaaaaagtcagtttcaagatttagaaagactaattgaaagcaatgattctgaaaaattgttatcattttttgccsaagctaaatcgtatcgygacgcactrcccgctaaacaactaggtggactaaatactgcgtatgatctatatgtagayattccggatgaatcaggtatgataagyaaagtgacttatatcmtragtttacataayatatctataagcaacttaagaatcttagaagtacgcgaagatatatacggtgctttaaaaattagtttcaaaaaycctacygaycgagaacgcggtatgcaagcattgagtgattttgattgttatatccaataa

SEQ ID NO: 1515 - DNA, 777 bp, Staphylococcus aureus
atgaagtgttttcagaaattatacatatttatattaattttaatcgtattaatggcaggatgcgaaagtaataagatcactggagattcgaaagaaacacagatcaaaaagagctttgcgaaaacattagatgtataccctacgaaaaatctagaagatttttatgacaaagaaggatatcgagatggcgaatttaaaaagggtgacaaagggaagtgggttattagatctgaaatgacaacagaactgaaaaatgaaaatatggtatctaaaggtatggtcatacgtttaaatagaaatagtagaacatgcactggtgaatattttgtcaggatagttaaagaagacagtgagggcaaggtatatagtgatgaacgaaaatatccagtgaaaatggaaaataataaaatcattacattaaaaccaatcgatgatgaaaaagtaaaaaaagaaattgaagaatttaaattcttcgtacaatacgggaatttcaaagaattggaaaactataaagacggagaagtgacatataacccagaagcaccaatatactctgcacaatatcaattgaaaaatagtgattataatgtagaacaactacgtaagcgatataatataacgacgaaaaaagcgcctaaattattattgaagggttcaggtaatttaaaaggctcatcagttggatataaaaatattgaatttacctttgttgaaaataaggaagaaaatatttacttcacagatagtattaatttcaacccaagtgaggataaataa

SEQ ID NO: 1516 - DNA, 798 bp, Staphylococcus aureus
atgggatattttaaaagagttttactttatataattgttatggttttgagtgtttttataataggttgtgataaatcaagcgatacttcagaaaaatcaaaaggagattcaaaagaagcacaaattaaaaagagttttgcaaaaacgttagacatgtatcctactgaaaatctagaagacttttatgacaaagagggatatcgagatggaaaatttaaaaaaggcgacaaaggtacttgggttattagatctgaaatgacaacagaactgaaaaatgaaaatatggtatctaaaggtatggtcatacgtttaaatagaaatagtagaacatgcactggtgaatattttgtcaggatagttaaagaagacagtgagggcaaggtatatagtgatgaacgaaaatatccagtgaaaatggaaaataataaaatcattccattaaaaccaatcgatgatgaaaaagtaaaaaaagaaattgaagaatttaaattctttgtacaatacgggaatttcaaagaattggaaaactataaagacggagaagtgacatataacccagaagcaccaatatactctgcacaatatcaattgaaaaacagtgattacaatgtagaacaattacgtaagcgatataatatcccgacgcaaaaagcgcctaaattattattgaaaggctcaggtaatttaaaaggttcatcagtcggatataaaaatattgaatttacctttgttgaaaacaaggaagaaaatatttacttcacagatagtgtctactttaatccaagcgaggataaataa

SEQ ID NO: 1517 - DNA, 474 bp, Staphylococcus aureus
atgggattacttgatattgcaagtattcgttctatagaaagaggctttaattattatcaaagtgaatgcgtmattaacttaaaatcattttcagaaacgcagcatgagrctgaagtaaagggcagtggyaacaaagtatatcgttgttatattgatatggaacatcctagaaaatccawatgtaattgtcctcwtgctgatggaagacgagtgatatgtaaacatatgattgcattactctttacagctagtccagaagcagcaaataaacatataatsatgttaaacgaagttgaagaagactatcamttacgcagaaatatgtggattgatwstcttaaagaaatgattaatgatatgagtgaagaagaactccgcgaygcatatttaaacatgttaattgaacatggagaaatggcagaattatttggattagatgaagaggamgaawtkttyraggacgaattttattaa

SEQ ID NO: 1518 - DNA, 702 bp, Staphylococcus aureus
atgattgagttaaaacatgtgacttttggttataataaaaagcagatggtgctacaagatatcaatattactatacctgatggagaaaatgttggtattttaggcgaaagtggctgtggtaaaagtacgctcgcttcattggttcttggcttrtttaaacctgytaaaggagaratttacttaagtgayaatgctgtgttamcgattttccarcaccctttaactagctttaaccctgattggacgattgagacctcattaaaagaagcgttatattattacagaggyctaactgataatactgctcaggaycaattattawtacaacatttatctacttttgagttraacgcgcaattattgactaaattaccaagcgaagtgagtggcggacaattacaaagatttaatgtcatgcgttcgttattagcacagcctcgcgttttaatatgtgatgagataacttcaaatttagatgttatagctgaacaaaatgtaatmaatatattaaaagcgcaaacgattacgaacttaaatcattttatcgttatttctcatgatttatccgtgttacaacgcttagtyaatagaattatcgttcttaaggatggcatgatagtcgatgattttrcaatagaggaattatttaatgttgatagacacccttatacaaaagaattagtgcaarcattttcatattag

SEQ ID NO: 1519 - DNA, 774 bp, Staphylococcus aureus
atgagtctcattgatatacaaaatttaacaataaagaatactwgtgagaaatmwcttattaaagggattgatttgaaaatttwtartcaacagattaatgccytgattggagagagcggcgctggraaaagtttgattgctaaagcyttacttgaatatttaccatttgatttaasctgcacgtatgattcgtaccaatttgatggrgaaaatrttagtagattgagtcaatattatggtcatacaattggytatatttmtcaaaattatgcagaaagttttaacgaccatactaaattaggtaaacagttaactgcgatttatcgtaagcattataaargtwgtaaagaagaggctttgtcmaaarttgayaaggctttgtcgtgggttaatttacaaagcaaagatatattaaataaatatagtttccaactttctgggggccaacttgaacgcgtwtacatagcaagcgttctcatgttgrarcctaaattaatcattgcagacgaaccagttgcatcattggatgctttgaacggtaatcaagtgatggatttattacagcatattgtattagaacatggtcaaacattatttattatcacacataacttaagtcatgtattgaaatattgtcagtacatttatgttttaaaagaaggtcaaatcattgaacgaggtaatattaatcatttcaagtatgagcatttgcatccgtatactgaacgtctaattaaatatagaacacaattaaagagggattactatgattga

SEQ ID NO: 1520 - DNA, 831 bp, Staphylococcus aureus
atgcataaaatattttcaaagaataacctkatmttttttgtattcgkygcatttatwtttgtgrtrattgtactrcaattctttgtcagtagtgaaaatgcaaccaaagtcaatttatcacaaacttttgaacctattagttggttgcatttattaggaactgatgattatgggagagatttatttacccgaattattatcggtgcacgttcaacattgtttgttactgttttaacattaatagctatcgttgtcataggtgttacactaggtctatttgccggatayaaaaargggtggattgaacgattagtgttaaggtttattgatgttggtctragtattccagaatttatcatcatgattgctttagcaagytttttycaaccatckttrtggaatttagttatytcaattacaktaataaaatggatgaattacacaaggttgactagaagtatagttaatagcgaaatgaataagccttatataaaaatggcacaattatttcatgtaccwayaagaacaatattaatacgtcatttaacacctaaaattataccggctattatcgttttgatggtcgttgatttcggtaaaatcattytatatataagttcactatcatttattgggttaggtgcacaaccgccaacaccagagtggggcgctatgttgcaacaaggtcgtgattttatttcgtctcatccaattatgttgattgcacctgcttcagtcattgctataactattttaatttttaatttaaccggwgatgcrctaagagatagattgctraaacaacgrggtgaatatratgagtctcattga

SEQ ID NO: 1521 - DNA, 1326 bp, Staphylococcus aureus
atgaaagataaatacaaaatagatccaggrmytattaaawataatacwgaggaaactacagctatttctaaaatmagytaygaarttgaaaatgcgaawttatatggarytrawagtraarmwatarswagacaaatagawyawttraaagmmrmraaaaaattcccttctaatcttgaatatgttgatagttayactgattctcttaatggagtaacaacttctgcttttttaaataaagatacaggcaaagtaactcttgggatgactgggactaatatacaaggcgaagcctttaaaaagttaaaagaaggtgaattttcaagacaaaatkttaccaatgctttggaaacagttaaagatggatatgcagatcttaaaatattatattctcctgcatctgatcaaaactatagatatgcgaatacrcaagaatttataaataaaataaaaagtaagtatgayattgattttattactggwcattcactaggtggaagagatgcggtagttctwggaatgagtaatggtattccgaacattgtggtttataatccagctcctatttctataamtagtttgaatcctaattccccagatggaaaacgattgttagagttatataaaaattataaaggtaatattactaggtttgttgcagaaaatgatgcattgacagaaaatctgaagaaatataagcattatgtttttttcggtaatgataaagtctttaaaaatggtaaaggtcatgaaatggaaggctttctgaccgaagaagaacaaaaagctataaaaaaagaacttaaaaaactacaaggttatgcagaagaaaataataagtcatttgtaaagmattcaaataatgctatctctaaattagctagtatagaattacttagagcaaatatgatgactacaaatggaggaggattatcttcttcgcagcaaaaagttttagaaagtttaacagctttaacaattgcgcagtcattcagtcaactgatagacgatgaaattaatcaaatcaaaaaaatgtataatgaaaagaaaaagraatttggaaaaaattgggaagacgctcaaaaagctggaaaagctgtaggtgaagatttgagtgtaaatggagttctcaatgctttagatgaaggtcaagtgaatgaaagtagtatggtaagagaacctgaacaaatgatatctgcaaaagaaagacaactttcaacgatagggtcttctgtatcaaattatattatgagagttagactcagtattaatgaaatcgttgataaagatcaagtgcttgcatcacaaataggtggattactatga

SEQ ID NO: 1522 - DNA, 1326 bp, Staphylococcus aureus
ttgagtaggaagtataaaatagatttaaaagcaattaatcaaaatactgagtctacaagtgctatttcgaaagcgtcatacgaagttgagaatgctaataataatggtctatcaaaaagagacgtgattaatcaatttaatgatttgaaaaaaatgaaaaaattcccttctaatcttgaatatgttgatagttacactgattctcttactggagtaacaacttctgcttttttaaataaagatacaggcaaagtaactctcgggatgactgggactaatttacaagacgaagcctttaaaaagttaaaagaaggtgaattttcaagacaaaatgttaccaatgctttggaaacagttaaagatggatatgcagatcttaaaatattatattctcctgcatctgatcaaaactatagatatgcgaatacacaagaatttataaataaaataaaaagtaagtatgacattgattttattactggacattcactaggtggaagagatgcggtagttctaggaatgagtaatggtattccgaacattgtggtttataatccagctcctatttctataactagtttgaatcctaattccccagatggaaaacgtttattagaattatataaaaattataaaggtaatattactaggtttgttgcagaaaatgatgcattgacagaaaatctgaagaaatataagcattatgtttttttcggtaatgataaagtctttaaaaatggtaaaggtcatgaaatggaaggctttctgaccgaagaagaacaaaaagctataaaaaaagaacttaaaaaactacaaggttatgcagaagaaaataataagtcatttgtaaagaattcaaataatgctatctctaaattagctagtatagaattacttagagcaaatatgatgactacaaatggaggaggattatcttcttcgcagcaaaaagttttagaaagtttaacagctttaacaattgcgcagtcattcagtcaactgatagacgatgaaattaatcaaatcaaaaaaatgtataatgaaaagaaaaagaaatttggaaaaaattgggaagacgctcaaaaagctggaaaagctgtaggtgaagatttgagtgtaaatggagttctcaatgctttagatgaaggtcaagtgaatgaaagtagtatggtaagagaacctgaacaaatgatatctgcaaaagaaagacaactttcaacgatagggtcttctgtatcaaattatattatgagagttagactcagtattaatgaaatcgttgataaagatcaagtgcttgcatcacaaataggtggattactatga

SEQ ID NO: 1523 - DNA, 1254 bp, Staphylococcus aureus
atggcgtatgaaattgaaaatgctaataatcataatttgagtaagatggcaataaaggaacagttagatagaagcgcagaaaggggcatgttcccttctaatcttgaatatgttgatagttacactgattctcttactggagtaacaacttctgcttttttaaataaagatacaggcaaagtaactcttgggatgactgggactaatatacaaggcgaagcctttaaaaagttaaaagaaggtgaattttcaagacaaaatgttaccaatgctttggaaacagttaaagatggatatgcagatattaaaatattatattctcctgcatctgatcaaaactatagatatgcgaatacacaagaatttataaataaaataaaaagtaagtatgacattgattttattactggacattcactaggtggaagagatgcggtagttctaggaatgagtaatggtattccgaacattgtggtttataatccagctcctatttctataactagtttgaatcctaattccccagatggaaaacgattgttagaattatataaaaattataaaggtaatattactaggtttgttgcagaaaatgatgcattgacagaaaatctgaagaaatataagcattatgtttttttcggtaatgataaagtctttaaaaatggtaaaggtcatgaaatggaaggctttctgaccgaagaagaacaaaaagctataaaaaaagaacttaaaaaactaaaaggttatgcagaagaaaataataagtcatttgtaaagcattcaaataatgctatctctaaattagctagtatagaattacttagagccaatatgatgactgcaaatggaggaggattatcttcttcgcagcagaaagttttagacagtttaacagctttaacaattgcgcagtcattcagtcaactgatagacgatgaaattaatcaaatcaaaaaaatgtataatgaaaagaaaaagaaatttggaaaaaattgggaagacgctcaaaaagctggaaaagctgtaggtgaagatttgagtgtaaatgaagttcttaatgctttagatgaaggtcaagtgaatgaaagtagtatggtaagagaacctgaacaaatgatatctgcaaaagaaagacaactttcaacgatagggtcttctgtatcaaattatattatgagagttagactcagtattaatgaaatcgtagataaagatcaagtgcttgcatcacaaataggtggattactatga

SEQ ID NO: 1524 - DNA, 324 bp, Staphylococcus aureus
atgatgtttaatcaaattaataataaaaatgaattagaagaatcatatgaatcygagaaaaaacgtatagagaatgaactgcawaatttaaatgaacttaggcatagaactcgaaaagaaaatgaacgtagttatgatgtttttcaatatttgaarcacgaaatgaattatagtgaagatgcmcaaaggaaaatgacgagaaatatagaagcgtatgagcaagaaatcaatgagataattagaaagcaagaatggaaattagaagaatataaagaagacttaaaaaagtcttatgaaaagcagttagataarctaagtgactga

SEQ ID NO: 1525 - DNA, 987 bp, Staphylococcus aureus
atgttcataataaagtctatkttgtatagactgatrcaaatgatagttgttttatttgttatttctacacttrcattcattttaatgaaattatcaccaggcaatcctgttgataaaatattacatcttgatgtagcacaagtgtcgacggaacaaataaatgcaaccaaagataaattgggattaaatgattctttattggtacagtggtggcattggatgaatcatttattacattttaatttaggaaaaagttttgaatcaaaagaaccggtaacacagatattattcaactatgcacccataacaytactcatatcwttttcaacattagtagtgtcrttatgcatatctataccgctcggcattatagcagccaaacgatttcataagtkrwckgayaaagtgattagagtgatctcaacwctatcrattagtttaccagcgttctttatcggtattattttattatttattgtcacaaatttaatgaatatagatagcgttatactaagtcagtttatattacctgtamtcacgctatctttaggtatgtgtgcatacatcattcgyttagtgcgttctaatttattgatrttattgmaaagtaatatcgtacaagcatcaagattacgcggtatgaatgaacgytatattttaattcatgatttactaaaaccaacaattttgccgattatcccattaytagggatttcactkggyagtctaataggtggtactgtagtgattgaaaatttatttgatatacctggtattggttatctattaatggatagtattaaatctcgagattatcctgttattcaaggatgcgtgttatttattggcttcttcgttgttattatcaatacgattgctgatttattaacgttattacttgatccgaagcagcgtttacaattaggaaatccraaaawcaaaaccaatacaccattgatatcagwaagtagtgaccgtcatgcataa

SEQ ID NO: 1526 - DNA, 345 bp, Staphylococcus aureus
atgacattattcgatatgcctaattatttatggatcacaacwttaataatgattttattaacaatattctgttgcttagttttaaataaatggtttgtatcwgcagtaattacatttgttatattaggtgtgcttgcattttttattccaaattttcaagatataaaatatcaaccattattaggatacgckgcrtttttagcgatyatgagtttattaattagttttctattatggtattttacwagaaattggcgtaaagaaagaaaagcgcgtaaattagaaaagcaaattgaaaaatacggctatgagrgcgctgaacttcgccgtaaagataaraaataa

SEQ ID NO: 1527 - DNA, 1203 bp, Staphylococcus aureus
atggctaaaattccagttacggtattaagtggttatttaggctcggggaaracaacrttgttaaatcatattttacaaaatcgwgaaggtcgacgtatygcrgtaattgtaaatgatatgagtgaagthaatatcgataaagatcttgtcgcagatggtgggggactatcgcgyacagaygaaaaattagtcgaactytctaayggttgtatctgttgtacacttagagaygatttattaaaagaagttgagcgtttagtgaaaaaaggtggcatcgatcaaattgttattgagtcaacagggatttcagagccagtacctgttgcacaaactttctcatatattgatgatgaacttggcattgatcttacagcgatttgccgtttagatacaatggttacagttgtkgatgctaaccgcttcgtmcatgacatcaactcagaagatttattgatggatcgtgatcaaagcgttgaygaaacagatgarcgttcgattgctgatttattaattgaccaagttgaattttgtgatgtattgattattaataaaattgayttaatwagtgaagaagaactwgcraagttagaaaaartgttaagygcattgcaacckaytgctaaaattattaagacaayaaattctgaagtrgatttaaaagaagtcttraatacgcagcgttttgattttgaaaaagcgagcgagtcagcaggatggatcaaagaacttgagtckggtggkcatgcatcgcatacrcctgaaacagaagaatatggyatatcatcrtttgtatataaacgtcgwctwcctttccatgctaaaaggttcaatgattggttagaaascatgycaaataatgtcgttcgatcaaaaggtatcgtatggytagcacaatacaatcaygtagcatgtttattatctcaagcagggtcatcttgcaatattcayccagttacatattgggtggctagtatgtctgaagcrcaacaaacrcaaatattagcagaacgycaagaygtcgcagctgaatgggatccagaatatggcgatcgtcatacacaatttgtcattattggtacmgamttagatgaagwrmaattaacaaaagaactcgaygcatgcttagtcaatgcgcaagaaattgatgcagattggcaacaatttgaagatccatatcaatggcaaattagaccrgcacgataa

SEQ ID NO: 1528 - DNA, 642 bp, Staphylococcus aureus
atggcaataattagacarcgatatcaggagcaacttgatgatttaataaargaattacgtcggttaggtgcaaatgtctatgtgagtattgaaaatggtataaaatcattaagtattgacgatagaggctttgcacgacaaacagttaaaaacgataaacatatcaatcaattaaattatratattaatgagcgagttatcatgttaattacaaagcaacagcccattgcgagtgatttgcgtatgatgatttcttcattaaaaatcgcctccgatttagaaagaataggagataatgcmtcgagtattgccaatattcgattgcgtacraagattacagatgattatgtgttaacccgtttaaagacaatgggtaaaytagctatgttaatgttaaaggayttagatcaagcatttaaaaagaaagataccgtattaataagagaaataattgagcgtgatgaagatatcgatgacttatatagtcatattattaacgcaacgtatcttattgataacgatccatttgtcgctgcacaagcycatttagcagcaagacatytagaacgtattggtgatcatattattaacatcgctgaaagtgtttatttttatttaacaggtacacattacgaacaataa

SEQ ID NO: 1529 - DNA, 126 bp, Staphylococcus aureus
atgagtgaagtaaatgcagctatcaatgtactattaacacttacggtcacacgagtgtttcagtctaaacgtgcaacgcaattcygcacgtggccaatatatcttgsgmtagatyatgaaaatcat

SEQ ID NO: 1530 - DNA, 852 bp, Staphylococcus aureus
atggcgcaaacacttgcacaaactaaacaaatatctcaaagtcatacgtttgatgtctcacaaagtcatcataaaacaccagatgatacaaactcacattctgttatatattcaacacaaaatttagacttatggtatggcgaaaatcatgcattrcaaaatattaatttagatatttatgaaaaccaaattactgccattataggtccatctggttgtggcaaatcaacatatattaaaactttgaatcgaatggttgagttagtaccywcwgtsaaaacagctggtaaaataytatatcgmgatcaagacatttttgatcaaaaatattctaaagaacaattacgtacaaatgtgggcatggtcttycaacaacctaatccatttccaaaatcaatatacgataatattacttacggkccaaagattcacggtattaaaaataaaaaagttcttgatgaaatcgttgagaaatcattacgtggcgctgcaatttgggatgaattaaaggataggttgcacacaaatgcatatagtttatccggtgggcaacaacarcgtgtttgtatcgcgcgttgtttagcaattgaacctgaagtcattttaatggatgaaccsacatcagcattagatccaatctcaacattaagagtagaagagttggttcaagaactaaaagaaaagtayacaattattatggttacacataatatgcaacaagcagctcgtgtatcagataaaactgcatttttcttaaatggttatgtcaatgaatatgatgayactgataaaattttctctaacccatcaaacaagaaaacagaagattatatttcaggaaggtttggttga

SEQ ID NO: 1531 - DNA, 1485 bp, Staphylococcus aureus
gtgttaagttttcaattgctattttcactgtttgttattgcgcttatcattgcattgataagtggcttgttgtttttagcaccagttatgccaatgagatatattaaattacatttatacatactagtcatgccagtattatttgcagtcattggctttttcggtattcatggtcaacatgtcttaggtccatttaaaatagatcgtttatcttggttattagctggctttgtaatggcgcttggytttattattcaaaagttttcaatgcgatatttactaggtgatcatcattatagacattactttccattgttcactgcgattacrtcgtttgcatctttagcatggatgtctgaagacttaagactgatggcactctgctggggtatkacattattatgtttaacaytgctgatgaacgttaatcgtttttggaaagtgccacgtgagtctgcgaaattatcaagyatgacatttttatgtggttggcttgcattcgttggagcaattgtawctatttatattgcractggygagtggcgsgtrccwcaacatatwsydcatycgacatggtcattgttgacgaatgtactacttgtattagctgtcatgataccrgcagcacaatttccwtttcatcgatggttgattgaatctgtaacrgcaccaacgccagtatcggcaattatgcatgcaggaattgtgaatgcaggtggtgttattctaactcgttttgcgccgatatttgataatggatttgcgttatcattattacttatcctttcwagyatttctgtattgttaggatcgggtattagcttrgttcaagtkgaytayaaamgmcarttrgtsggctctacgatgagtcaaatgggctttatgttagttcaatgygcaytkggtgtatattcagcagcgattatwcatttaatattgcacggtatttttaaagcaacattatttttacaatcaggttctatcgtgaagcgattcaatattccaaaacaagcatctgctaaagacgcttatggctggattgtcatgggacgtgtattagctattatcgtggcatttctrttttggatgagtagtgacagaagtgcatatgaagtgttaagtgcactcattctagsatggtcattacttgtatcttggaatcaratggtagcctttagtaaaggrcgyatggcacgtctkgttggyatgattttgattkcaatygtgacatttatctacrtcatcacacayaattatttttacgmtgtattacaaaatataacaacacatgcgacaacrccgcctacartkagtgtcatcattagtgttgtyatwttaatmtttggyagtttattaagtatytgggtrgcgcgkcatcgatactctaagrsttttgmggtattgtacgtgtggttagttaatctaggwgaagcacgctcgaaagcgatagaaagtcatccgaattatttgaagaagtatttatag

SEQ ID NO: 1532 - DNA, 919 bp, Staphylococcus aureus
atggaaacgacagataataatagacaatcactcgtcgatcaacaacttgtccaaaaacatttatcatccagaacggttaaaaataaagtgttcaaactcatatttttagcatgtacattattaggacttgtcgtacttattgcgttgttaactcaaacattgattaaaggggtaagtcatttaaatttacagtttttcactaatttttcttcttcaacaccatctatggctggcgttaaaggcgcrttaatcggttcactttggttaatgttaagtatcattccattatcaatcatcctaggaataggtacagctatatacttagaagaatatgcgaaaaacaacaaatttactcagtttgttaaaatcagtatttccaatttagctggtgtaccatcagttgtatttgggwtattaggttayactttgttcgttggtggtgcvgggattgaagccttgaaaatgggtaacagtatattggcagcagcgctaacaatgaccttactgatattaccaattattattgtttcaagtcaggaagcaattagagctgtacctaactcagtacgcgaagcttcttayggyttaggtgctaataaatggcaaacgataagacgtgttgtcttaccagcagcgttacctggtattttaactggattcattttgtctctttcaagagcactgggagaaacagcgccacttgtgctwatcggtataccractatattattggcaacacctagaagtatattggatcaattttcagcattaccwatccaaatatttacttgggcgaaaatgccwcaagaagaattccagaatgttgcatcggcaggcattatcgttttactagttatcttaatcttaatgaatggcgttgcgattattttacgtaacaaatwtagtaaaaaattctaat

SEQ ID NO: 1533 - DNA, 993 bp, Staphylococcus aureus
atgaataaagtaattaaaatgcttgttgttacgcttgctttcctacttgttttagcaggatgtagtgggaattcaaataarcaatcatctgatarcaaagataaggaaacaacttcaattaaacatgcaatgggtacaactgaaattaaagggaaaccaaagcgygttgttacrctatatcaaggtgccactgacgtcgctgtatctttaggtgttaaacctgtaggtgctgtagaatcatggacacaaaaaccgaaattcgaatacataaaaaatgatttaaaagatactaagattgtaggtcaagaacctgcacctaacttagargaaatctctaaattaaaaccggacttaattgtcgcgtcaaaagttagaaatgaaaaagtttacgatcaattatctaaaatcgcaccaacagtttctactgatacagttttcaaattcaaagatacaactaagttaatggggaaagctttagggaaagaaaaagaagctgaagatttacttaaaaagtacgatgataaagtagctgcattccaaaaagatgcaaaagcaaagtataaagatgcatggccattgaaagcttcagttgttaacttccgtgctgatcatacaagaatttatgctggtggatatgctggtgaaatcttaaatgatttaggattcaaacgtaataaagacttacaaaaacaagttgataatggtaaagatattatccaacttacatcyaaagaaagcattccattaatgaacgctgatcatatttttgtagtaaaatcagatccaaatgcgaaagatgctgcattagttaaaaagactgaaagcgaatggacttcaagtaaagartggaaaaatttagacgcagttaaaaacaaccaagtatctgatgatttagatgaaatcacttggaacttagctggcggatataaatcwtcattaaaaytkattgacgatttatatgaaaagttaaatattgaaaaacaatcaaaataa

SEQ ID NO: 1534 - DNA, 927 bp, Staphylococcus aureus
atgacttcatctactaatgttaaagctttaatygaaaaaaatawtaataaaaaaggraagcataatgacaaaattataccagttattttagcygcaatttcagcgatttccattttaacaacactaggtatattaatcacattgcttttagaaaccatcacttttttcaccagaattccaataactgaatttctattttctactacttggaatcctaccggytcagaccctaagtttggtatctgggcattgataatagggactttaaaaatcacagttattgcgactatatttgcagttccagtcgggcttggtgcagcaatttatttaagtgaatatgcaagtgaccgtgcacgacgcataatwaaaccgatattagaaattttagcaggaataccaacaattgtgtttggtttctttgcattaacctwtgttacaccagtattaagatctttcataycwggtcttggagagtttaatgctataagtcccggcttagttgtmggtattatgattgtccctctcatcacaagtttgagtgaggatgcaatggcatctgtaccaaataaaattcgagaaggtgcctatggacttggagcaactaaattagaagtagcaactaargtcgtacttccygcagcaacatcaggtattgtagcttcaatmgttctcgcgatttcaagagcaattggagaaacgatgattgtatcattagcggcaggtagttcrccaacagcttcattaagtttaacaagttcrattcaaacaatgactggatatattgttgagatagcgacaggtgatgcaacatttggatcaaatatttattacagtatttatgctgtaggrttcacaytatttatctttaccttaatcatgaatttactttctcartggatttctaagcgttttagggaggagtattaa

SEQ ID NO: 1535 - DNA, 363 bp, Staphylococcus aureus
atgaaaagaacgaaaggtgaaatcgaagctgaaatcagtaaagccattacgcaatgggaaaaagatttccttggcagaggttccttgtcrgttaaatcagacattttaagagatatggtgattattagtttacaaggtatcttaacgccagcwgaatatcgtgtrtgtagtacgaatgaaggattaytaaatattaaacgaacacgttctgaattagttgaatccggtgagcaagatttgaatgatatcattyttaaaattacaggtatcaaagtgatgagcttccayagtgatttaagtacagttacaggtgaacgtattatcgtattcaaacttgaggataatttggaaaagcatatttaa

SEQ ID NO: 1536 - DNA, 984 bp, Staphylococcus aureus
atgaaaaaatggcaatttgttggtactacagctttaggtgcaacactattattaggtgcttgtggtggcggtaatggtggcagtggtaatagtgatttaaaaggggaagctaaaggkgatggctcatcaacagtagcaccaattgtggagaaattaaatgaaaaatgggctcaagatcactcggatgctaaaatctcagcaggacaagctggtacaggtgctggtttccaaaaattcattgcaggagatatcgacttcgctgatgcttctagaccaattaaagatgaagagaagcaaaaattacaagataagaatatcaaatacaaagaattyaaaattgcgcaagatggtgtaacggttgctgtaaataaagaaaatgattttgtagatgaattagacaaacagcaattaaaagcaatttattctggaaaagctaaaacatggaaagatgttaatagtaaatggccagataaaaaaataaatgctgtatcaccaaactcaagtcatggtacttatgacttcttygaaaatgaagtaatgaataaagaagatattaaagcagaaaaaaatgctgatacaaatgctatcgtttcttctgtaacgaaaaacaaagagggaatcggatactttggatataacttctacgtacaaaataaagataaattaaaagaagttaaaatcaaagatgaaaatggtaaagcaacagagcctacgaaaaaaacaattcaagataactcttatgcattaagtagaccattattcatttatgtaaatgaaaaagcattgaaagataataaagtaatgtcagaatttatcaaattcgtcttagaagataaaggtaaagcagctgaagaagstggatatgtagcagcaccagagaaaacatacaaatcacaattagatgatttaaaagcatttattgataaaaatcaaaaatcagacgacaagaaatctgatgataaaaagtctgaagacaaraaataa

SEQ ID NO: 1537 - DNA, 675 bp, Staphylococcus aureus
atgatagataaaaaattaacatcaccgaaaatgacagtgcctttatttttaatcgcgctgattgtatttataggtatgttttacrgtgtagtgacaaatcaagaatggcttaaaaatatagatatgggatcattaacatggtttacagattatttcggtgagccacaacgycagtatgttaacaatttrtttaattaytatatgacgtttagtgcggaaattggagatgtcaaaggtgtcgtgttgatttcmattatcgtcacaatcatactgtttattaaacagaggcatttagcggtttggtttgtgacatatttggtttcaggtgtcatcatgaacaaattaattaaagatactgtwttacgtccaagaccatataatcatttagccgttgatacaggcttttcatttccragtggacattcyaacgccagcacattattatatttcgcyttaatgatcatwattatttcasttgctgctaagacaatracaaaagtgttgagtgcgytrgttatgggaatattatggcttagcatattattttgtcgcctttattttcatgcrcattacttttcagatgtcattggcggcacgtcactagcaatcatttgggtagcgttattcttaatggtatacccatactttattaatcatcgacgacaacgcgtttag

SEQ ID NO: 1538 - DNA, 903 bp, Staphylococcus aureus
atggcattagacaaagatatagtaggttctatagaattccttgaagtagtagggttacaaggytcaacttaccttttaaaaggaccaaacggtgaaaacgtaaagttaaaccaatcagaaatgaacgatgatgatgaattagaagtaggtgaagaatatagtttcttcatttatccaaaccgttcaggtgaattatttgcaactcaaaatatgcctgatattacgaaagataaatatgaytttgctaaagtacttaaaacggatcgcgatggggcacgtatagatgttggwttaccccgtgaagtgttagtaccatgggaagatttaccaaaagtgaaatcactatggccacaacctggwgatyatttgctagtyacattacgaattgaccgtgagaatcatatgtatggamgwttagcgagtgaatctgttgtagaaaatatgtttacacctgtacacgaygataatttaaaaaacgaagtcattgaagccaaaccwtaccgcgtattacgaattggtagcttyttattaagcgaatcaggttacaaaattttygtacatgaatcagaacgtaaagctgaaccragaytaggtgaatctgttcaagttagaattatcggkcataatgataaaggtgagttaaatggttcatttttaccacttgcacatgaacgtttagacgatgacggycaagtcatctttgatttactagttgaatatgatggtgaattaccattctgggacaaatcaagccctgaagcgattaaagaagtattcaatatgagtaaaggttcattcaaacgtgcaatcggtcacttatataaacakaagatyattaatatagaaacwggtaaaatcrctttaactaaaaaaggttggagtcgaatkgastcaaaagaataa

SEQ ID NO: 1539 - DNA, 735 bp, Staphylococcus aureus
atgagaattaaaacaccgagtccmtcktatttaaaaggcacaaatggacatgcgatattattattacattcatttacaggtacaaatcgggatgtgaagcatcttgcagctgagttaaatgaccaaggatttagttgttatgcaccgaattatccaggtcatggyttaytrttgaaagatttcatracatataatgtagatgattggtgggaagaagttgagaaagcttaccaatttttagtcaatgaaggttatgaatctatcagtgcaacgggtgtgtctttaggtggattaatgacattaaaattggcgcarcactaycckttgaaacgtatcgctgtcatgtcagcaccaaaggaaaaragtgaygatggyttaatagaacatttagtttattatagtcaacgcatgtcgratattttaaatytagatcagcaagcatcgagtgcgcaattagcagcaattgatgattatgaaggtgaaattacgaagtttcarcattttattgatgatatcatgacaaatttaaatgttrttaaaatkccagctaatatattatttggtggtaaagatgmgccatcctatgaaacaagtgcacaytttatttatgaacatttaggatcagtagacaaagaattaaatggtctgaaggattckcatcatttaatgacrcatggagaaggcagagatattttagaagaaaatrttattcgctttttcaatgctttaacataa

SEQ ID NO: 1540 - DNA, 1338 bp, Staphylococcus aureus
atgaaaagacaacaatcacaatggaagtcatcaactggatttattttagctagtgcgggttctgcaatcggtcttggtgccatgtggaaattcccatatatggcagggatytatggcggcggtgcctttctagctatgttcttaatattcaccatttttgttggrttrccattactcattatggaattcactgttgggaaaatgggacggacatatacaacacaaatatatagtaaattaactggtaaaaaatggctcaatatcattggctggaacggtaatttggcmgtgtttattttatttggcttctatagtgttatyggtggttggattgtcatttacatcggacaagtattatggcaattagttatatttcaacgcatcaatcatctccaagaaatgaattttgaagcggtaatatcaaatccttggttaacygttctagggcaaggtatattcatattcgctacgatgattattgtcatgttaggtgttgaaaarggattagaaaaggcatcgaaagttatgatgccrttgctgtttgtctttttaatcrtcattgtgattaagtctttaacattagatggygycttagaaggtgtgaaatttattttacaaccaagagtrtcagagattactgctgaygghatcttgtttgcgctaggycaatcattctttacgttatcattaggaactacaggtatgattacttatgcgagttatgcctctaaagacatgacgattaagtcatcagctatttctatcgttgttatgaatatctttgtatctgtattggcaggyctagctatatttccggckttacatagttttggctatgarccacaagaagggcctggattattatttaaagtactgccaatggtctttagtcaaatgcatctaggcacattattctatttgggattcttagtgctgttcttatttgcggctttaacgtcatctatttctttattagaattaaatgtttctaacttcacgaagaatgacaatacaaaacgtaaaaaagtcgcagtgatcggtagtatwttagtatttatcattagtattccagcaaccttatcttttggtatcttaaaagatgtaagattcggtgcgggaacgatttttgataatatggatttcatcgtttcgaatgtattgatgccattaggcgcattaggtactacgcttgtcrtaggacaattattagataaaaarttattacaacaatattttggtaaagatcgatttagattattcartggttggtattacttaattaagtatgcgatgcctgtcgttattattttagtctttatcgtgcaattatttagttaa

SEQ ID NO: 1541 - DNA, 309 bp, Staphylococcus aureus
atgtggacagttaccaaaattagagccgattatgagggatggtggttattcagtgactggccagaaaacattgttgaaaaatatcaatatcaagattttgatgacatgtttaagcactatcaacaattgattaatcaatgtaaagttcagttcgataaytatgtcacaggcaaatataatatttatgcattttataataattgtgacatgaactattgcgaagattgtgaagaggatttacaaatattttatagtttcattgttttacaaaataatgaagtatattataaactaccaataattgattaa

SEQ ID NO: 1542 - DNA, 915 bp, Staphylococcus aureus
atgattacttatgatttaattggcaatacaccattagtactgttagaacattatagtgatgataaagttaaaatttatgccaagcttgaacaatggaatcctggaggcagtgttaaagacagactcgggaaatatttagtagagawggcaattcaagaagggcgtgtgcgtgcaggtcaaactattgttgaagcgactgctggyaatacaggcatagggttagctattgcagcraatagacatcatttraaatgtaagatctttgcgccgtatggtttttcagaagaaaagattaatattatgatagcgcttggtgcagawgtttcaagracgagtcagtctgaaggtatgcatggggcacaattagctgcacgttcmtatgctgaaaaatatggtgccgtttatatgaatcaatttgaatccgaacataatccggatacatattttcatacattgggacccgaattgacttcagcattacagcawattgattattttgtggctggtattggctctggcggtacatwtacaggtaccgcacgttatttaaagcaacatcacgtgcaatgttatgccgttgagccagaagggtccgtgttaaatggagggccagctcatgcacatgacactgaaggtatcggttctgagaaatggccgatatttttagagagamgtcttgtagatgggatatttacgattaaagatcaagatgcctttcgaaatgtcaaaagtttggcwawrmatgaaggrttrttrgtaggcagttcttcaggtgcagcattacaaggtgcattgaatttaaaagcgcaattatctgaaggtacgattgttgtcgtatttccagatggtagygatcgatatatgtctaagsaaatatttaattatgaggagaatratwatgaayaagaaaactaa

SEQ ID NO: 1543 - DNA, 1143 bp, Staphylococcus aureus
atgaayaagaaaackaaattaattcayggtggrcacacaacrgacgaytatacaggtgcmgttacwacaccaatttatcaaacaagtacatatttacaagatgatattggtgatttacgtcaaggatatgaatattctcgtactgcgaatccaacaagaagttctgtagaaagcgttattrcgdcattagaaaatggcaaacatggctttgcrtttagttcaggtgttgcagcwatcagtgcagttgttatgctgttggacaaaggwgatcatattattttaaattcagatgtatacggcggtacttatcgcgcattgacaaaagtatttacacgatttggcrttgaagtggattttgtagatacaacgcatacagattcaattgtacaagcgatacgcccaacaacaaaratgttrtttattgaaacaccttctaatccattattacgtgttactgacattaaaaagtctgctgaaattgcgaaagaacacggtttgatttcagtygttgataacacatttatgacacyttattatcagaatccattagatttaggyatcgatattgtcttrcattctgcaacgaaatatttaggtggacatagtgatgtcgttgctggtttagttgcaacatcggatgacaagcttgcagaacgtttagcatttatttcaaattcaacaggtggcattttaggacctcaagatagytatttacttgtgaggggkattaaaacattaggtttacgtatggaacaaattaatcgcagygttattgaaattattaaaatgttacaagcacatccagctgtgcaacaagtgttccatccaagtattgaaagtcatttaaatcatgatgtccatatggctcaagcggatggccatacaggtgtgattgcwtttgaagtgaaaaatacagaaagtgccaaacaattgattaaagcaacatcgtattacacattagctgaaagtttaggtgcagtggaaagtttaatttcagtacctgcattgatgacacatgcatcyattccagcagatattcgagctaaagaaggtattacagacggacttgtaagaatttctgtaggtattgaagatactgaagatttagtmgatgatttaaaacaagcactagatackytataa

SEQ ID NO: 1544 - DNA, 1344 bp, Staphylococcus aureus
atgaataaaaatacatgggtcattgggtttacgctcttcgctatgttttttggcgcaggcaatctaatttttcctcctaatctcggattggatagtggtcaatttttctggcccgccattttagcgtttgttctaactgggattggtttaccattattaggtgtgattgtaggtgcacttgataaagaaggatatattggcgcattaaataaaatttcacctaaattttcaatattgttcttaatcatcatttatttractataggaccacttttygcaatacctagaactgcatctacatcttttgaaatgacaattacaccaattatacatagyaatagtagtatcgctttatttatatttacgattatctacttcatagtcgttttgtatatttgtttaaatccatctaagttaatcgatcgtattggttcattattaacaccattattattgattactattttagcgatgattattaaagsatacttagactttagcggtaatagtgctggaaagggcaatgaagcactatatcattctaatttttcaagttttgctgaaggctttacacaaggctatttaacaatggatgccatkgcagcaattgctttttcaatgatkgttgttaatgcagtaaaactaacaggyattactaaaacaaatcaaatattcaaacaaactttgactgctggtttaattgcagcmrtwgctttaattttcatatatatttcattaggttatattggtaatcatatgccagtaagtgacatgamrytaratsaattgaaatcmmawgaycgwaacattgggacatatttattaacgacaatggcttcaacaggatttggttcattcggaaartatttattgggcatcattgtggckctgssatgtctaactacagcatgygggcttattgttgcagtttctgaatatttccataraatcgtacctaaagtatcatacaaagcatttgtattagttttcattttaatgagttttattattgctaaccaaggtttaaatgctgttatctcaatgtcaattccggtattaagcattgtatacccagtagcaataactgttgtattattaattttaattgccaaattcataccgacaaaacgcattwcacaacaaattccagttattatcgtatttatattgtcgattttcagtgttattagtaagttaggttggctgaaaattaactttatwgaatcattgcctctaagagcgtrttctttagagtggttcccagtagcaattattgcaacgatattaggctatctagtcggcatatttgtaaaacaagatccaattaaatatcaacaggaataa

SEQ ID NO: 1545 - DNA, 264 bp, Staphylococcus aureus
atgacccaaataggactaactgcaataccgagcatcatagcactaaatatgattacaaaaggtgatgctggaaaccaaataactaaaaataaacttgtaaatgctaaaataaatccagtcgttaaaacgatttttgtgccgaattttttcagtaaaaatcctataacaaagtttgtagatgcatcagcaataaaatgtattgaaaatgctagagacgttattgctacagcaatggatgtwactgttggcaagaaattaatatag

SEQ ID NO: 1546 - DNA, 1026 bp, Staphylococcus aureus
atgattgagtttcgacargtwagtaarwcmtttmataaraaraagcaaamaatagatgctttgaaggacgtatcatttacggtcaatcgcaatgatatttttggtgtgattggatatagtggtgcaggaaaaagtacgttggtaagactcgtgaatcatcttgaagctgcctcgaatggacaagtgattgtagatggacatgatattacgaattatagcgataaaakgatgmgrgawattaagaaagatatcggtatgatatttcagcatttyaatttaytaaattcagctacsgtatttaaaaatgtagcwatgccrctcattttaagtaagaaaagcaaaacagaaattaagcaacgagtaacggaaatgcttgaatttgtaggattgagtgataaaaaagaccaatttcctgawgaattatctggtggkcagaagcaaagggtggctattgcaagagcgcttgttactaatccgaaaatactcctatgcgatgaagcaacaagcgcattggatccagcaacgactgcttcgatattgacgttattaaagaatgtcaatcaaacctttggcattacaattatgatgattacacatgaaatgcgcgttattaaagacatttgtaatcgtgttgctgtaatggaaaagggkmaagtggttgaaacaggaactgttaaagaggtgtttagtcatcctaaaacgacgattgctcaaaattttgtgtctacagttatacagactgagccaagtmcatcattgattcgtcgattgaatgacraacaagttggcgrttttaaagattataaaatcttcgtcgaggaaactcagrtgacacaaccgattataaatgacttgattcaaatttgtggcagagaggttaaaattttattttcatcyatgtcagaaatacaaggtaacaccgtatgttatatgtggcttcgatttaatatrgatcaacaatttgawgrcacggcaataaatcaatatttcaaagagaaaaatattcaatttgaggaggtgcattaa

SEQ ID NO: 1547 - DNA, 1887 bp, Staphylococcus aureus
atgagtgatcgtttcataaaatttaaygacgaacagttagatgccaagcaagtaatgatgttgcaagacttagctcgactcttattaaaaaatgaacaaacacaagttaaaatccaaaaattcccttactataatcctgttcaaaatgttttgattacgagttggttttggtcacatcgaccaagccatatcgaaatggctggtttaaaaacagatgttatgttagctgcttacggttatcatatgatggatgtacaaattgtaaatgaagtagtacaagataaaacttttaaacaccctaaattttatcaacaactttttaaattattagaagatatgcgcgtattaaattctattaaagttgagcgcccaagtactgctaaattaattgatcttcgcttagatacacgkrtatcatatacggaatctcaaattaaagtgtatcgtactaaaacacaatatacagatttattatttttgtatttagaacatgcatttttaagycaagatttctttgatataccatctatacattcagatttagatgatattktagtwaatatgttcttatatttacctaattttttccaaaatcaaaattctgaagataatatgtatctggctcaaagaattatgtatcaagtagatgatattttaaaagaagatatgctaaacgaatattattacttacctaaaacactatataatacattagctagtccagagtttgawgatttaaagagaactgatgcaagtcaagtcgatgggcaagatgatacttcagaagatgatgataacgaaagtgaaaaagctgactctaaatctgcagatagtgagtcaaaaggtggcgcctatttagaaatggarcttcacgaaggacaaaatagtgaaacattrggtaatgatgaagcacgtgaaggygatgctacagaygatatgactgatatgatgaccaaaaagggcaaaggwtcaaacgatacgctaaatcgtgaagaaggcgatgctgttggtcaaagccaagcatttcaamttgatggtgtgaacaamaatgtagaaataaaatggcwaattcctgaaawtgagccacaatatgttttagaatatcaagaatcgaarcaakacgtacaatatgwaatcaaakacttaattcaaattataaagaraacgattgaacgagaacaacgagatgcacgttttaatttaacaaaagggcgattacaaaaggatttaattaattggtttatcgacgatcartataaattgttttacaaaaaacaagatttaagtaaatcatttgatgcgacrtttacattgttaattgatgcgtcagcaagtatgcatgataaaatggctgaaacgaagaaaggtgtagtgttattccacgagacgttaaaagcattgaacattaaacatgaaattttatcattcagtgaggatgcctttgattcagacgakcatgyacaaccaaatatcattaatgaaattattaactatgattactcaacctttgaaaaagatggcccacgtattatggcacttgaacctcaagatgataatcgtgatggtgttgctattagagttgcaagtgaacgattaatgcgtcgaaatcaacatcaacgatttttaatcgtattttcwgacggcgaaccgtctgcatttaattatagtcaagatggtattattgatacgtatgaagctgtagaaatgtcacgtaaatttggyattgaagtatttaatgtatttttgagtcaagatccaataactgaagatgttgaacaaacaattcataatatttatggtcaatatgcyattttcgttgaaggtgttgcgcatttacctggacatctctctccattattaaaaaaattactacttaaatctttataa

SEQ ID NO: 1548 - DNA, 660 bp, Staphylococcus aureus
atgtttggttctgatttagacagtgcacagttattacaagcattrtacgaaacrytatatatggtatctattgctttatttttaggagcagtgattggtattccattaggtgtcttattggtaattactcgaaaacaaggcatatggccsaatatagtgatacatcaagttttaaatcctwtaatcaatattttaaggtcactaccatttattattttgttrattgcgattgtrccattcacaaaattagtagtaggtacttcmattggtacgactgctgccatcgtgcctttaacwgtatatgtggcaccttacattgcaagacttgttgaaaactcattattrgaagtagacgaggggattattgaagcggcgaaagcgatgggcgcttcaccactacaratcattagatattttttaattcctgaagckttaggttcrttagtattagcaattaccactgcgattattggacttattggaagtacggcgatggcaggmgctgttggcggtggtggtataggagacttagctttagtgtatggttatcaaagatttgatacgacggtcattattattaccgttattgtattagtcrttattgtccaagtgattcaaacgctagggaatgtyctagctagattcatacgtagacattra

SEQ ID NO: 1549 - DNA, 792 bp, Staphylococcus aureus
atggcactaaaacattataagaattcagattcaacagttttcaatgatgcgaaggcattattygatttaaataaaaatattttacttaaaggtccaacaggttcagggaaaacraagttggcagaaacattaagtgaagttgttgatacacccatgcatcaagtcaaytgttctgttgatttagatacagaaagcttattaggctttaaaacaattaaaacaaatgcggaaggwcaacaagaaattgtctttgtagatggtccagttattaaagctatgaaagaggggcatattttatatattgatgaaataaatatggctaaacctgaaacattrcctgtattaaatggkgtmttagattatcgtcgtcaaattacgaatccatacactggtgaagtaatcaaagctgtaccaggatttaacgttatwgcagcgataaatgaaggttatgttggtacwttgccaatgaatgaagcactaaaaaatcgctttgttgttattcacgttgaytatattgayggggacattttaaaaaatgtrattaaagagcaaagtttattacaagatgataaacaaatcgaacaaattattaagtttaaygaagatttacgtactatgtctaagcagggacaaatttctgaagaagccgctagtatmcgtgcattattagacttgtgtgatttaatcactgtaatgccagttgaacgtgcaattaaacgtacaattattgataaattggaagatgaacgtgaacaacaagcaatatataatgctgtagaactaaacttttaa

SEQ ID NO: 1550 - DNA, 120 bp, Staphylococcus aureus
ttggaagaagggcttaaaaatataaaaacttggataaatcacaatacaatcatagacacagataagttcgtcaatctgttaatgaattatgatgtgatagagttaagtgaggataaatgt

SEQ ID NO: 1551 - DNA, 756 bp, Staphylococcus aureus
atggaggttgtctacgtgacgcaaacacaaccaaaatttttaacgatttataatacgttatataaagaaattcaaataggaaaatatccgagtggccatgcattacctactgaaaaggaactttgtgcgcgctttgatgtcagtcgtatgactttgcgccaagctataaaattgttagccgaagatggcatcgtagagagtacaagagggaagggacactttgttattccacaaacaaatgcccaacacgcttcaagtatggatcaatttaagcatccacttgatcaaatattrytagmtcgygtatctatgtcatcaattaattatcgtgttgatttagaaagtgaatatacaaatcatttgtttgcaaaccatccttctgccgtcattgcaatggaacgctattatcaaaaaaaggacaaycattctaagcaagctgatgcattttgytttacctttataccgttaaatgtcattgacacatttaaagtgaatacacaaaacgaagacgacatgaagacrttcgttgagcraacgatttatagcaatgcatatcaatcagatttaaaaatgtctattaccaaagcgccccrcttcaaaaatcatagtcacgtgtttgatggtgatacacattgttggctgattattgaaacaytgtacgcacaaacrccytatccrattatgattaataagtggtatattccacaggaaatmtctgaattaacactgacacgtataagacaatcggattattaa

SEQ ID NO: 1552 - DNA, 843 bp, Staphylococcus aureus
atgaaaagattgattgggttagttatcgtagcacttgtattattagcagcgtgtggtrgtaacaatgataaaaaagtaacaattggtgtcgcrtcaaatgacactaaggcttgggagaaggttaaagaattagctaaaaaagatgatattgatgtggagattaagcacttytcmgattacaatttaccgaataaagcattaaaygatggtgatattgatatgaatgcattccaacattttgcatttttagatcartataaraaggcrcataaaggaacaaagatttcagcattragtacaacagttttrgcaccgttgggcrtttactcagataaaattaaagatgtcaaaaaggttaaagatggtgctaaarttgtcattccaaatgatgtrtcaaaccaagcacgtgcacttaaactattagaagcagctggtttaataaaactgaaaaaagatttcggattagcaggyacrgtgaaagmtataacgtcaaatccaaaacatttaaaaattactgcagtagatgcacarcaaactgcrcgtgctttatctgatgtcgatattgcagttattaataayggtgtagcaactaaagckggkaaagayccwaaaaatgatccgatwttyttrgaaaaatcarattcagatgcwgtaaagccatatattaawattgttgcagttaaygacaaagacttggataacaaaacatatgctaaaatcgtagaattgtatcattcaaaagaagctcaaaaagcgttgcaggaagatgtcaaagatggagagaaacctgttaatttatctaaagatgagattaaggcaatagaaacgtcattagcaaaataa

SEQ ID NO: 1553 - DNA, 204 bp, Staphylococcus aureus
atgttacatgaaacttggaaagaacgtacrccaatcaagaaagtagaagtcattaatacagatgcaaagaaatttacagtttctgacatgttaackgtwggcaaacaatatgatgttatcaacgaaactgaagaatattatcaaataatagataattcwggattagttggcggttactataaaacatatttcaaagaagtttaa

SEQ ID NO: 1554 - DNA, 1005 bp, Staphylococcus aureus
gtgcaaaaaaaagtaattgcagctattattgggacaagcgcgattagcgctgttgcggcaactcaagcaaatgcggctacaactcacacagtaaaaccgggtgaatcagtgtgggcaatttcaaataagtatgggatttcgattgctaaattaaagtcattaaacaatttaacatctaatctaattttcccaaaycaagtaytaaaagtatctggctcaagtaattctacgagyaatagtagccgtccatcaacraaytcaggtggcggatcatactacacagtacaagcaggcgactcattatcattaatygcatcwaaatatggtacaacttaccaaaacattatgcgacttaatggtttaaataatttctttatttatccaggtcaaaaattaaaagtatcaggtactgcwagctcaagtaaykctrcgagcaatagtagccgtccatcaacgaaytcargyggyggatcataytayacagtacaagcaggtgactcattgtcattaatygcwtcaaaatatggtacaacwtatcaaaamattatgagcttaaatggcttaaataatttctttatwtatccgggtcaaaaattgaaagtaactggtaatgcatctacgaactcaggatctrcwacaackacraatagaggttacaatacaccagtattcartcaccaaaacttatatacatggggtcaatgtacatatcatgtatttaatcgtcgtgctgaaattggtaaaggtattagyacttattggtggaatgcwaataactgggataacgcagcggcwgcagatggttacacwatygacaatagacctactgtaggttcwatcgctcaaacagatgtaggttaytatggtcatgttatgtttgtagaacgygtaaataacgatggtagtattttagtttcagaaatgaactattcagctgcaccaggtattttaacttacagaacggtaccagcttaccaagtaaataattatagatatattcactaa

SEQ ID NO: 1555 - DNA, 810 bp, Staphylococcus aureus
atgtgtggacttagaagtataacattaggtacaacaaatatagaacagacaaaacatttcatggttgacatattaggattaaattrtgaagaacttcttgaaaactcaattcgtttcggcgatgcagatataagcccaggaacaagacttcaatttatacaagttccaagtgagcaattagaagaatctcactttgtgggtattggattacgtacaccaactgactcaggtytagaggagtatgcggaaatattatcgartaaggatattccatttacaacagttaaagaattaaatggcaataaatatttcagtctcgaagataacaatggtcatattttctcaatatattcaaacgagaataattatggcgttggtttaggtatgccttctttygaragtgcggtcaatccgttacatcaagtgcaaggtttaggrccagtgattcttaaagtgaatcatgtagatattacaggtcaaattttaacaaatatattcggacttgaagtatttgcagaataccaacccttcgacaatgctgactatcatgtccaagtattcaaarttggaacgggtggtctaggtggcgaaatacatttaatgcctgtagaaacmgaaatgacaatgccggmatatggcgcagtcgatcaagttgagtttgaaacgaaagatgyagatttctttaatcaagcgaaatcgcgcttagatgaagtggaaataccatatcaaacrcttgagcaagatgatattgaatcaattagaattactgaaaacagtggattatcgtttatattcactttacaaaaataa

SEQ ID NO: 1556 - DNA, 804 bp, Staphylococcus aureus
gtgcaaaaaaaagtaattgcagctattattgggacaagcgcgattagcgctgttgcggcaactcaagcaaatgcggctacaactcacacagtaaaaccgggtgaatcagtgtgggcaatttcaaataagtatgggatttcgattgctaaattaaagtcattaaacaatttaacatctaatctaattttcccaaaccaagtactaaaagtatctggctcaagtaattctacgagtaatagtagccgtccatcaacgaactcaggtggcggatcatactacacagtacaagcaggcgactcattatcattaatcgcatcaaaatatggtacaacttatcaaaaaattatgagcttaaatggcttaaataatttctttatttatccgggtcaaaaattgaaagtaactggtaatgcatctacgaactcaggatctgcaacaactacgaatagaggttacaatacaccagtattcagtcaccaaaacttatatacatggggtcaatgtacatatcatgtatttaatcgtcgtgctgaaattggtaaaggtattagtacttattggtggaatgctaataactgggataacgcagcggcagcagatggttacactatcgacaatagacctactgtaggttctatcgctcaaacagatgtaggttattatggtcatgttatgtttgtagaacgtgtaaataacgatggtagtattttagtttcagaaatgaactattcagctgcaccaggtattttaacttacagaacggtaccagcttaccaagtaaataattatagatatattcactaa

SEQ ID NO: 1557 - DNA, 396 bp, Staphylococcus aureus
atgattaaatgtgtctgtttagtwgaagaaacagctgataaaatattrcttgttcaagtaaggaatcgcgaaaagtattatttcccrggtggtaaaatagaagaaggrgaatcacvagtacamgcgctgttaagagaagtaaaagaagaattaaatttaacattaacaatggatgaaattgaatatrtcgggacaattgtaggtcctgcatatcyacaacaggatatgttaactgagttaaatggatttcgcgcattaaccaaaatcgattgggaaaacgtaactatcaataatgaaattacggatatacgctggattgataaagataatgatgcgttgattgcgcctgctgtcaaagtttggattgaaacktatgrtggtaaacatgacaaataa

SEQ ID NO: 1558 - DNA, 1269 bp, Staphylococcus aureus
atgccagaggttaaagttccagaattagcagaatctattacagaaggtaccattgcagaatggttgaaaaacstaggggatagcgtagaaaaaggtgaagctattcttgaattagaaactgataaagttaatgtcgaagttgtatctgaagaagcaggtgtattatctgaacaacttgcaagtgaaggcgacactgtagaagttggacaagcaattgctrtcatcggcgaaggtagtggcaatgcttctaaagaaaatagtaacgacaatactccacaacaaaatgaaraaacaaataataaaaaagaagaaacaacaaataawtcggyagataaagctgaagtmaatcaarcaaatgatgacaatcagcarcgtrttaatgctacrccttctgcgcgtcgatatgctcgtgaaaatggtgtgaatcttgctgaagtaagtccgaaaacaaatgatgtkgttcgtaaagaagatattgataagaaacaacaggcacckgcatcaacacaaacaacacaacaagcayctgcaaaagaagagaaaaaatacaatcaatatcctacaaaaccagtgattcgtgaaaaaatgtcacgyagaaagaaaacagctgcyaaaaaattattagaggtatctaataatacagctatgytaacaacatttaacgaagttgacatgacaaatgttatggaattgcgtaaacgtaagaaagaacaatttatgaaagatcatgatggtactaaattaggatttatgtcattctttactaaagcttctgtagcagctttgaaaaagtatccagaagttaatgcagaaatcgayggcgacgacatgattacgaaacaatattatgatattggtgtagctgtttckacagatgatggaytattagtaccattygtaagagattgtgataaaaagaattttgcagaaatcgaagcagaaattgctaatttagcwgttaaagcacgagagaaaaaacttggcttagatgatatggttaatggttcatttacgattacaaatggcggtatttttggatcaatgatgagtacgccaattatcaatggtaatcaagctgcaatcttaggcatgcattcaattattacaagaccaattgcgattgatcaagatacaatcgaaaatcgtccaatgatgtatattgcattaagctatgatcatagaattattgacggtaaagaagcagttggattcttaaaaacaattaaagaattaattgaaaacccagaagacttattattagaatcttaa

SEQ ID NO: 1559 - DNA, 138 bp, Staphylococcus aureus
atgattaarcatacgataacaggaatgacagcaagrgaacgtgtaattaaacgtcttaaccaatttggtatgtgtaatcttaaaaatccttccattacaatttgtcctgctaaagtaccagtaatcgttgaattttga

SEQ ID NO: 1560 - DNA, 486 bp, Staphylococcus aureus
atgacaaataatgacaccatcatgttacgacattatgtcccacaagattattcgatgttagaagcttttcaattaagtgaaagtgatttgaagtttgttaaaacgccagaggaaaatattacagctgcaatgtctgataatgaaaggtatcccatcgttgtaatggatggcaggcaatgtgtggccttttttacattacatcgtggaaaaggkgtcgcaccatttagcgataaccaagatgcagtatttttcaggtcatttagtgttgatcaacgttatcgtaawagaggaataggtaaagtggtaatggaaaaattggcgtcatttatcacttcaacatttcaggatattaatgagattgtgttaacggttaatactgacaatccacatgccatggcactttatcgccaacaaggatatcaatatatgggagatagtatgttcrtcggaagacctgttcatattatggcgytaactataaaataa

SEQ ID NO: 1561 - DNA, 2799 bp, Staphylococcus aureus
atgactaacgaaagaaaagaagtttcagaggctcctgtaaacttcggtgcgaatttaggtctaatgttagatctatatgatgactttttacaagatccatcatctgtaccagaagatttacaagtcttattcagcacaattaagaatgatgactcaattgtaccagctttaaaaagtacaagtagtcaaaatagcgacggcacaattaagcgtgtcatgcgtytrattgataatattcgccaatacgggcatcttaaagccgatatttatcctgtaaatcctccraaaaggaaacatgtacctaaattagagattgaagactttgatttagatcaacagactttggaaggtatatcagcaggaattgtttcagatcactttgccgacatttatgataatgcttatgaagcaattttaagaatggaaaaacgttacaaaggaccaattgcatttgagtatacacatattaataacaataccgaacgtggttggttaaaaagaagaattgaaacgccatataaagtaacgttaaataataacgaaaaaagggcactattyaaacaattagcgtatgttgaagggtttgaaaaatatcttcataaaaacttcgttggtgcaaagcgtttttcaattgaaggggtagacgcacttgtaccgatgttacaacgtactattacgattgctgcgaaagaaggtattaaaaatatacaaataggcatggctcaccgtggacgtttaaacgttttaacgcatgtcttagaaaaaccgtacgaaatgatgatttcagaatttatgcatacagatccaatgaaattcttacctgaagatggtagcttgcagttaactgctggatggactggtgatgtgaaatatcaccttggtggcattaaaactactgattcatacggtacaatgcagcgtattgcactggctaacaatccaagtcacttggaaattgttgcacctgttgttgargggcgtacgagagcagcacaagatgatacrcarcgwgctggggctccgacgactgatcatcataaagcaatgccaattattatacayggcgatgctgcttatcctggtcaaggwattaacttcgaaacaatgaacttaggaaacttgaaaggctattctacgggtggttcattgcatattattactaacaatagaattggatttacyacagaaccaattgatgcacgttcaacaacttattctacagatgtggcyaaaggttatgatgtgccaatattccatgtcaatgcwgatgacgttgaagctactattgaagcaattgatattgcaatggaatttagaaaagagtttcataaagacgtcgttattgatttagtaggttatcgtcgtttcggacataacgaaatggatgaaccatcaattactaatccagttccttatcagaatattcgcaaacatgactctgttgaatatgtgtttggtaaaaagcttgttaatgaaggtrtcatttcagaagatgaaatgcattcatttatagaacaagtccaaaaggaactaagacaagcwcatgataaaattaataaagctgataaaatggataatccagatatggaaaarcctgcagawcttgcattrccgttacaagcagacgaacaatcatttacktttgatcayttgaaagaaataaatgatgcattgttaacatatccggatggctttaacattttgaaaaagttaaacaaagttcttgagaagcgtcatgagccgtttaataaagaagatggyttagttgattgggcacaagcagaacaacttgcatttgcgacaatyttacaagatggtacaccgattcgcttaactggtcaagatagtgaacgtggtacawtcagtcataggcatgccgtgttacatgatgagcaaacaggtgaaacatatacacctttacatcatgttcctgatcaaaaagcgacatttgatatacacaattctccgctttcagaagcagcagtagttggttttgaatacggctataatgtggaaaacaaaaaaagcttcaatatttgggaagcrcaatatggtgattttgcaaatatgtcacaaatgatttttgacaacttcttattcagttctcgctcaaaatggggagaacgttcaggattaacattattcttacctcatgcatatgagggtcaaggrcctgaacattcatcagcaagattagagmgatttttacaattagctgctgaaaataattgcacagttgtcaacttatctagttcaagtaattatttccacttattgcgtgcacaagcrgctagtttagattctgaacaaatgcgaccattggttgttatgtcaccaaaaagcttaytgagaaataaaacagttgcmaaaccaattgatgartttacttctggtggatttgagccaattttgacagaatcatatcaagcggataargttacaaaagttattttrgcaactggyaaaatgttcattgatttaaaagaagcattagctaaaaatccagacgaatcmgtrttactcgttgcgattgaaagattgtatccattcccagaggaagagattgaagcattrctagcacaattrccaaamcttgaagaagtgtcatgggtacaagaagaacctaaaaatcaaggtgcmtggttatatgtytatccatatgttaaagtrctagttgcagataaatatgatttaagttatcatggcagaattcaaagggctgctccagctgaaggcgatggagaaattcataaacttgttcaaaataaaattatagaaaatgcattaaaaaataactag

SEQ ID NO: 1562 - DNA, 2733 bp, Staphylococcus aureus
atgactaacgaaagaaaagaagtttcagaggctcctgtaaacttcggtgcgaatttaggtctaatgttagatctatatgatgactttttacaagatccatcatctgtaccagaagatttacaagtcttattcagcacaattaagcgtgtcatgcgtctaattgataatattcgccaatacgggcatcttaaagccgatatttatcctgtaaatcctccaaaaaggaaacatgtacctaaattagagattgaagactttgatttagatcaacagactttggaaggtatatcagcaggaattgtttcagatcactttgccgacatttatgataatgcttatgaagcaattttaagaatggaaaaacgttacaaaggaccaattgcatttgagtatacacatattaataacaataccgaacgtggttggttaaaaagaagaattgaaacgccatataaagtaacgttaaataataacgaaaaaagggcactattcaaacaattagcgtatgttgaagggtttgaaaaatatcttcataaaaacttcgttggtgcaaagcgtttttcaattgaaggggtagacgcacttgtaccgatgttacaacgtactattacgattgctgcgaaagaaggtattaaaaatatacaaataggcatggctcaccgtggacgtttaaacgttttaacgcatgtcttagaaaaaccgtacgaaatgatgatttcagaatttatgcatacagatccaatgaaattcttacctgaagatggtagcttgcagttaactgctggatggactggtgatgtgaaatatcaccttggtggcattaaaactactgattcatacggtacaatgcagcgtattgcactggctaacaatccaagtcacttggaaattgttgcacctgttgttgaggggcgtacgagagcagcacaagatgatacacaacgagctggggctccgacgactgatcatcataaagcaatgccaattattatacatggcgatgctgcttatcctggtcaaggaattaacttcgaaacaatgaacttaggaaacttgaaaggctattctacgggtggttcattgcatattattactaacaatagaattggatttactacagaaccaattgatgcacgttcaacaacttattctacagatgtggccaaaggttatgatgtgccaatattccatgtcaatgctgatgacgttgaagctactattgaagcaattgatattgcaatggaatttagaaaagagtttcataaagacgtcgttattgatttagtaggttatcgtcgtttcggacataacgaaatggatgaaccatcaattactaatccagttccttatcagaatattcgcaaacatgactctgttgaatatgtgtttggtaaaaagcttgttaatgaaggtgtcatttcagaagatgaaatgcattcatttatagaacaagtccaaaaggaactaagacaagctcatgataaaattaataaagctgataaaatggataatccagatatggaaaaacctgcagaacttgcattaccgttacaagcagacgaacaatcatttacgtttgatcatttgaaagaaataaatgatgcattgttaacatatccggatggctttaacattttgaaaaagttaaacaaagttcttgagaagcgtcatgagccgtttaataaagaagatggcttagttgattgggcacaagcagaacaacttgcatttgcgacaattttacaagatggtacaccgattcgcttaactggtcaagatagtgaacgtggtacattcagtcataggcatgccgtgttacatgatgagcaaacaggtgaaacatatacacctttacatcatgttcctgatcaaaaagcgacatttgatatacacaattctccgctttcagaagcagcagtagttggttttgaatacggctataatgtggaaaacaaaaaaagcttcaatatttgggaagcgcaatatggtgattttgcaaatatgtcacaaatgatttttgacaacttcttattcagttctcgctcaaaatggggagaacgttcaggattaacattattcttacctcatgcatatgagggtcaaggacctgaacattcatcagcaagattagagcgatttttacaattagctgctgaaaataattgcacagttgtcaacttatctagttcaagtaattatttccacttattgcgtgcacaagcagctagtttagattctgaacaaatgcgaccattggttgttatgtcaccaaaaagcttattgagaaataaaacagttgccaaaccaattgatgagtttacttctggtggatttgagccaattttgacagaatcatatcaagcggataaggttacaaaagttattttagcaactggtaaaatgttcattgatttaaaagaagcattagctaaaaatccagacgaatccgtgttactcgttgcgattgaaagattgtatccattcccagaggaagagattgaagcattactagcacaattgccaaaacttgaagaagtgtcatgggtacaagaagaacctaaaaatcaaggtgcatggttatatgtctatccatatgttaaagtgctagttgcagataaatatgatttaagttatcatggcagaattcaaagggctgctccagctgaaggcgatggagaaattcataaacttgttcaaaataaaattatagaaaatgcattaaaaaataactag

SEQ ID NO: 1563 - DNA, 4500 bp, Staphylococcus aureus
atgcacaatgagaaattaattaaaggcttatatgactatcgtgaggaacatgatgcgtgtggtattggtttttatgcgaatatggayaataaaaggtctcacgacatcattgataaatcgcttgaaatgttgcgacgyttagatcacaggggcggggtcggcgcagatggcatcactggtgatggcgcaggtattatgactgaaataccttttgcatttttcaaacaacatgtaacggactttgatatcccaggtgaaggtgaatatgccgtggggttatttttttccaaagaacgcattttaggttctgaacatgaagyagtttttaaaaaatattttgaaggygaagggttatcaattcttggttatcgtaatgtaccagttaataaagatgccattgctaaacatgtagcagatacgatgccagtcattcaacaagtgtttattgatattagggrcattgaagatgttgaaaagcrtttgtttttagcgagaaaacaattagagttctattcgactcagtgcgatttagaattgtattttacgagcttatcacgcaaaacaattgtatataaaggttggttacgatcagaccaaattaaaaaabtmtatacagatttatcggatgatttatatcaatcaaagctagggttagtgcattcgagatttagtacgaatacattcccgagttggaaaagggcrcatcctaaccgtatgttaatgcataatggtgagattaacacgattaaaggtaatgtraactggatgcgagcacgycaacataaattaatcgaaacattatttggygaggatcaacataaagtgtttcaaattgtcgatgaggatggtagtgactctgcyattgtagataatgcgctagagttcttatcgttagccatggagccagaaaaggcagcgatgytactcatacctgaaccttggttatayaatgaagcgaatgatgcaaatgtacgtgcrttttatgaattttatagttatttaatggarccgtgggatggtcctacaatgatttcgttctgtaacggtgacaaacttggcgcgcttacagatagaaatggattacgtccaggtcgttatacgattactaaagataactttattgtcttttcatctgaagtgggtgttgtggacgtacctgaaagtaatgttgcttttaaaggtcaattgaatcctggaaagttattgcttgttgattttaaacagaataaagtcattgaaaataatgatttraaaggtgcgattgcyggagaattaccatataaagcgtggattgataaccataaagttgaytttgattttgaaaatatacartatcaagattcgcaatggaaagatgagacgttatttaaattacaacgtcartttgcatacacgaaagaagagattcataagtatattcaggaacttgtagaaggtaagaaggatcctatcggtgcaatgggatatgatgcgccaattgcagtgttgaacgagcgaccagaatcactatttaattactttaaacagctgtttgcacaagttacgaatccaccaattgatgcgtatcgtgaaaaaatcgtaacgagtgaactttcttatttaggtggcgaaggtaacttactagcacctgacgaaacggttttagatcgtattcaattgaaaagrccggtattgaatgaatcacacwtagcagcgattgatcaggarcattttaaattaacwtatttatcaacggtatatgaagggratttggaagatgcgttagaagyattaggccgagaagcagtgratgctgtaaagcaaggcgctcaaattctagtgttagatgayagtggattagttgatrgcaatggctttgcaatgccgatgttactcgcaataagtcatgtgcatcaattacttattaaagcagatttacgtatgtctacaagtttagtcgctaaatctggtgagacacgagaagtgcatcatgttgcttgtttactcgcatatggmgcgaatgcaattgtgccatacctagcgcaacgtacagttgaacaactgacattgacagaagggttacaaggcaccgttgtcgataatgttaagacatatacggatgtattgtcvgaaggtgtyattaaagtaatggckaagatgggaatttcgacagtgcaaagttatcaaggkgcacaaatatttgaagcgattggcttgtctcatgatgtgattgatcgttattttactggrayacagtctaagttatckggtatttcgattgatcaaattgatgctgaaaataaagmacgtcaacaaagtgatgataattatcttgcatcaggtagtacattycaatggagacaacaaggtcaacatcatgcttttaatccggaatctattttcttattgcagcacgcatgtaaagaaaatgactatgcgcaatttaaagcatactctgaagcggtraacaaaaatagaacagatcacattagacatttacttgaatttaaagcatgtacaccgattgacatcgaccaagttgaaccggtaagtgacattgtcaaacgytttaatacaggggcgatgagttatggatcgatttcagcggaagcacatgaaacgttagcacaagccatgaaccaattaggtggaaagagtaatagtggtgaaggtggcgaagatgcaaaacgttatgaagtacaagttgatggaagcaacaaagtaagtgcgattaaacaagttgcttctggrcgttttggtgtaactagtgattatttacaacatgccaaagaaattcaaattaaagttgcgcaaggtgcaaagcctggtgaaggtggtcaattacctggtactaaggtatatccgtggattgcraagacaagagggtcaacgccaggtatcggtctgatttcaccaccgccacatcatgatatttattcaatagaagatttagcgcaactgatacatgatttraaaaatgcgaataaagatgcagatatcgcggtaaaattagtttcgaaaacaggtgttggtaccattgcatctggggtggcraaagcrtttgcagataaaattgtcatcagtggttacgatggtggtacaggggcttcaccyaaaacgagtatwcagcatgccggtgttccttgggagattggtttagcagaaacacatcaaacattaaaactaaaygacttaagaagtcgtgttaagttagaaacagacggtaagttattaactggtaaagatgtagcgtacgcatgtgcgcttggagcggaagaatttggatttgcaactgcaccattagtggtgttgggctgtattatgatgcgtgtatgccataaagatacatgtccagtaggagttgcaactcaaaacaaagatttacgtgctttatatagaggtaaagcacatcatgttgttaattttatgcattttattgcacaagaattaagagaaattttagcatctttaggtttgaaacgtgtagaagacttagttggaagaactgatttattacaacgatcatcaacattaaaagygaatagcaaagyggctagtattgatgttgaaaaactgttatgtcctttcgatgggccaaacacaaaagaaattcaacaaaatcataatcttgagcatggatttgatttaacaaatttatatgargtaacgaagccrtatattgctgaaggrcgtcgctatacaggtagctttacagtaaataatgaacaacgtgatgtaggrgttattacaggtagtgagatttcgaaacaatatggagaagcaggacttcctgaaaatacaattaatgtttatacgaatggtcatgctggtcaaagtcttgcagcatatgcaccgaaaggcttaatgattcatcatactggagatgcgaatgactatgttggtaaaggattatctggtggtacggtcattgtcaaagcaccttttgaagaacgacaaaatgaaattattgctggtaacgtctcattctatggtgcgacargtggtaaggcatttattaacggtagtgcaggagaaagattctgtattagaaatagtggtgtagatgttgtcgttgaaggtatcggygaccatggattagagtayatgactggtggacatgtcattaatttaggtgatgtaggtaagaacttcggtcaaggtatgagtggtggtattgcttacgttatcccgtctgatgtagaagcttttgttgaaaataatcaactagatacgctttcgtttacaaagattaaacaccaagaagaaaaagcattcattaagcaaatgctggaagaacatgtgtcacayacgaatagtacgagagcgattcatgtgttaaaacaytttgatcgcattgaagatgtcgtcgttaaagttattcctaaagattatcaattaatgatgcaaaaaattcatttgcacaaatcattacatgacaatgaagatgaagcgatgttagctgcattttacgatgacagtaaaacaatcgaygctaaacataaaccagccgttgtgtattaa

SEQ ID NO: 1564 - DNA, 1356 bp, Staphylococcus aureus
atgacaaaacgtaaattgcgcaataactggattattgttaccacgatgattacgtttgtcacgatatttttgttttgtttaattattatytttttcttgaaagatacactgcataatagtgagcttgatgatgcagaamgaagctcaagcgatattaataatttatttcattctaagcctgttaaagatatatctgcattagacttgaatgcatctttaggtaattttcaagagatwattatttatgatgagcataataataaattatttgagacatcgaatgataacacagtgagagttgaaccwggttatgaacaccgktattttgaccgcgtaataaaaaaacgytataaaggcattgawtatttaattattaaagaaccaatyacaacgcaagatttcaaagggtatagyttgttaattcattcactagaaaattatgataacatcgtaaaatcattgtatatyattgcgctsgcatttggagtgattgcaacaattataactgccacaatyagttatgtattttcaacwcaaattactaaaccgcttgtcagtttatcaaataaaatgattgagatycgacgagatggttttcaaaataaattgcaattaaatacaaattatgaagaaatagataatttagcaaatacgtttaatgagatgatgagccaaattgaagaatcatttaatcaacaaagacaatttgttgaagatgcrtcacatgaattacgaacaccattacaaattattcaaggtcatttaaatttgattcagcgatggggaaaaaaagacccagcagtattagaagaatcgttaaatatttctattgaagaaatgaatcgtatcataaaattagtcgaagaattacttgaattgactaaaggagatgtaaatgacatttcttctgaagcrcagaccgtgcatattaatgatgaaattcgctcgcgaatacactcattaaaacaattgcatcctgattatcaatttgatacggatctgacatctaaaaatctagaaattaaaatgaaacctcatcaattygaacaattatttttaatctttattgataatgcaatyaaatatgatgtgaagaataagaaaattaaagttaagacaaggttaaaaaataagcaaaaaataattgaaattacagatcatggaattggtattccagaggaagatcaagatttcatttttgatcgcttttatcgagtggataaatctcgttcaagaagtcaaggyggtaatggactcggattatctattgckcaaaaaatcattcaattaaacggwggatcgattaaaattaaaagtgarattaayaaaggaacaacgtttaaaatcatattttaa

SEQ ID NO: 1565 - DNA, 297 bp, Staphylococcus aureus
atgactgcgcttaaaattaatatacctgacgtttcagctgaaatagcatttaatctttctgaaattttggctgcagctatcacgagcgataatgttgatgttaataaaaatgctgatgcaatcgttgttttcatatcaaaccaacgtcgaataaacatgactggaattaattttgaaaygataaatgcaacgattaaaatcggtatgataattagtaatttcggttctttaattaatgaaggtatgtttaaatctacaccaaccattatraagaaaataggaataaaraacccrtaa

SEQ ID NO: 1566 - DNA, 1464 bp, Staphylococcus aureus
atgggtgaatttaaaggatttatgaagtatgacaaacagtacttaggtgaattatcactggtagaccgtttgaagcatcataaagcatatcaacaacgatttactaaagaagatgcctctatccaaggtgcrcgatgtatggattgtggaacgccgttttgtcaaaccggacaacagtatggtagggaaacaataggttgtccaattggaaactacattcctgaatggaacgacttwgtgtatcatcaagattttaaaactgcttatgaacgcttaagcgaaacaaataactttcctgactttacagggcgtgtatgtcctgcaccatgcgaaagtgcttgtgtgatgaagattaatagagaatcgattgcgattaaaggtattgaacgcacaattattgatgaagcttttgaaaatggttgggtagcgccgaaagttccgagtcgccgtagagatgaaaaagtggcaatcgttggaagcggtccrgcaggattarctgctgctgaagaacttaatctactrggatatcaagtractatttatgaacgtgctagagaatcaggcggtttattaatgtatggtatwccdaatatgaarcttgataaagatgtggttcgacgtcgtattaagttaatggaagaagcgggcattactttcrttaatggtgttgaagtmggygttgatattgataaagcaacgttagaatctgagtatgatgccattatattatgtactggtgcacaaaaaggtagagatttacctttagaaggacgcatgggtgatggtatacatttcgctatggattatttaactgaacaaacgcarytgttaaatggagaaattgatgatatwacaataactgcaaaagataagaatgtcattatcattggtgctggtgatacaggggcagactgtgtagcgacagcattaagagaaaattgtaartcgattgttcaatttaataaatatacgaaattgccagaagcaattacrtttacagaaaatgcatcatggcctttagcaatgccggtgtttaaaatggactatgcgcaccaagagtacgaagctaagtttggtaaggaaccacgtgcatatggtgttcaaacaatgcgttacgatgttgacgataaaggacayatacgtggtttgtatactcaaattttagagcaaggcgaaaatggtatggtcatgaaagaaggacctgaaagattttggcctgctgaccttgtattattatcaatcggcttcgaaggtacagaaccaacagtaccgaatgcttttaacattaaaacggatagaaatcgaatcgtggckgatgatacaaactatcaaactaataatgaaaargtatttgctgctggagatgctagacgtggtcaaagtttagttgtatgggcrattaaagaaggtagaggcgtagcgaaagcagtagatcagtatttagckagtaaagtttgtgtataa

SEQ ID NO: 1567 - DNA, 660 bp, Staphylococcus aureus
atgacgcaaattttaatagtagaagatgaacaaaacttagcaagatttcttgaattggaactcacacatgaaaattacaatgtggacacagagtatgatggacaagacggtttagataaagcgcttagccattactatgatttaatcatattagatttaatgttgccgtcaattaatggcttagaaatttgtcgcaaaattagacaacaacaatctacacctatcattataattacagcgaaaagtgatacgtatgacaaagttgctgggcttgattacggtgcagacgattatatagttaagccrtttgatattgaagaacttttagcaagaatwcgtgcrattttacgtcgtcagccacaaaargatattatcgatgtcaayggwaykacwwttrawrwgaaygcttttaaagtgacggtaaatggcgcagaaattgaattaacaaaaacrgagtatgatttactatatcttctwgctgaaaataaaaaccatgttatgcaacgggaacaaattttaaatcatgtatggggttataatagtgaagtagaaacaaatgtcgtagatgtttatataagatatttacgaaacaarttaaaaccatacgatcgtgacaaaatgattgaaacagttcgtggcgttgggtatgtgatacgatga

SEQ ID NO: 1568 - DNA, 1428 bp, Staphylococcus aureus
atggctgtaaaaagagaagatgtaaaagccatcgtwascgcwattgggggaaargawaatctwgaagctgcaacrcattgtgtaacamgattrcgtttagtrctkaargatgaaagyaaagttgataargamgcrttaagtaataaygckttrgtyaargggcagttyaaagcagaccatcaatatcaaattgtcattggtccaggaacagtcgatgaagtgtataagcagtttattgatgaaacaggtgctcaagaagcttckaaagatgaagcgaaamaagcagctgcrmaaaaagggaatccagtacaacgtttgatyaaattgttrggggatatttttataccaatattacctgcgattgtgacagctggtttgttaatgggratcaataatttacttacaatgaaaggwttatttggtccraaagmactyattgwgatgtatccrcaaatwgctgatatttcaaayatsatwaaygtsatwgcraryacggcatttattttcttaccagcattaattggttggagtagtatgcgtgtatttggtggtagtccgattctaggywtagtcttaggtttgattttaatgcayccgcaattagtatctcagtatgatttggcaaaaggkaatattccgacgtggaayttatttggcttagagattaagcagttgaattaccaaggtcaagtgttgccwgttttaattgcagcttaygttctagctaaaattgaaaaaggattaaataaagtygttcacgattcgataaaaatgttggtcgttggacccgtagcgcttttagttactggatttttagcatttattatcattggaccagttgcrttattgattggtacaggtattacatctggtgttacatttatattccaacatgcwggwtggytwggyggmgcaatwtatggwttgytatatgcaccrcttgtaattacwggmytrcaycatatgtttttagcagtagatttccaattratgggtagcagyttaggyggtacrtayttatggccaatygttgcratytcmaatatttgtcarggytcwgcagcatttggwgcatggtttgtctataaacgwcgtaaaatggttaaagaagaaggyttrgcattaacatcttgtatttctgstatgttaggtgttackgarccagcyatgttyggtgtgaacttacctytraaatatccatttatcgcygcratatcaacrtcttgtgtattrggggcaatcgttggtatgaataaygtacttggaaaagttggtgttggtggygtrccrgcattcatttcaattcaaaaagaattttggccwgtatatctyrttgyracagswattgcwattgytgtaccatgtmtaytaacvattgtgatgtctmattttagtaaacaaaaagcraaagwaattgktgaagattaa

SEQ ID NO: 1569 - DNA, 615 bp, Staphylococcus aureus
atgagtcaatggaaacgtatctctttgctcatcgtttttrcattggtttttggaattatcgcgtttttccacgaatcaagactwgggaaatggattgataatgaagtttatgartttrtatattcatcagagagcttyatwacgacatctatcatgcttggggctactaaagtaggtgaagtctgggcaatgttatgtatttcattacttcttgtggcatatctcatgttaaagcgccacaaaattgaagcattattttttgcattaacaatggcaytatctggaattttgaatccagcattaaaaaatatattcgatagagaaagacctacattgctgcgtttaattgatataacaggatttagttttcctagcggtcatgctatgggatcaactgcatattttggaagtrgtatctatytattaaatcgattaaatcaaggtaattcaaaaggtattcttatagggttatgtgcagctatgattttattgatttccatatcacgtgtatatctaggtgtacattatccaacagatattattgccggcattattggtggmktattttgcattattttatcaacgttattacttagaaataaattaatmaattaa

SEQ ID NO: 1570 - DNA, 105 bp, Staphylococcus aureus
gtgttcggtttgattgacgtctgcaatggaaatgcttttaatcgcttgaaaacwataggtaagacaatasaagtagctacaaagccatatattactgttaattga

SEQ ID NO: 1571 - DNA, 1641 bp, Staphylococcus aureus
gtgtygaaagaaatagattggagaaartcmgtwgtatatcaaatwtatcctaagtcrtttaatgatacgacrggraatggtataggwgatatcaayggwattatagaaaaattrgattatatcaarttrttrggtgttgattatatttggttaacaccagtgtatgaatcrccdatgaatgataatggytatgatatmagcaattatttagaaatmaatgargmcttyggwacgatggatgattttgaaargttaatyaawgttgckcatsaaaaagrywtkaaagtgatgttagatattgthatyaatcatacrtcgacggagcatgaatggtttaaagmrgcycgtaaatctaaagayaayccwtatagagattattactttttyarakcatctgaagaygggcckccaacaaattggcattcyaaattcggwggtaatgcatggaagtwtgattctgagacagatgaatattatttacatttatttgatgtcagtcaagctgatttaaattgggataatccggaagtacgtcaatcgttatatcgcatwgtcaatcattggatagacttcggcgttgatggttttcgatttgatgtcattaacttaatttctaaaggtgaatttaaggactctgacaaaataggtaaagaattttatacggatggtcctagagtgcatgagtttctgcatgaattaaatcgtcaaacgtttggtaacactgacatgatgactrtaggagaaatgtcttcgacgacgattgaaaattgtattaagtatacacarccagaacgccaagaattgaatagtgtttttaattttcatcatctaaaggttgattatgttgatggtgaaaagtggacaaatgcgaagcttgatttycataagttaaagraaattctgatgcaatggcaacgaggtatttatgacggtggcggatggaacgcgattttctggtgtaatcatgatcagccacgggtagtgtctagatttggtgatgatacgtcggaagagatgaggatacaaagtgctaaaatgttagctatcgcactgcatatgttgcaagggacgccatatatttaccaaggtgaagaaattggtatgacggacccacattttacatcaatagcacaatatcgygatgttgaatcgattaatgcctaccatcagttgytaagtgaagggcatgctgaagcggatgtrttarcgattttaggacagaagtcacgagayaattcgagaacgcctatgcaatggagtgatgatgttaatgctggatttacagctggtaagccttggattgatatttcggaaaattatcatcaggtcaacgttagacaagcacttcagaataaagaktctattttctatacgtatcaaaaattaatacaattaagacatacgcatgatattattacgtatggagacattgtgccacgttttatggatcatgatcatttatttgtttatgaacgtcattataagaatcaacaatggctagtaattgcgaatttctcagcatcggctgttgatttgccagaaggattggckwgmgaaggtygtgttgtgattcaaacwggyacagtggaaaataatacgataagcgggtttggtgcaattgtaatcgaaacaaacgcgtaa

SEQ ID NO: 1572 - DNA, 1071 bp, Staphylococcus aureus
atgacgaaaatcgcatttaccggagggggaacagttggacacgtatcagtaaatttaagtttaattccaactgcattatcacaaggttatgaagygctttatattggttctaaaaatggtattgaaagagaaatgattgaatcacaactaccagaaattaagtattatcctatttcgagtggtaaattaagaagatatatttctttagaaaatgccaaagaygtatttaaagtattraaaggtattcttgatgctcgtaaagttttgaaaaaagaaaaacctgatctattattttcaaaaggtggatttgtatctgtgccwgttgttattgcagccaaatcattaaatataccaactattattcatgaatctgacttaacaccaggattagcgaataagatagcacttaaatttgccaagaaaatatatacaacatttgaagaaacgctaaactacytacctaaagagaaagctgattttattggagcaacaattcgagaagatttaaaaaatggtaatgcacataatggttatcaattaacaggctttaatgaaaataaaaaagtkttactygttatgggtggaagcttaggaagtaaaaaattaaatagcattattcgcgaaaacttagatgcattattacaacaatatcaagtgatacatttaactggtaaaggattaaaagatgctcaagttaaaaaatcaggatatatacaatatgaatttgttaaagaggatttaacagatttattagcaattacggayacagtaataagtagagcwggrtcaaatgcgatwtatgagttcttaacattacgtataccaatgttattagtaccattaggtttagatcaatcccgaggcgaccaaattgacaatgcaaatcattttgctgataaaggwtatgctaaarcgattgatgaagaacaattracagcacaaattttattacaagarctaaatraaatggaacaggaaagaactcgaattatcaataatatgaaatcgtatgaacaaagttatacgaaagaagctttatttgataagatgattaaagaygcattgaattaa

SEQ ID NO: 1573 - DNA, 690 bp, Staphylococcus aureus
ttgaaagaagatatattaaacgggcagattcaatatggtgaacaaattccgtctgaacatgatttggtgcaattgtaccagtcatctcgagagaccgtgcgtaaggcattagatttgttggcattagacggcatgattcaaaagattcatggtaaagggtcacttgtcatttatcargaggttacagagtttccattttctgaactkgttagttttaaagaaatgcaagaagaaatgggygtcgcatatttaactgaagttgttgtgaatgaggttgttgaagcgcatgaagtkccagaagttcaacatgctttaaacatcaattctagtgaatcrctcattcatattgttagaactcgtcggcttaaccaacatgtgaagattgttgatgaagattattttctaaagtcgattgtttcagayataggtaatgatgttgcgagtgattctatttatgattatttggaaaaggtattaaatcttaatattagttattcaagtaagtctattacttttgaaccgtttgatgaacaagcatatcaattgtttggtgatgtatcrgtggcttattcagcaacagttcgaagtattgtgtatttagaaaatacaatgccgtttcaatataatatttcaaaacatcttgcaaatgaatttaaatttaaygacttctcaagacgtcgtayaaagtaa

SEQ ID NO: 1574 - DNA, 510 bp, Staphylococcus aureus
atgatccgtctaggtaaaatgtcagatttagatcaaatcttaaatctagtagaagaagcaaaagaattaatgaaagaacacgacaacgagcaatgggacgatcagtacccwcttttagaacattttgaagaagatattgctaaagattatttgtacgtattagaggaaaatgacaaaatttatggctttattgttgtcgaccaagaccaagcagaatggtatgatgacattgactggccagtaaatagagaaggcgcytttgttattcatcgattaactggttcgaaagaatataaaggagctgctacagaattattcaattatgttattgatktagttaaagcacgtggtgcagaagttattttaacggacacctttgcgttaaacaaacctgcacaaggtttatttgcsaaatttggatttcataaggtcggtgaacaattaatggaatatccgccatatgataaaggtgaaccattttatgcrtattataaaaatttaaaagaatag

SEQ ID NO: 1575 - DNA, 525 bp, Staphylococcus aureus
atgcaaatatatttaagtactttaacagagttagattatgataaatctttaaatagtattgaagaaagttttgatgataatcctgaaacgagttggcaagcacktgcgaaagtaaaacatttaagaaaatctccttgctataattttgaattagaagtaatwgcgaaaaatgaaaataacgatgtcgttggacacgttttattaattgaagtagaaatkaatagtgatgataagacgtattatggtttggcgattgcytctttatcagtymaycctgaattrcgtggacaaaaattaggtcgtggcttggttcaagcagtagaagagcgtgcmaaagcrcaagagtatagtacggttgttgtagaccattgttttgactactttgaaaagttgggttatcaaaatgctgctgagcatgacattaaattagaatytggtgatgcaccgttacttgtaaaatatttatgggataatttgacggatgcaccacacggaatcgtaaaatttccagaacatttttattaa

SEQ ID NO: 1576 - DNA, 1491 bp, Staphylococcus aureus
atggatgataagcaacacacawcttcatccgatgatgaacgcgctgaaawtgcaacaagcaatcaagaccaasaaactaattcatcgaaacgcgttcacttaaaacgttggcaattcatatcaatwttaattggyacaaycmtaataacagctgtcatcacagttgttgcatatatttttataaatcaaaaaataagtggtttaaacaaaactgatcaakcaaacttaaataaaattgaaaatgtgtataaaatcttaaatagtgattattayaaaaaacagractctgacaagttragtaaagctgcaattgatggyatggtcaaagaattaaaagatccttattctgaatatttaacaaaagaacaaackaaatcctttaatgaaggtgtttcaggtgattttgtaggtattggtgcagaaatgcaaaagaaaaatgatcaaattatggttactagycctatgaagggwtctccagcagaacgtgctggcatycgtcctaaagatgtcattactaaagtaaatggaaaatcaattaaaggwaaagcattagaygaagttgtcaaagaygttcgyggtaaagaaaacactgaagtmactttaactgttcaamgaggyagtgaagaaaaagacgttaagattaaacgtgaaaaaattcatgttaaaagygttgaktataagaaaaaaggtaargttggagttattactattaataaattccagaatgatacatcaggtgaattgaaagatgcagttctwaaagctcacaaagatggtttgaaaaagattgttttagatttaagaaataatccwggtggactactagatgaagctgttaaaatggcaaatatttttatcgataaaggaaaaactgttgttaaactagaaaaaggtaaagatactgaagcaattcaaacttctaatgaykcgttaaaagaagcgaaagacatggatatatccatcttagtgaatgaaggttcagctagygcttctgaagtgtttactggtgcgctaaargactataataaagctaaagtttatgggtcaaaaacattcggyaaaggtgtcgtacaaactacaagagagtttaargatggttcrttgttaaaatatactgaaatgaaatggttaacgccagatggtcattatattcacggtaarggcattaaaccagacgttactattgacacacctaaatatcaatctttaaatgtcattcctaatacgaaaacatttaaagttggagacgatgataaaaatattaaaactattaaaattggtttrtcagctttaggttataaagttgataatgaawcaacgcaatttgatmaagctttagaaaatcwagttaaagctttccaacaagcgaataaactygaggtaactggtgaatttaataaagaaacgaataataaatttactgagttattagttgaaaaagctaataaacatgatgatgttctcgataarttgattaatattttaaaataa

SEQ ID NO: 1577 - DNA, 816 bp, Staphylococcus aureus
atgacacaggaaatagmaaaatataatgttcacacaaaagcacacaaacgaaaattgattaaaagatggcttattgcaattgtygtcttagctattatcatctgggcatttgcaggtgtaccaagtttagaacttaaaagtaaatcattagaaatcttaaaatccatattcagcggattattccatcctgayatcagctatatctatataccagatggcgaagacttattacgtggtttacttgaaacctttgcgatagccgttgtaggtactttcatcgccgcaattatctgtattccattagcatttytaggtgcaaataatatggtaaagytacgcccrgtttcaggtgttagcaaatttattttaagtgttatacgtgtcttcccagaaattgtaatggcacttatatttatcaaagctgttggcccaggttcattttcaggtgtattagctttaggtatccattcygtaggtatgcttgggaaacttttagctgaagatattgaargtctagatttcagtgctrtagaatcattaaaggccagtggtgcgaataagattaaaacactcgtatttgcagtcataccacaaattatgcctgcctttctatcwctcatactttatcgctttgaactaaacttacgttcagcttctatactggggctaattggggctggtggtatcgggacaccactcatatttgccattcaaacacgttcttgggaccgtgtaggtattatattaatcggtttagtactaatggtcgcaattgtmgatttaatttccggttcaatccgaaaacgtattstttaa

SEQ ID NO: 1578 - DNA, 1698 bp, Staphylococcus aureus
ttgaattatcaagccttatatcgtatgtacagaccccaaagtttcgaggatgtcgtcggacaagaacatgtcacgaagacattgcgcaatgcgatttckaaagaaaaacagtcgcatgcwtatatttttagtggtccgagaggyacggggaaaacgagtattgccaaagtgtttgctaaagcaatcaactgtytaaatagcactgatggagaaccttgtaatgaatgtcatatttgtaaaggcattacgcaggggactaattcagatgtgatagaaattgatgctgctagtaataatggcgttgatgaaataagaaatattagagacaaagttaaatatgcaccaagtgaatygaaatataaagtttatattatagatgaggtgcacatgctaacaacaggtgcttttaatgcccttttaaagacgttagaagaacctccagcacacgctatttttatattggcaacgacagaaccacataaaatccctccaacaatcatttctagggcacaacgttttgattttaaagcaattagcctaratcaaattgttgaacgtttaaaatttgtagcagatgcacaacaaattgaatgtgaagatgaagccttggcatttatcgctaaagcgtctgaagggggtatgcgtgatgcattaagtattatggatcaggctattgcwttyggygatggyacrttracattrcaagatgcsytraatgtyacrggtagcgtwcatgatgaagcgttggatcacttgtttgatgatattgtacaaggtgacgtacaagcatcttttaaaaaataccatcagtttataacagarggtaaagaagtgaatcgcctaataaatgatatgatttattttgtcagagatacgattatgaataaaacatctgagaaagatactgagtatcgagcactgatgaacttagaattagatatgttatatcaaatgattgatcttattaatgatacattagtgtcgattcgttttagtgtgaatcaaaacgttcattttgaagtrttgttagtaaaattagctgagcagattaagggtcaaccacaagtgattgcgaatgtagctgaaccagcacaaattgcttcatcgccaaacacagatgtattgttgcaacgtatggaacagttagagcaagaaytaaaaacactaaaagcacaaggagtgagtgtygctcctrytcaaaaatcttcgaaaaagcctgcgagaggyatacaaaaatctaaaaatgcattttcaatgcaacaaattgcaaaagtgctagataaagcgaataaggcagatatcaaattgttgaaagatcattggcaagaagtgattgaycatgccaaaaayaatgataaaaaatcactcgttagtttattgcaaaattcggaacctgtggcggcaagtgaagatcacgtacttgtgaaatttgaggaagagatccattgtgaaatcgtcaataaagacgacgagaaacgtagtagtatagaaagtgttgtatgtaatatcgttaataaaaacgttaaagttgttggtgtaccatcagatcaatggcaaagagttcgaacggartatttacaaaatcgtaaaaacgaaggcgatgatatgccaaagcaacaagcacaacaaacagatattgctcaaaaagcaaaagatcttttcggtgaagaaactgtacatgtgatagatgaagagtga

SEQ ID NO: 1579 - DNA, 222 bp, Staphylococcus aureus
atgaaaaactattcgttttatcaatttgtcatgacagtkcgtggtcgacacgacgataaaggtcgtctagcagaagagatatttgacgatcttgctttcccaaaacacgatgatgattttaacatactgtctgattatattgagacacatggtgatttcacattgccaatgtctgtatttgatgatytatatgaagaatatacggaatggctaaaattttaa

SEQ ID NO: 1580 - DNA, 318 bp, Staphylococcus aureus
atgcgcggtggcggaaacatgcaacaaatgatgaaacaaatgcaaaaaatgcaaaagaaaatggctcaagaacaagaaaaacttaaagaagagcgtattgtaggaacagctggcggtggcatggttgcagttactgtaactggtcataaagaagttgtcgacgttgaaatcaaagaagaagctgtagacccagaygatattgaaatgctacaagacttagtgttagcagctactaatgaagcgatgaataaagctgatgagcttactcaagaacgtttaggtaaacatactcaaggcttaaacatccctggaatgtga

SEQ ID NO: 1581 - DNA, 501 bp, Staphylococcus aureus
atgtttaaaaaattattcggaaaaggcaaagaagttcagaaagatatcgcaatttatgcaccattaactggagaatwcgtgaaaattgaagatattccagatcctgtattcgcacaaaaaatgatgggcgaaggktttggtattaatccaactgaaggagaagttgtgtctccaattgcaggacgtgttgacaatgtctttccaactaagcatgcrattggkttaaaagcagataacggmttagaattattagttcatatcggtttagacacagttcaattagacggtgaaggatttgaagtgttagtgtctagtggtgaygaagttaacgtcggagatccattagtaagattcaaccttgaatwtattaataataaygctaaatctgtwatttcaccaattataattactaacactgatcaagcrgcttcwattaatatttatgatgaaaatgctgtgattaaaggtgaaacwaaagtgattgatgtgacaatgaactaa

SEQ ID NO: 1582 - DNA, 195 bp, Staphylococcus aureus
atgacaagcgtgaaaacagcaacaagtaatattataatcacactactaacaatggatawatkgttatctaawatctcccaaaatagccagttcaaaatattaaatgcgattaaaagtacaagcgctatgggtatccaaaacagcacagcacttaacctcatcacttttttagcgtgtggtgacataaaattataa

SEQ ID NO: 1583 - DNA, 597 bp, Staphylococcus aureus
atgcattatccagaacctatatcaaarcttattratagctttatgaaattgccaggcattggtccaaagacagcccaacgtctggcttttcataccttagatatgaaagaagacgatgttgttcagtttgccaaagcattagtagatgttaaragagaattaacatattgtagcgtatgtggtcacattactgaaaatgatccatgttatatttgtgaagataarcaaagagatcgttcagttatttgtgttgtggaagatgacaaagatgtcatagctatggaaaaaatgagagaatacaaaggtttatatcacgttttacatgggtctatttcrcctatggatggmattggaccagaagatattaatattccttcattgattgaacgcttgaaaarcgatgaagttagcgaattaatcttagctatgaacccgaacttagagggggaatctacagccatgtatatttctagattagttaagcctataggtatcaaagtgacgagattagcacaagggttatckgtaggtggcgatttagagtatgctgacgaagtaacattatctaaagcaatcrcaggtagaacagaaatgtaa

SEQ ID NO: 1584 - DNA, 429 bp, Staphylococcus aureus
atgcttaaaaaagataaaagtgaactaacagayatagaatatattgttacacaagaaaayggcactgaaccaccatttatgaatgaatattggaatcattttgctaaaggratttatgtagataaratttctggtaaacctttatttacatctgaagaaaagtttcattctgartgyggatggcctagcttttcyaaagcgcttgatgacgatgaaattatagaattagtcgacaaatcatttggtatgktragaactgaagtgcgttcagaagaatcaaatagtcatttaggacaygtctttaatgatggasctaaagaaagtggcggcttaagatactgtatcaattccgstrcaattcawytyattccatatraarartkagaagaattgggttatggcgatttaatatcacattttgataagtag

SEQ ID NO: 1585 - DNA, 93 bp, Staphylococcus aureus
atgttaccgtacaaacgcagaccaagcgttaatgttgaagtgaactcttcraaaacattaataattgccaatggccaaaacggctgtacataa

SEQ ID NO: 1586 - DNA, 1338 bp, Staphylococcus aureus
atgaagcaacctattttaaataaattagaaagtttaaatcaagaagaagcgatttctttgcatgttccgggtcataaaaatatgactatcggtcatttatctcaattatcaatgacaatggataaaactgaaatacctggattagatgatttacatcatcctgaagaagtcattttgraaagtatgaagcaggtggagaaacattcagattatgatgsttatttcttagtgaatggcaccacttcrggaatattatctgtcatccagtctttttcacagaaaaaaggcgatatcttaatggcaagaaatgtacataaatctgtrttacatgcgctcgatattagccaacaagaagggcattttattgaaacgcatcaaagtccgttaacgaatcattataataaagttaatttaagccgtttgaataatgacggtcacaaacttgytgtgttgacttatcctaactattacggtgaaacatttaatgtagaagaggttatcaaatctttgcaccaattaaatattcctgtactcattgacgaagcacacggcgcgcactttggattgcaaggatttccagattctacattaaattatcaagctgactatgttgttcaatcttttcataaaacgttaccagctttaacgatgggctcggtactttatattcataaaaatgcaccttatagagaaamtattatagaatatctaagctacttccaaacatctagtccttcrtatttgattatggctagtttagagtcagctgccsagttctataaaacatatgatagtaccktgttttttgmtaagagagcgcaattaatcgaatgtttggagaakaarggttttgaaatgcttcaagttgatgatccgttgaagytgytgataaaatatgaaggytttacaggtcatgatattcaaaattggtttatgaatgcacatatctatttagaattagcggacgactatcaagyattagcgrtattgccgttatggcatcatgatgatacgtatttatttgattygcttttacgtaaaattgaagatatgattttaccgaaaaaatcagtttctaaagttaaacaaacacaacttttaacaactgaaggtaactataaaccaaaacgctttgaatatgttacttggtgtgatttgaaaaaggcaaaaggtaaagttytggcgcgacatattgtcccgtatccgccagggattcctattattttcaaaggagaaacaataactgaaaatatgatagaattrgtaaatgaatatctggaaactggaatgatagttgaaggaattaaaaataataaaattttagttgaggatgaataa

SEQ ID NO: 1587 - DNA, 534 bp, Staphylococcus aureus
atgacaaaagaatatgcaacattagcaggaggatgtttctggtgcatggttaaaccatttacatcatatccaggcatcaagtcagtcgtatctggttatagtggcggtcatgytgayaacccwacttatgaacaggtatgtacgaatmaaaccggccatgtcgaagcagtacaaattacgtttgatccagaggttacttcctttgaaaatatattagacatatatttcaaaacatttgacccaacygatgatcaagggcaatttttcgatagaggcgaaagctatcaaccagtcattttctatcatgatrarcatcagaaaaaggctgctgagtttaaaaagcaacaattaaatgaacaaggtattttcaagaaaccagtgattacacctattaaaccatataaaaatttctatccagctgaagactaccatcaagattattayaaaaagaacccggtacattattaccaatatcaacgtggttcaggtagaaaagcgtttatagaatcacattgggggaatcaaaatgcttaa

SEQ ID NO: 1588 - DNA, 186 bp, Staphylococcus aureus
atgacgctaattggaattgcagtgaaactatacgtragcacacataaaattgcagttactaaaaatgatgatgaaattgtaattctcagcaatcgccctttatcatatttatcggcaattgcccctgcccacacacttagtaataatattggtacaagtctgcaaaaattgacaatccccagataa

SEQ ID NO: 1589 - DNA, 618 bp, Staphylococcus aureus
atgtcagcttttataacttttgagggcccagaaggctcwggwaaaacaactgtaattaatraagtttaycatagattagtaaaagattatgatgtcattatgacwagagaaccrggyggygttcctactggtgaagaaatacgtaaaattgtattagaaggcaatgatatggacattagaactgaagcratgttatttgctgcatctagaagagaacatcttgtattaaaggtcataccagctttaaaagaaggtaaggttgtgttgtgtgatcgctatatcgatagttcattagcttatcaaggttatgctagagggattggcgttgaagaagtaagagcattaaaygaatttgcaataaatggattatatccagayttgacgatttatttraatgttagtgctgaagtaggycgcgaacgtattattaaaaattcaagagatcaaaatagattagatcaagaagatttaaagtttcacgaaaaagtaattgaaggttaccaagaaatcattcataatgaatcacaacggttcaaaagcgttaatgcagatcaacctcttgaaaatgttgttgaagacacgtatcaaactatcatcaaatatttagaaaagatatga

SEQ ID NO: 1590 - DNA, 840 bp, Staphylococcus aureus
atgacaaaacagattatagtaacagactcaacatccgatttatctaaagaatayttagaagcaaacaacatwcatgtaattcctttaagtttaactattgaaggagcttcataygttgaccaagtagatattacatcwgaagaatttattaatcatattgaaaatgatgaagatgtaaagacaagtcagccagccataggtgaatttatatctgcttatgaagaactaggaaaagatggytctgaaatcataagtattcatctttcttcaggaytaagyggyacatwtaacactgcttaccaagcaagtcaaatggtagatgctaatgtaactgttattgattcaaaatctatttcttttrgtttagggtatcaaatacaacacctagtagagcttgtaaaagaaggtgtctcaacttctgaaatagttaaaaagttaaatcatttaagagaaaacattaaattatttgtagttatagggcaattgaatcaattaattaaaggtggcagaattagtaaaacaaaaggtttgattggtaatcttatgaaaattaaaccaattggtacactwgatgatggtcgcttagagcttgtgcacaatgcgagaactcaaaattctagtatccaatacttgaaaaaggaaattgctgaatttataggagatcatgaaatcaaatccrttggtgtcgcacatgctaacgtcattgaatatgttgataaattgaagaaagtttttaaygaagcttttcatgtgrataattacgatataaatgtaactacaccagttatttctgcacatactggtcaaggtgcgattggcctcgtagtccttaagaagtaa

SEQ ID NO: 1591 - DNA, 330 bp, Staphylococcus aureus
atgaaaatgattatagcgatcgtacaagatcaagatagtcaggaacttgcagatcaacttgttaaaaataactttagagcaacaaaattggcaacaacaggtgggtttttaagagcrggtaatacaacattcttatgtggtgtcaatgatgaccgtgtagatgaaatattgtctgtgattaatcaaacgtgtggtaatagagaacagttggtttcacctattacacctatgggaggcagtgcggattcgtacattccatatccagttgaagttgaagttggcggtgctactgtatttgttatgccagttgatgcattccatcaattttaa

SEQ ID NO: 1592 - DNA, 480 bp, Staphylococcus aureus
atgactttatccattctagttgcacatgacttgcaacgagtaattggttttgaaaatcaattaccttggcacctaccaaatgatttgaarcatgttaaaaaattatcaacaggtcatactttagtaatgggtcgtaagacatttgaatcgattggtaaaccactaccgaatcgtcgaaatgttgtacttacttcagatacaagtttcaacgtagwgggcgttgatgtaattcaytctattgaagatatttaccaactaccgggccatgttttyatatttggagggcaaayattatttgaagaaatgattgataaagtggacgacatgtatattactgttattgaaggtaaattycgtggtgatacgttctttccaccttatacatttgaagactgggaagttgcctcttcagttgaaggtaaactagatgagaaaaatacaattccacatacctttctacatttaattcgtaaaaaataa

SEQ ID NO: 1593 - DNA, 927 bp, Staphylococcus aureus
atggatgaacagcaacaattgacgaatgcatatcattcaaataaattatcgcatgcctatttatttgaaggtgatgatgcacaaacgatgaaacaagttgcgattaattttgcaaagcttattttatgtcaaacagatagtcaatgtgaaacaaaggttagtacatataatcatccagactttatgtatatatcaacaactgagaatgcaattaagaaagaacaagttgaacaacttgtgcgtcatatgaatcaacttcctatagaaagcacaaataaagtgtacatcattgaagactttgaaaagttaactgttcaaggggaaaacagtatcttgaaatttcttgaagaaccaccggacaatacgattgctattttattgtctacaaaacctgarcaaattttagacacaatccattcaaggtgtcagcatgtrtatttcaagcctattgataaagaaaagtttataaatagattagttgaacaaracatgtctaagccagtagctgaaatgattagtacttatactacgcaaatagataatgcamtrgctttaaatgaagaatttgatttattagcattaaggaaatcagttatacgttggtgtgaattgttgcttactaayaagccaatggcacttataggtattattgatttattgaaacaggctaaaaataaaaaactgcaatctttaactattgcagctgtgaatggtttcttcgaagatatcatacatacaaaggtaaatgtagaggataaacaaatatatagtgatttaaaaaatgataktgatcaatatgcgcaaaagttgtcgtttaatcaattawttttgatgtttgatcaactgacggaagcacataagaaattgaatcaaaatgtaaatccaacgcttgtatttgaacaaatcgtaattaagggtgtgagttag

SEQ ID NO: 1594 - DNA, 957 bp, Staphylococcus aureus
atgttgaattcatttgatgcagcatatcacagtctttgtgaagargttttagaaataggaaatacacgaaatgatcgcacaaatacaggtacgatttcgaaatttggtcatcaacttcgctttgacttatctaaaggatttccactattaacgacaaagaaagtttcttttaaattagtagcraccgaattattatggttcattaaaggagatacaaayatccaatacttattaaartataataataatatwtggaacgaatgggcttttgaaaattatatmaaatcagacgagtataamggtccagatatgacagatttcgggcatcgtgcattgagtgatcctgaatttaacgaacaatataaagaacaaatgaaacaatttaagcaacgtattcttgaagatgatacwtttgcgaagcaattcggkgatttaggaaatgtttatggtaaacartggcgagattgggttgataaagatggtaatcattttgatcaacttaaaacagtaattgarcaaattaagcataatccagattcaagrcgacacatcgtatctgcatggaatccaacagaaattgatacaatggcacttccgccttgtcatacmatgttccagttttatgtycaagatggtaagttaagttgccagttataccaacgtagcgcagatatctttttaggtgtgccatttaatatcgcaagctacgctttattgacrcaccttattgccaaagaatgtggacttgaagtrggwgaatttgtgcatacatttggagatgcacatatttattcaaatcatattgatgcgattcaaacacaattagcacgtgaaagcttcaatcctccaacattaaaaattaacagtgayaagtctattttygacataaattatgaagatttggaaattgttgactatgaatcacatccagcaataaaagctccaatagcagtgtag

SEQ ID NO: 1595 - DNA, 804 bp, Staphylococcus aureus
atgccaaatgtaataggtgttcagtttcaaaaagcgggaaaattagaatattatacacctaatgatatacaagtagakwtagawgactgggtagttgtcgaatctaaaagaggcatagagataggtattgttaaaaatccattaatggatattgctgaagaggatgttgtgttacctcttaaaaatattattcgcrttgctgatgacaaagatattgataaatttaattgtaatgaacgmgatgctgaaaatgcattaatactatgtaaagacattgtaagagaacaaggtttggacatgcgtttagtcaattgcgaatatacattagataaatcgaaagttatttttaattttacggcggatgatcgtattgattttagaaaattagtaaaaatattagcgcaacatttaaaaacacgtatcgagttgagacaaattggtgtaagggatgaagccaaattgcttggcggtatcggaccttgtggtagrtcgttatgttgttctacatttttaggdgattttgaaccagtatcgattaagatggctaaggatcaaaatttatcattaaatccaactaaaatttcyggtgcatgtggtcgtttgatgtgttgtttaaaatatgaaaatgactattatgaggaagtacgtgcrcaattacctgatatyggtgaagcaattgaaacgcctgatggtaacgggaaagtagttgctttaaatatattagacatttctatgcaggtgaagcttgagggacatgaacagccacttgaatataaattagaagaaatagaaactatgcattaa

SEQ ID NO: 1596 - DNA, 348 bp, Staphylococcus aureus
ttggatcgcaatgaaatatttgaaaaaataatgcgtttagaaatgaatgtcaatcaactttcaaaggaaacwtcagaattaaaggcacwtgcagttgaattagtagaagaaaatgtagcgcttcaacttgaaaatgataatttgaaaaaggtgttgggcaatgatgaaccaactactattgatactgcgaattcaaaaccagcaaaagctgtgaaaaagccattaccaagtaaagataatttggctatattgtatggagaaggatttcatatttgtaaaggcgaattatttggaaaacatcgacatggtgaagattgtctgttctgtttagaagttttaagtgattaa

SEQ ID NO: 1597 - DNA, 438 bp, Staphylococcus aureus
atgaatgcatatgatgcttatatgaaagaaattgcgcaacaaatgcgtggcgaattaactcaaaatggttttacaagtttagaaacgagcgargmagtatcrgagtatatgaaccaagtaaatgctgatgacactacttttgtagttattaactctacatgcggctgtgcagctggattagcaagaccagctgcagtagcwgttgcaacacaaaatgaacatagacctacaaatacagttacagtttttgctgggcaagataaagaagcaactgctacaatgcgagaattcattcagcargyaccatctagtccttcgtatgctttattcaaaggtcragatttagtttattttatgcctagagaatttatcgaaggtagagatattaatgacattgcaatggacttaaaggatgcctttgacgaaaattgtaaatag

SEQ ID NO: 1598 - DNA, 726 bp, Staphylococcus aureus
atgttaaaagagaatgaacgatttgatcaactaatcaaagaarattttagtattattcaaaatgatgatgttttttcrttttcaacggatgctttgttgttaggrcattttacaaaacctagaacaaaagatatwgtgttggacttatgttcaggcaatggggtgataccsttgttattgtttgcgaaacatccacgacatatagaaggtgttgagattcaaaaaacacttgtcgatatggcgcgacgcacatttcaattcaatgatgttgatgaatatwtaacaatgcatcacatggatttgaaaaacgttactaaagtatttaaaccttcacaatatactttagtaacgtgtaatccrccttattttaaagagaatcagcaacaccaacatcaaaaagaagcacataagatagcgagacatgagattatgtgtacacttgaagattgcatgattgcagcccgtcatttattaaaagaaggtggcaggctaaayatggtacatcgtgcagakagactmatggatgtcttgtttgaaatgagaaaagtraatattgaacctaagaaagtcgtttttatatatagtaargtagggaaatcrgcacaaacgatagtwgtagaaggtcgaaaaggtggaaatcaaggtttagaaatcatgcccccattttatatttataatgaagatggtaattatagcgaagaaatgaaggamgtatattatggatag

SEQ ID NO: 1599 - DNA, 1125 bp, Staphylococcus aureus
atggaaattttacgtatagagccaacaccwagtccaaatacaatgaaagttgttttgtcatatacaagagaagacaagttatctaatacttataaaaaagtagaagaaamwcaaccaagatttataaatcagttgttatctatagatggtatcacttccatttttcatgtcatgaacttcttagctgttgataaggcaccaaaagctgattgggaagwcataytacctgatattaaagctgctttttcwgrtgmrartmaggtkttrgaatctgkaaawgamccwcaaattgacaatcattttggtgaaattaaagctgaaytattaacttttaagggtataccgtatcaaattaagctaacttctgctgaccaagaattaagagaacaattaccacaaacatatgttgaycatatgactcaagcgcaaacarmacatgacaatattgtttttatgcgtaaatggctagatttaggaaatcgctatggaaatattsaagaagtaatggatggtgtcctagaagaagtrctagctacctatccagaatcacagttaccygtattggtaaaacatgctttagaagaaaatcacgcaactaataattatcatttctatcgacatgtctctttggatgaatatcatgcractkataattggaagactcgattamgaatgttaaaycattttccaaagccgacttttgaagatataccgctrcttgatttagctttatctgatgaaaaagtaccggttagacgtcaagcgattgtaytattaggtatgattgaaagtaaagaaattttaccgtatttatataaggggcttcgtgataaaagtcctgctgtaagaagaacwgcaggggattgcataagcgatttagggtatccagaggcactaccagaaatggtgctactattagatgatccacagaaaatcgttaggtggcgtgctgctatgtttatctttgatgaaggtaatgcagagcagcttcccgcactwaaagcccatattaatgacaatgcgtttgaagttaaattacaaattgaaatggccatatctcgtattgaaaacggagatgargcacttggttcagtatggaaacaaatgrcraacagaacaatttaa

SEQ ID NO: 1600 - DNA, 1746 bp, Staphylococcus aureus
atgaagattaatatttataaatctatttataattttcaggaaacaaatacaaattttttagagaatctagaatctttaaatgatgacaattatgaactgcttaatgataaagaacttgttagtgattcaaatgaattaaaattaattagtaaagtttatatacgtaaaaaagacaaaaaactattagattggcaattattaataaagaatgtatacctagatactgaagaagatgacaatttattttcagaatccggtcatcattttgatgcaatattatttctcaaagaagatacwacattacaaaataatgtatatattataccttttggacaagcatatcatgatataaataatttgattgattatgacttcggaattgattttgcagaaagagcaatcaaaaatgaagacatagttaataaaaatgttaatttttttcaacaaaacaggcttaaagagattgttaattatagaaggaatagtgtagattacgttagaccttcagaatcttatatatcagtccaaggacatccacagaatcctcaaatttttggaaaaacratgacttgtggtacaagtatttcattgcgtgtaccgaatagaaagcagcaattcatagataaaattagtgtgataatcaaagaaataaacgctattattaatcttcctcaaaaaattagtgaatttcctagaatagtaactttaaaagacttgaataaaatagaagtattagatactttattgctaaaaaaactatcgaattcttcaactacagaaaatatatctatagatatatcaagatttttagaactaagtaatatgatactcttgttagatgatatgctcgacgtcaatatatatataaattcttttaaaaataatacattagagacatttgatgcgactgatcctgaagttgattacatcactgaaataggagattacttattaaaatatgacgttaattctataaatgatgtcagaattgaagtgatagataatttggggcattcaaataatatgctactaaaaacgatactacatgcagaagttgaaatggaagatggaaagaaatatttattacaaaatgggaaatggggttattttaatagagaattttttgaccttttgaatgatcatttgaatgagatagaaattaggtataacacactaactcccacaggtttagtatttaaagaaggagaagaaggatatataaaagaaatagtaggaagattgccagaagaatatttaatgttacataaaaaattcataaaaccaataaataagaattttatagtaaaaggaaatggaatagagttggcagacttatacaatattaaaaacaaagagcttttcacgattaaaagaggaattaatacatctttatctctttatagtctagaacagaatataatagcaattaacgccttaaaatatccagaatcatataattttgaagaattaatagaagctattcctgataactcggaaaatatatttaatgatatacaacggagtacaaattttagtatagtatggattttaccgatatcatctattgataatatgcccataaaagatatggttcatactagtaacgtaataaataaaaactttcaattaactaatttaggttcagtattacttaaaaataaattagtagagtggtctctctatttaaaagatcaaagaattaatccaattatttatatggaaacgccaactgaagatagaaattaa

SEQ ID NO: 1601 - DNA, 801 bp, Staphylococcus aureus
atgcctttagaaayacctacaaagtatgactcccttttaaagaaaaaggtttctttaaaaacgagttttaccttcatgttaatcattgtgcttatcatttggagcttcatttatacgggrtttaattttggagatttaatgataggaatacctcaaataggtgatctattcaaacaaatgattccacctgatttcgagtatttacaacaaattacaacgccaatgttagatacyattcgaatggctatcgtaagtacagtattaggtagcatcgtttcaataccaattgcgttattatgtgctagcaatatcgttcatcaaaagtggatttcaataccctcgcgytttattttaaatatagttcgtactatwccrgatttgytattagcagcaatctttgtggctgtatttggaatcggtcaaattccagggatattagcaytgtttattttaactatctgtattattggaaaattattatatgaatcattggaaacgatagatccaggtccaatggaagcaatgacggctgttggcgctaataaaataaaatggattgttttcggtgttgtaccacaagccatatcgtcatttatgtcatacgtattatatgcatttgaagtaaatatacgwgcttcagctgtgcttggattagtcggcgctggcggtattggattgttttatgatcaaacacttggtttatttcaatatccaaaaacagcaacgattattttatttactttagttatygtcgtcgtcattgattacatcagtacgaaagtgagggcacatctcgcatga

SEQ ID NO: 1602 - DNA, 249 bp, Staphylococcus aureus
atggatagtcattttgtatatattgtaaaatgtagtgatggaagtttatatacaggatacgctaaagacgttaatgcacgtgttgaaaaacataaccgaggtcaaggagccaaatatacgaaagtaagacgtccggtgcatttagtttatcaagaaatgtatgagacaaagtctgaagcattgaagcgtgaatatgaaattaaaacttataccagacaaaagaaattgcgattaattaaggagcgatag

SEQ ID NO: 1603 - DNA, 252 bp, Staphylococcus aureus
atgmaaattatatctatatcagaaacaccgaaccacaacacaatgaagattacacttagtgaaagcagagaaggtatgacatcagatacgtatactaaagttgatgattcacagccagcatttattaatgacatcttaaaggttgaaggcgttaaatcaattttccatgttatggactttatttcagtagataaagaaaatgacgcaaattgggaaacagtattgccaaaagtagaggctgtattcgaataa

SEQ ID NO: 1604 - DNA, 840 bp, Staphylococcus aureus
atggctgtattatatttagtgggcacaccaattggtaatttagcagatattacttatagagcagttgatgtattgaaacgtgttgatatgattgcttgtgaagacactagagtaactagtaarctgtgtaatcattatgatattccaactccattaaagtcatatcacgaacataacaargataagcagactgcttttatcattgaacagttagaattaggtcttgacgttgcgctcgtatctgatgctggattgcccttaattagtgatcctggatacgaattagtagtggcagccagagaagctaayattaaagtagagactgtgcctggacctaatgctgggctgacggctttgatggctagtggattaccttcatatgtatatacatttttaggatttttgccacgaaaagagaaagaaaaaagtgctgtattagagcaacgtatgcatgaaaatagcacattaattatatacgaatcaccgcatcgtgtgacagatacattaaaaacaattgcaaagatagatgcaacacgacaagtatcactagggcgtgaattractaagaagttcgaacaaattgtaactgatgatgtaacacaattacaagcattgattcagcaaggcgatgtaccattgaaaggcgaattygttatcttrattgarggtgctaaagcgaayaatgagatatcgtggtttgatgatttatctatcaatgagcatgttgatcattatattcaaacttcacagatgaaaccaaaacaagctattaaaaaagttgctgaagaacgacaacttaaaacgaatgaagtatataatatttaycatcaaataarttaa

SEQ ID NO: 1605 - DNA, 222 bp, Staphylococcus aureus
ttgcaatattttgaagtaataaaggaagtgtcgcgtattttaacttwttcagagcaaaatrcactcgcgaaaatagatgatttaatgaatacttattgcaatcaatgtccaatcaaaactcgtctgcgtaaattagaggggaaaacgaaggcgcatcatttttgtatcaatgagtgttcaatagggaaagaaataaaacaattaggaaatgaacttcaatag

SEQ ID NO: 1606 - DNA, 1974 bp, Staphylococcus aureus
atggctaaagaaacattttatataacaaccccaatatactatcctagtgggaatttacatataggacatgcatattctacagtggctggagatgttattgcaagatataagagaatgcaaggatatgatgttcgytatttgactggaacggatgaacacggtcaaaaaattcaagaaaaagctcaaaaagctggtaagacagaaattgaatatttggatgagatgattgctggaattaaacaattgtgggctaagcttgaaatttcaaatgatgattttatcagaacaactgaagaacgtcataaacatgtcgttgagcaagtrtttgaacgtttattaaagcaaggtgatatctatttaggtgaatatgaaggttggtattctgttccggatgaaacatactatacagagtcacaattagtagacccacaatacgaaaacggtaaaattattggtggyaaaagtccagattctggacaygaagttgaactagtwaaagaagaaagttatttctttaatattagtaaatatacagaycgtytattagarttctatgaccaaaayccagattttatacaaccaccatcaagaaaaaatgaaatgattaacaacttcattaaaccaggacttgctgatttrgctgtttctcgtacatcatttaaytggggtgtccatgttccgtctaatccaaaacatgttgtttatgtttggattgatgcgttagttaactatatttcagcattaggctatttatcagatgatgagtcactatttaacaaatactggccagcagatattcatttaatggctaaggaaattgtgcgattccactcaattatttggcctattttattgatggcattagacttaccgttacctaaaaaagtctttgcacatggttggattttgatgaaagatggaaaaatgagtaaatctaaaggtaatgtygtagaccckaatattttaattgatcgctatggtttagatgcyacacgttattatctaatgcgtgaattaccatttggttcagatggcgtatttacacctgaagcatttgttgagcgtacaaatttcgatctagcaaatgacttaggwaacttagtaaaccgtacgatttctatgrttaataagtactttgatggcgaattaccagcgtatcaaggtccacttcatgaattagatgaagaaatggaagctatggctttagaaacagtgaaaagytayactgaaagcatggaaagtttgcaattttctgtggcattatctacggtatggaagtttatwagtagaacgaataagtatattgacgaaacaacgccttgggtattagctaaggacgatagccaaaaagatatgttaggcaatgtwatggctcacttagttgaaaatattcgttatgcagctgtattattrcgtccattcttaacwcatgcgccgaaagagatttttgaacaattgaacatwaacaatcctcaatttatggaatttagtagtttagagcaatatggtgtgcttamtgagycaattatggttactgggcaacctaaacctattttcccaagattggatagcgaagcggaaattgcatatatcaaagaatcaatgcaaccgcctgctactraagaggaaaaagaagagattcctagcaaacctcaaattgatattaaagactttgataaagttgaaattaaggcagcaacgattattratgctgaacatgttaagaagtcagataagcttttaaaaattcaagtagacttagattctgaacaaagacaaatygtatcaggaattgccaaattctatacaccagatgatattattggtaaaaaagtagcagttgttactaacytgaaaccagctaaattaatgggacaaaaatctgaaggtatgatattatctgctgaaaaagatggtgtattaaccttagtaagtttaccaagtgcaattccaaatggtgcagtgattaaataa

SEQ ID NO: 1607 - DNA, 774 bp, Staphylococcus aureus
atgttaatcgatacacatgtccatttaaatgatgagcaatacgatgatgatttgagtgaagtgattacacgtgctagagaagcaggtgttgatcgtatgtttgtagttggttttaacaaatcgacaattgaacgcgcgatgaaattaatcgatgagtatgattttttatatggcattatcggttggcatccagttgaygcaattgattttacagaagaacacytggartggattgaatctttrgctcagcatccaaaagtgattggtattggtgaaatgggattagattatcactgggataaatctcctgcagatgttcaaaaggaagtttttagaaagcaaattgctttagctaagcgtttgaagttaccaattatcattcataaccgtgaagcaacwcaagactgtatcgatatcttattrgaggagcatgctgaagaggtaggcgggattatgcatagctttagtggttctccagaaattgcagatattgtaactaataagctgaatttttatatttcattaggwggaccwgtgacatttaaaaatgctaaacagcctaaagaagttgctaagcatgtgtcaatggagcgwttgctwgttgaaaccgatgcaccgtatctytcgccacatccrtatagagggaagcgaaatgaaccggcgagagtaactttagtagctgaacaaattgctgaattaaaaggcttatcttatgaagaagtgtgcgaacaaacaactaaaaatgcagagaaattgtttaatttaaattcataa

SEQ ID NO: 1608 - DNA, 147 bp, Staphylococcus aureus
atgcctggatttcctttcgtcgcagcatcaaaatttattttcgccataataaacctactttctattcaatacttagttaaagttactattactgtaatacaaaataygttgggtaatccattaaaaaacacgcatcacttaaataag

SEQ ID NO: 1609 - DNA, 537 bp, Staphylococcus aureus
atgaaaatcaatgagtttatagttgtagaaggacgagatgatactgagcgtgttaaacgagctgttgaatgtgatacgattgaaacgaatggtagtgccatcaacgaacaaactttagaagtaattagaaatgctcaacaaagtcgaggcgttattgtattaacagatccagatttcccaggagataaaattagaagtacaattactgaacatgtcaaaggtgttaaacatgcgtatattgatagagaaaaagctaaaaataaaaaagggaaaattggtgttgaacatgccgacttaattgatattaaagaagcgttaatgcatgttagttcaccctttgatgaagcttatgaatcaattgataaatctgtgctaatagagttggggttaatygttgggaaagatgcaaggcgccgtagagaaattttaagtagaaaattgcgaatcggccattccaatggtaagcagttattgaaaaagttaaatgcatttggttataccgaagcggatgtaaggcaagctttagaagatgaatga

SEQ ID NO: 1610 - DNA, 1392 bp, Staphylococcus aureus
atggaaaagccgtcaagagagrcatttgaaggcaataataagttgttaataggaattgttytaagtgtaataacgttttggctatttgcacaatcattggttaatgttgtaccaatacttgaagatagtttyaatacagatattggaacggttaatatcgcygttagtataactgctttattttcaggaatgtttgtwgtaggagcaggtggtcttgctgataaatatggcagaattaaactcacgaacattggtattatcttaaatatattrggttcattattaatcattatttcaaatattcctttattacttattataggaagattaattcaaggactttcagcagcatgtattatgcctgcaactttgtctattattaagtcatattacattgggaaagatagacaacgcgctttaagttattggtcaattggctcatggggcggctctggtgtttgttcattttttggaggtgcagttgcaacrcttttaggttggcgttggattttcatcytatcaattataatttcattaattgcrctktttcttattaaaggcacacctgaaactaaatctaaatcgatttctctaaataaatttgacattaaaggtctggttcttttagtcattatgctyctcastttaaatattttaattactaaaggatcagaattaggtgtwasctcacttctttttatyactwtattagcwattrcaattgkatcttttagtttatttatagttcttgaaaagcgtgctacaaatcctttaatcgattttaaattatttaaaaataaagcttayacaggtgcaacagcttcaaactttttgttaaatggtgttgcrggaacattaatagtagccaacacatttgttcaaagaggtttaggatattcytcmttgcaagcaggaagtttatcaatcacttatttagtaatggtactaattatgattcgtgttggtgaaaagttacttcaaacaytcggatgcaagaaaccaatgytaattggaacagsagttcttattgtcggagaatgtctcatttcattaacwttyttgccagaaatattvtatgtcatttgttgtattataggttatttattctttggtttaggactaggratatatgctacaccatcaacagatacagcaattgcaaatgcaccgttagaaaaagtaggmgtwgctgcaggtatctataaaatggcttctgcattaggwggagcatttggcgtcgcattgagtggtgcagtwtatgcaatcgtatcaaatatgacaaacattkatacwggtgcaatgattgcattatggttaaaygcagstatgggaatwttatcattcgttatcattttgttacttgtgcctaaacaaaacgayactcaattatga

SEQ ID NO: 1611 - DNA, 114 bp, Staphylococcus aureus
atgcctaataacgataatataggtgtaaatatttgtgataaaacattcaaaattggcgttagtgataaaatactaacaataagacagattgtgataaaaataggtagcgcttga

SEQ ID NO: 1612 - DNA, 894 bp, Staphylococcus aureus
atgttggataataaagatattgcaacaccatcaagaacgcgagcgttgttagataaatatggctttaattttaaaaaaagtttaggacagaactttttratagatgtgaatatcattaataatatcattgatgcaagtgatattgatgcacaaactggggtgattgaaattggtccaggyatggggtcrttgacagaacaattggcyagacatgctaaaagagtattggcatttgaaattgatcaacgwttaatacckgtattaaatgatacwctatcaccttatgataatgtgacggtgattaatgaagatattttaaaagcgaatattaaagaagctgttgaaaatcatttacaagattgygaaaaaataatggttgttgcaaacctgccgtactatattacgacgccaattttattaaatttratgcaacaagatataccaattgatggctacgtggtgatgatgcaaaaagaagtgggcgaacgcttaaatgctgaartaggttcaaaagcatatggttcrttatcaattgtcgtacaatactatacagagactagtaaagtattaacggtacctaaatctgtatttatgccaccacctaatgttgattcaatagttgtaaaactgatgcagagaactgaaccgttagtaacagtagataacgaggaagcattctttaagttagcaaaagcagcatttgcacaaagaagaaagacaattaacaataactatcaaaattattttaaagatggtaaacaacacaaagaagtgattwtacaatggttrgaacaagcrggtattgatccaagacgtcgcggtgaaacgctatctattcaagattttgctaaattgtatgaagaaaagaaaaaattccctcaattaraaaattaa

SEQ ID NO: 1613 - DNA, 1323 bp, Staphylococcus aureus
atgtcaaatggtaaagaattacaaaaaaatataggtttcttctcagcgtttgctattgttatggggacagttattggttcaggagtattctttaaaatatcaaacgtaacagaagtaacaggaacagcaggaatggccttgtttgtatggttcctaggcggcatcattaccatttgtgcggggttaacagcagcagaacttgctgctgcaatccctgaaacaggtggcttaacraagtatatagaatatacatacggtgatttctggggcttcctatcaggytgggcrcaatcatttatttattttccrgcwaacgtagcagcattgtctatcgtatttgcgacacagytaattaatttattccatttatctataggttcrttaataccaatagcaatcgcatctgcgttatctattgtgttgataaatttcctaggttcaaaagcaggcggaattttacaatcagttacyttagtwattaaaytrattccaatyatygttatygtwatytttggtattttycaatcwggagayatcactttttcattaattccaactacaggtaattcaggaaatggyttctttacagcaattggtagtggtttattagcaactatgtttgcatatgatggttggattcatgtaggaaatgttgcgggrgaacttaaaaatcctaaacgcgatttacctttagcgatttcagttggtatcggttgtattatggctgtgtatttattaattaacgctacattyttattaacrytgccaatagaactacttgcwggwaayttaaatgcrgcwtcagatacatcaaaaatattatttggwgaaaatggcggtaarattatyacaatcggtatattaatwtctgtttatggtacgatcaatggctatactatgactggtatgcgcgtaccatatgcaatggctgaaagaaaattattgccatttagccayttattcgcaaaattaacaaaatctggygcaccatggtttggcgcaattatacaacttataatcgctatcatcatgatgtcaatgggwgcmtttgatacaatwacaaayatgytaatytttgttatttggttgttctattgtatgtcatttgttgckgtaataattttaagraaacgygaaccaaatatggarcgwccatataaagtaccgttatatccratcatacctttaattgcwattttggcaggrtcatttgtattrattaatacactgtttacacaatttataytrgcaatyattggrattctaataacagcacttggtataccagtttattaytataaraagaaacaaaaagcakcataa

SEQ ID NO: 1614 - DNA, 264 bp, Staphylococcus aureus
atgccaaaatcaattttggacatcaaaaattctattgattgtcatgtaggaaatcgtattgtactgaaagccaatggaggccgtaagaaaacaataaaacgttctggaattttaaaagaaacatatccgtcagttttcattgttgagttagatcaagacaaacacaactttgagagagtatcttatacatacactgatgtgttaactgaaaatgttcaagtttcatttgaagaggataatcatcacgaatcaattgcacactaa

SEQ ID NO: 1615 - DNA, 849 bp, Staphylococcus aureus
atgatatatgaaacggcaccagccaaaattaattttacgctcgatacactttttaaaagaaatgatggctatcatgagattgaaatgataatgacaacagttgatttaaatgatcgtttaacttttcataaaagaaaagatcgaaagatagttgttgagattgaacataattatgtgccttctaatcataaaaatctcgcatatcgtgcagcgcaactatttattgagcaatatcaactaaagcaaggtgtaacaatttctatcgataaagaaatacctgtttctgctggcttagctggaggttcggctgatgcagcagcaacgttaagaggattgaatcgactttttratataggggcgagtttggaagaattggctctactaggcagtaaaatygggacagatattccgttttgtatttataataaaactgcactatgtactggaaraggagaraaaatcgagtttttaaataaaccaccttcagcttgggtgattcttgctaaaccaaacttaggcatatcatcaccagatatatttaagttgatyaatttagataagcgttacgacgtacatacgaaaatgtgttatgaggccttagaaaatcgagattatcaacaattatgtcaaagtttgtctaatcgattagagccaatttctgtttcaaaacacccacaaatcgataaattaaaaaayaatatgttgaaaagtggtgcagatggtgcgttaatgagtggaagcggacckactgtgtatgggctagcacraaaagaaagccaagcaaaaaatatttataatgcagttaacggttgttgtaatgaagtgtacttagttagactattaggatag

SEQ ID NO: 1616 - DNA, 1119 bp, Staphylococcus aureus
atgttagttgcagtagtcaaagaattaaaacaaggtgaaggacgtgtagcttgcacacccgaaaatgtgcgtaagttaacggatgcaggacataaagtaattgttgaaaaaaatgctggcattggttcaggattttctaacgatatgtatgaaaaagaaggcgctaagatcgtaactcaygaacaagcatgggaagctgatcttgttatcaaagtaaaagaacctcatgaaagcgaatatcaatatttcaaaaagaatcaaattatctggggatttttacatytagcatcttcaaaagaaatagtagaaaaaatgcaagaagttggtgtaactgcgattagtggtgaaaccattataaaaaatggaaaagcagaattattagcgccaatgagtgctatagcaggtcaacgctcagcaattatgggagcttactactctgaagcacaacatggtggtcaaggtactttagtgactggtgtacatgaaaatgtggatatacctggtagtacatatgtgattttcggtggtggmgtagcagcaacaaatgcagcaaatgttgccttgggactaaatgctaaagtaatcattatcgagttaaacgatgaycgcattaaatatytwsaagatatgtatgcagaaaaagatgtcacagtagtcaaatcaacaccagaaaatttagcagaacaaatwaaraaagcagatgtatttatttctacaattttaattycwggtgcgaaaccgccaaaattggttactcgtgagatggttaaatcaatgaaaaaaggttcagtattaatcgatatagctattgaccaaggtggaactattgaaacaattagaccaactacaatttctgatccrgtgtatgaagaagaaggtgtgattcattatggtgtaccaaaycaaccaggagcagtcccaagaacttcaacaatggcattagcacaaggaaatattgattatatattagaaatttgtgacaaaggcytagaacaagcaattaaagataatgaagccttaagtactggwgtaaacatttaccaaggacaagtgacaaaycaaggattagctwcatcacatgacctagattataaagaaatattaaatgttatcgaatag

SEQ ID NO: 1617 - DNA, 825 bp, Staphylococcus aureus
atgagatataaacgaagcgagagaattgtttttatgacgcaatatttgatgaaccatccgaataaattgattccattaactttttttgtgaaaaaatttaaacaggcgaartcttcaataagtgaagatgtccaaattataaaaaatacattccaaaaagaaaagttaggtacagtaattactactgctggcgcaagtggtggtgttacgtataaaccaatgatgagtaaagaagaggcgactgaagttgttaatgaggtcattactctattagaagagaaagaacgtttgttacctggcggrtatttatttttatcagatttggtaggtaatccatcgctactaaacaaagttggtaagttaattgccagtatttacatggaagaaaaattagatgctgttgttaccattgcgacaaaaggtatttcattggcaaatgcggttgctaatattttaaatttaccagtagtagtgattagaaaagacaacaaggtgactgaaggttctacagtttcaattaattacgtttcaggatcttcaagaaaaatagaracaatggtactttcgaagagaactttagcagaaaattcaaatgttttagttgtcgatgattttatgagggctggtggctctatyaatggtgttatgaatttaatgaatgagtttaaagcccatgtaaaaggggtatcagtacttgtagaatcaaaagaagttaaacaaagattgattgaagattatacttccttagtgaaattatctgatgtagatgaatataatcaagagtttaacgtagaacctggcaacagtttatctaagttttcataa

SEQ ID NO: 1618 - DNA, 879 bp, Staphylococcus aureus
atgccwaataaaatattacttgtagatggtatggcrctattatttagacatttctaygctacaagtcttcataaacaatttatgtacaattcacaaggtgwacctacaaatggaatacaaggrtttgtgmgtcatatcttttcggcaatacatgaaatacgccctacacatgtagctgtatgttgggatatgggrcaatcaacttttagraatgatatgtttgayggttataagcaaaatcgttctgcaccaccagaagaattgataccacaatttgattatgttaaagaaatttcagagcaatttggctttgtaaatattggcgttaaaaactatgaagcggatgatgttataggtacattagcacaacaatattcaactgataacgatgtctatattattacgggcgacaaagatttactgcaatgtattaatgacaatgttgaagtytggctaattaaaaaaggttttaacatttataatagatatacattacatcgttttaacgaagaatatgcycttgaaccacaacaactaatcgatattaaagcgtttatgggtgatacagcagatggatatgcrggtgttaaaggwattggygagaaaacggctattaagttaattcagcaatatcaaagcgttgaaaatgtggttgaaaacattgatgcattatcagctggkcaacgtaataagatwaatgacaatttagatgaactatatttatcgaagcgactkgctgaaattcacacacaagtaccaattgatagtgaakcgctttttgagaaaatgtcatttgcaacaacrcttaatcatattttatcaatttgtaacgaacatgaattacatgtttcaggaaaatatatttcatcccatttttaa

SEQ ID NO: 1619 - DNA, 381 bp, Staphylococcus aureus
atgaaaatcattaacacaacaagattaccggaagcacttggaccatattcgcatgcaacagttgtgaatggtatggtttatacttctggtcarattccattgaatrttgatggrvawatcgtaagcgctgatgttcaagcacaracaaaacaagttttagaaaatttaaaggttgttttggaagaagcaggatctgatttgaattctgttgcgaaagcgaccattttcattaaagatatgaatgatttccaaaaaataaatgaagtgtatggtcaatattttaatgaacacaagccagcgcgtasttgtgtakaggttgcgcgtttgccaaaagatgtgaaagtagaaattgaattagtaagtaaaattaaggaattataa

SEQ ID NO: 1620 - DNA, 3441 bp, Staphylococcus aureus
atgattaataaagaacaattagatcttttatataaattaaaaaaagaagttgaaaagtcgcgaaatgaagcacttttacatacaattaaccaagtaattaagaaagtatatttgcagcaatatacatgttcgttcgttggacatttttctgcaggtaaatcgacamtgataaatttattaattgaacaagatatcttaccaagttcwcctgtaccaacgacaagtaatactgctatygtgtcagtttcagacaatcacgatattattgctaatttgccgaatcaaacrtatgccaaattatctaattatgatgaagtaagggaaatgaatcgccaaaatgtcgacgttgaatctgtagaaattaattttcaatcagctaaatttgaaaatgggtttacgttgcaagatacaccaggtgttgattcaaatgttgcatcacatcagtcaataacagaacaatatatgtatacaagtaatatgatattttatacggttgactataaccacgttcaatctgaacttaactttaagtttatgaagcatataaatgatgttggaatacctgttgtgtttatcattaatcaaattgacaagcatcaagacgatgaattgtcattckctacgtttaaatcwcgagttgaaaaatcaattgcagattgggryattaaattagaacrcaccttttatgtatckaaatttgatcacyctgaaaatgaacttgragyattatcaasttatctartttcattagatcaacatagagaracaatagaggattatacatcaagaacggttgaatayattaccgaagctcagctagattacattcagtctgaaattcaggaagtactagaagatttrggtatcgaagaagcrgagtttgaacaagcatttttaaatagtcaacaacatcaagcaattagtgaagaggcrcaacttttaaataatccagatgaattaatggcatttttaaagaataagcgtaaaaatattttagaaaatgcatacattatgccgcataatatgagagaaatgttacgaagttatttggaaagtatgtctcaagaytttaatgttggyggvytttttaataaaaagaagaaaaarctwcaaattcaacaacagcgattattaacagcgacagatgcgttacaagaacatgttaatcaacaaattcgtcaaccaatgcgagaagatatgtcatttgtwacgcgttttatcaataaaaaagaagcttcagataaagtattaaatcagcattatgacgttaarccrgaaatgattgaagrtttatatcaaccacaaacatcaatcagcaatacttatgtacttacattttcagacgaagtggttaaagccattaagaaatatgttgaacaacaatcaacaccratttttaaagaaataatagaaaatgtrcaggcagatgaattaccaacagaagaaagtgatgatttaaaagaatatcaacgttatacagaattaaatgagctgcgtcagtcattgacgactaagaattatcgtcaytactatattcatttagatgaatctctagataaattartagrtcgacaagagacaacatatcaagtggctactgataatrctmaggataatcgtgataatcagcagctaaatcaraatacagctacaacaaatatgtctatagatattcaaaaagcrcttgatataatttcggatgtgcctttgttcaagcgtacaaagcargatatccacgaaacattaacacgtatagataataaattaataaaaataggtgtatttggaacrtttagtgckggtaaaagtagtttgataaatgcattattaggcgagcatattttagtbagttctccaaatcctactacagcagctactacagaaatatcttatggagacgagagttatataacgctaaaatcacaatcgcaattattagatgaaattaatgcagtagttgaataccaagatatrtcttwttcractatagaagamtttattaattsrgatttagaaaagttaaaatcacatttaaataaaaatcaactcgcttttrttcakgcagttgaaaaacattataawttgtatgtcartatgttggaaaatggagaaaaacatgccattaatcaacaggaattgaaaaagtggagtgcagaagatgaataygcaacatttgttaaracagtacacattgcattaatgcatgattggttaaaaggtaaaataattgttgattcattagggctacactcaaataaccaaaggcatacaaatgaaaccgarcaaattttaacttcttcagacttaatmttgtatgtaagttattttaatcattcrtttactgataatgacaargcgtttatagaacacatgaaagatatgaaccagttgaatgaaaaccaagcatttaaaatggtaattaatgctgctgatttagcagaaagtcaagatgatcttgaagcrgttgaaacatatgtatcagatgcattaagacaagtacacttacaatcagacatttttgctgtatcaagtcgaaatgcattrcaagctgaagataagggcattgatcaattaaaacaaagcatacaacaatttgttgatgttgaatctaaatcaattttagaacaacaaatgattcatcagcttmaacaaatggatcrttcttatgtagagatgattacagaatttgaaacaaataaagctgatatttcacgtcgccaacawaggttaacagwytataaagataaacagcgtttacaacatcaattaattgatgcgacgytacaacatacagacaacgaagttgaagaacaagtttatcatttaaatgcmcgtttaaaaytacaactactwgacgatrttaaatcagtgtttaattctcaaatgacgcaaaatagtgattttaatgaagaaaagaaagtgtctacgaragtatacttagatcaaattcatcaacgattgtttttagagcaatctttaattacagaacgtataaaaaaatactttaawaakcaactcactragcaaattgcaccaatcgttcaacaattagcagatttacatgtcattrttaatcctcagtttaactttgaatcagctaatatagagcaaccattattgcacatygatttcaaygatatgctaaatgcattgcctaaacaattaacaaaacgtaaaattttgaatccaaatgggcaaagagatatacatgaatcaatttgtcaaagtacrttaggattattacaaccacaaatgggattattgaggcaacarcttgaattatatgtwaagcaaatggctgtagaagctgaatcgcaatttgaaagttttgaagctaatattcaaacgcaaataaacgatttattagcatttgatttagatacaacacttatcaatcaattgaaagataaacatcaacaactgaaaactattttatattaa

SEQ ID NO: 1621 - DNA, 1068 bp, Staphylococcus aureus
atgaaacaatacggagaaaagtttatcgatgaatttagtaaagcagaattsgaaaaactagccaagcaagggcaattaattgaygttagaacagaagaggagtatgcattaggacatatcaatggttccatacttcatcctgttgatgagattgagtcattcaataaagaaaaaaataaaacctattatgtaatctgtagaagtggtaacagaagtgctaatgctagtaaatatttagctaaacaaggttataacgttataaatcttgatggtggttataaagcttatgaagaagaaaacgatagttatgatacacaagaagaatataaaagtatagaaattaaagcagatcgtaaacaatttaactatcgtggtyttcaatgtccagggccaattgtaaaaattagtcaagaaatgaagaatattgaagtaggtgaccaaattgaagtcaaagtcacagaccctggattccctagtgayattaaaagttgggtgaaacaaacaaggcatactttagttaagcttgatgaaaataacaatggaattaatgcgattattcaaaaagaaaaagcaaaagatttagatataaattattctgctaaaggtactacaattgtattatttagtggagaattagacaaagctgtagcagcrttgattattgcaaatggygctagagctgctggaaaagatgtaactatcttctttactttttgggggcttaatgcattaaaaaaagtgcaaacagttaatgttaaaaagcaaggtattgcaaaaatgtttgatttaatgttgcccmaaaagaatatacgaatgcctctttccaaaatgaatatgtttggtttaggaaatatgatgatgcgctacgtaatgaaaaagaaaaatgttgattcattaccaacacttatcaatcaagctattgagcaaaatatcaaattaatcgcttgtacgatgagtatggatgtcatgggtattcagaaagaagaacttagagatgaagttgagtacggtggtgtaggcacttatattggtgctactgaaaatgcgaatcataatttatttatctaa

SEQ ID NO: 1622 - DNA, 774 bp, Staphylococcus aureus
atgagtcaaatcraatttaaaaacgtcagtaaagtctatcctaacggtcatgtaggcttgaaaaatattaacttaaatattgaaaaaggtgaatttgcagtyattgtcggactatctggtgctgggaaatccacgttattaagatctgtaaatcgtttgcatgatatcacgtcaggtgaaattttcatycaaggyaaatcmatcactaaagcccatggtaaagcaytattagaaatgcgccgaaatataggyatgattttccaacattttaatttagttaaacggtcaagtgtattacgaaatgtactaagtggacgtgtaggttatcaccctacttggaaaatggtattaggtttattyccaaaagaagacaaaattaargcaatggatgcactagaacgsgtcaayatcttagataaatataatcaacgctctgatgaattatcaggwggycaacaacaacgtatatctattgcacgtgcrctatgccaagaatcygaaattattcttgcagatgarccagttgcttcattagacccattaacwacgaaacaggttatggatgatttaagaaaaatcaaccaagaattaggcatcacaattttaattaayttacattttgttgacttrgcaaaagaatatggcacacgcatcattggtttacgtgatggtgargttgtctatgatggtcctgcatctgaagcaacagatgacgtatttagtraaatatatggacgtacaattaaagaagatgaaaagctaggagtgaactaa

SEQ ID NO: 1623 - DNA, 303 bp, Staphylococcus aureus
atgaaagtgacagatgtaagacttagaaaaatacaaacagatggacgaatgaaagcactcgtttccattacattagatgaagctttcgtaattcatgatttacgtgtaattgaaggaaactctggcttgttcgttgcaatgccaagtaaacgtacaccagatggtgaattccgcgacatcgcgcatcctattaattcagatatgagacaagaaattcaagatgcagtgatgaaagtatatgatgaaayagatgaagtagtaccagataaaaacgctacatcagaagattcagaagaagcttaa

SEQ ID NO: 1624 - DNA, 333 bp, Staphylococcus aureus
atgggtaaaaaaatgggtctaggtttatctatwgcattgrttgttattggtattgccgttgtatgtttaatgattttttctagtcaaaaaacgacttattttggttatatgaatagtaawacaaatgcagaaaaagttgtmagtgaaaaagatggattagtcaaacataatatcaaagtagaaccatcwaatgatttyaarccgaaaaaaggagrctttgtaaaattagtttctaaagatgatgggaagacattttataaacaagagattgttaaacatgatgacgtcccacacggtttaatgatgaaaattcacgacatgcatatgaattaa

SEQ ID NO: 1625 - DNA, 129 bp, Staphylococcus aureus
ttgygtttgaatgatgctcgtatttttgaagtaagraaaaagttgtttttaaaattacaacgaattaaaaacaatgccttttatatgttgaaagagtattgcagattaaattataataatgacgaagtg

SEQ ID NO: 1626 - DNA, 1146 bp, Staphylococcus aureus
atgtttcaattacttgcagtttgtccgatgggattagaagctgttgttgctagggaaattcaagaattaggctatgaaacaaatgttgaaaatggycgtatattttttgaaggagacgcaagtgcaattgtaaaggcaaatttatggttgcgcacagcagaccgaatcaaaattgttgttggacgttttaacgcaacaacrtttgacgaattattcgaacaaaccaaagcgctcccttgggaatctatwattgataaagarggtaacttcccagttcaaggtagaagcgttaaatcaacactacatagtgtgccagattgtcaggcgataactaagaaagctattgttgaacgattacgtcgcgcatataacgaaaaaggttggttaaatgaatcaggtgcsaaatacccygttgaagttgcyattttaaaagataatgtattattgactatmgacacatcaggttctggtttgaacagacgtggwtatagattagcacaaggtgaagcaccaattaaagaaacgttggcagcaagtttaatccgtcttgcaaactggaaaggtgatacacctttaattgatccattttgcggttcgggtacaatagctatagaagcttgtttaattgctcaaaatatcgcacctggttttaatcgmgagttcgtatcagagcaatggaacatcatgccagcaaatatttatgatgattaccgtgatgaagcggataagatggctgattatgataaagaaatcgaagtatatgcttctgatatygatccwgaaatggtagagattgctaagcgtaacgctgaagaagtkgggttgtctgatattattaaatttagtgtaaaagatgtcaatacattaacaattgatacagaagaaccggtkgcgttaattggaaatcctccatatggtgaacgtattggtgatcgtgaagaagttgaagaaatgtaccgttatattggtaaactaatgaaacaacatccatttttatctacatacattttaacaagtaataaagaatttgaatatttagtaratcgtaaagcaacraagcgacgtaagttatttaatggatatatagaatgtacttattatcaatactggggtaaaaagacagaacgtaaaactatygaaaactaa

SEQ ID NO: 1627 - DNA, 1353 bp, Staphylococcus aureus
atgcgaagacacgcgataattttggcagcaggtaaaggcacaagaatgaaatctaaaaagtataaagtgctacacgaggttgctggraaacctatggtcgaacatgtattggaaagtgtgaaaggctctggtgtcgatcaagttgtaaccatcgtaggacatggtgctgaaagtgtaaaaggacatttaggcgagcgttctttatacagttttcaagagraacaactcggtactgcgcatgcagtgcaaatggcgaaatcacacttagaagacaaggaaggtacgacratcgttgtatgtggtgacacaccgctcatcacaaaggaaacattagwaacattgattgcgcatcaygaggatgctaatgctcaagcaactgtattatctgcatcgattcaacaaccatatggatacggaagaatcgttcgaaatgcgtcaggtcgtttagaacgcatagttgaagagaaagatgcaacgcaagctgaaaaggatattaatgaaattagttcaggtatttttgcgtttaataataaaacgttgtttgaaaaattaacacaagtgaaaaatgataatgcgcaaggtgaatattacctccctgatgtattgtcgttaattttaaatgatggcggcatcgtagaagtstatcgtaccaatgatgttgaagaaatcatgggtgtaaatgatcgtgtaatgcttagtcaggctgagaakgcgatgcaacgtcgtacgaatcattatcacatgctaaatggtgtgacaatcatcgatcctgacagcacttwtattggtccagacgttacaattggtagtgatacagtcattgaaccaggcgtacgaattaatggtcgtacagaaattggcgaagatgttgttattggtcagtactctgaaattaacaatagtacgattgaaaatggtgcatgtattcaacagtctgttgttaatgatgctagcgtaggagckaatactaaggtcggaccgtttgcgcaattgagaccaggcgcgcaattaggtgcagatgttaaggttggaaattttgtagaaattaaaaaagcagatcttaaagatggtgccaaggtttcacatttaagttatattggcgatgctgtaattggygaacgtactaatattggttgcggaacgattacagttaactatgatggtgaaaataaatttaaaactatcgtcggcaaagattcatttgtaggttgcaatgttaatttagtagcacctgtaacaattggtgatgatgtattggtggcagctggttccacaatcacagatgacgtaccaaatgacagtttagctgtggcaagagcaagacaaacaacaaaagaaggatataggaaataa

SEQ ID NO: 1628 - DNA, 345 bp, Staphylococcus aureus
atgtcagatgtttcattgaaattatcagcaaaagatatttatgaaaaagattttgaaaaaacratggctcgtggctatagaagagaagaagtagatgcatttttagatgacattattgctgattatcaaaaaatggccgatatgaataatgaagttgtaaaattatcagaagagaatcataaacttaaaaaagaattagaagaattaagactacgtgtagcaacatcwagacctcaggacaataaaagtttttcttcgaataatacaacaacaaatacatcttcaaataatgtagatattttaaaacgtatttcaaacttagaaaaagctgtatttggtaaataa

SEQ ID NO: 1629 - DNA, 966 bp, Staphylococcus aureus
atgttaaataatgaatataagaattcgtcattaaagattttttcattgaaaggaaacgaagcattagcgcaagaagttgctgaccaagtaggaattgaactaggtaaatgttcagttaaacgttttagtgatggagaaattcaaattaatatcgaagagagtattcgtggttgtgacgtatttattattcaaccaacatcatatcctgtgaatctacatttaatggaattattaattatgattgaygcttgtaaacgtgcttctgcagcaacaatcaatattgtagtgccatattatggatatgcaagacaagatagaaaagcccgtagccgtragccaatcacwgctaaattagttgcaaacttaatcgaaacagctggcgcaactcgtatgattgcgttagacttacatgcaccacaaattcaaggattctttgatattccaattgaccacttaatgggtgtgccaattcttgctaaacatttcaaagatgatccgaatattaacccagaagaatgtgtcgttgtttcaccagaccatggcggygttacacgtgcacgtaaattagctgacattttaaaaactccaattgcaattatagataaacgtcgtcctagaccaaatgttgctgaagtgatgaacattgttggtgagattgaaggacgtacggcaattattattgacgatattattgatacagcaggtacaatcactttagctgcacaagcattaaaagataaaggtgctaaagaagtatatgcttgttgtacacaccctgttttatcaggaccggctaaagaacgtatcgaaaattctgctataaaagaattaatcgtaacaaactcaattcatttagatgaagaycgcaaaccatctaacactaaagaattatctgttgctggtttaatcgcacaagctatcattcgtgtatacgaaagagaatcagttagcgtattatttgactaa

SEQ ID NO: 1630 - DNA, 564 bp, Staphylococcus aureus
atggttaaaacagtttatgtaacaggttacaaatcattcgaattaaacatttttaaagatgacgcacctgaagtacattatttaaaacaatttataaaacataaaatwgaacaactgttggatgaaggattagaatgggtgttaatacaagggcaaatgggtatagaattatggactgcagaagttgttattgaattacaacgaacatatgattcgttaaagtttgctgtaattacaccgttccaaggacatacagaaaagtggaatgaacataatcaaagtaagtatgccaacataattaagcatgcagattatgttgatagtatttttcatacgtcgtatcarggtccttttcaatttaaacaagcagatcaatttatgcttgaacattckgatcaaacattrytcatttatgatgaggaacaagaggcragtcctaagttctyyaakyagatgttagttgattttatggataaaacaaactatacttgtgatattgtgacgttcgatgaattaacagcattcatcaatgacttacagtggtctgaagatcaaagtttctaa

SEQ ID NO: 1631 - DNA, 351 bp, Staphylococcus aureus
atgaatgatktagtcgaatcactaatttatgaagttaacaacatgcaacaaaatttygaaaatgtgaaatcacaacaacaagatcatgatttttaccaaactgtaaagccatatactgaacatattgatagcwtrctcaatgagatcaaattacatcgtgaatttattatagaagtaccttatatgaattcaaggaaatttgagctaytgattgctaacattgaacaactttctgtcgaatgtcattttaagcgaacaagtcgaaagttatttatwgaaaagcttaaaagtgtycaatatgatttacaaaatatattagatggcgtaacwaaagagggtactkatggttaa

SEQ ID NO: 1632 - DNA, 573 bp, Staphylococcus aureus
atgaaatgtattgtaggtctaggtaatataggtaaacgttttgaacttacaagacataatatcggctttgaagtcgttgattatattttagagaaaaataatttttcattagataaacaaaagtttaaaggtgcatatacaattgaacgaatgaacggmgataaagtgttattyatcgaaccaatgacaatgatgaatttgtcaggwgaagcagttgcaccgattatggattattacaatgttaatccagaagatttaattgtcttatatgatgatttrgatttagaacaaggacaagttcgcttaagacaaaaaggaagtgcgggcggtcacaatggtatgaaatcaattattaaaatgcttggtacagaccaatttaaacgtattcgtattggtgtgggaagaccaacgaatggtatgacggtacctgattatgttttacaacgcttttcaaatgatgaaatggtaacgatggaaaaagttatcgaacacgcagcacgcgcaattgaaaagtttgttgaaacatcacgatttgaccatgttatgaatgaatttaatggtgaagtgaaataa

SEQ ID NO: 1633 - DNA, 342 bp, Staphylococcus aureus
atgacaaatattacaaaagaggtatttgataatttagaacaaragattgatktatttgccaaaaataagrcattaggttctagtgaagcaaarccytacttggatgaataccatagtaaaattattgattattttaagcaggttaatgacataactrgcaatattgattttgataawttaaatcaatatcctgttgtgccaatgaattttaaagaaagatatgattatatgattgaacgtaaatatcattttatgggctatcgacaaatgaagacctttaaaactgaattgattaaaatgaatgctagttatcaaacaaggttaaagaataagcaggtatag

SEQ ID NO: 1634 - DNA, 3507 bp, Staphylococcus aureus
atgacaatattgacaacgcttataaaagaagataatcattttcaagaccttaatcaggtatttggacaagcaaacacactagtaactggtctttccccgtcagctaaagtgacgatgattgctgaaaaatatgcacaaagtaatcaacagttattattaattaccaataatttataccaagcagataaattagaaacagatttacttcaatttrtagatgytgaagaattgtataagtatcctgtgcaagatattatgaccgaagagttttcaacacaaagccctcaactgatgagtgaacgtattagaactttaactgcgttagctcaaggtaagaaagggttatttatcgttcctttaaatggtttgaaaaagtggttaactcctgttgaaatgtggcaaaatcaccaaatgacattgcgtgttggtgaggatatcgatgtggaccaatttcttaacaaattagttaatatggggtacaarcgggaatcygtggtatcgcatattggtgaattctcattgcgaggaggtattatcgatatctttccgctaattggggaaccaatcagaattgagctatttgataccraaattgattctattcgsgattttgatgttgaaacgcagcgttccaaagataatrttgaagaagtcgatatcacaactgcaagtgattatatcattactgaagaagtratyagmcatcttaaagaagagttraaaactgcatatgaaaatacaagacccaaaatagataaatcagtgcgcaatgatytgaaagaaacgtatgaaagctttaaattattcgaaagtacatactttgatcatcaaatactacgtcgyttagtagcgtttatgtatgaaacaccttcgacaattattgaktatttccaaaaagatgcaatcattgcrgttgatgaatttaatcgtattaaagaaactgaagaaagtttaacagtagagyctgattcgtttattagcaayrttattgaaagtggtaatggatttataggacaaagttttataaaatatgatgattttgaaacattgattgaaggctatcctgtcacttatttttcattattcgctacaacaatgccgataaaactaaatcatattattaaattttcatgtaaacctgtycaacaattttatgggcaatatgacattatgcgttctgaatttcaacgatatgtyaatcaaaaytatcatatcgtggttttggtcgaaacygaaactaaagttgaacgtatgcaagcgatgttaagtgaaatgcatattccatcaataacaaaattgcatcgctcaatgtcatcgggrcaagcagtgattattgarggcagtttatctgaaggatttgaactacctgatatgggattagttgtcattactgarcgtgagctttttaaatcaaaacagaaaaagcaacgaaaacgtacgaaagctatctcaaatgctgaaaaaattaagtcttaccaagatttaaatgtgggagattatattgttcatgtgcatcatggtgttggtagatatttaggtgttgagacgctcgaagtrgggcaaayrcatcgtgattatattaaattgcaatataaaggtacggatcaactatttgttccagtagatcaaatggatcaagttcaaaaatatgtagcttcggaagataagacgccaaaattaaataaactcggtggcagtgaatggaaaaaaacaaaagcwaaagttcaacaaagtgttgaagatattgctgaagagttgattgatttatataaagaaagagaaatggcagaaggttatcaatatggggaagacacagctgagcaaacaacatttgaattagattttccatatgaacttacgcctgaccaagckaaatctatcgatgaaattaaagatgacatgcaaaaatcgcgtccaatggatcgcttgctatgtggtgatgttggttatggtaaaactgaagttgcagtgagagcagcattcaaagctgtaatggaaggaaagcargttgcatttttagttcctacaactattttagctcagcaacattatgagacgttaattgagcgtatgcaagattttcctgttgaaattcaattaatgagtcgttttagaacgccdaaagagataaaacaaactaaggaaggacttaaaactggrtttgttgacatagttgttggtacacacaaattacttagtaaagatatacagtataaagatttagggctgttgattgtagatgaagaacaacgatttggtgtacgccataaagagcgtattaaaacattaaaacataatgtagatgtactaacattgactgcaaccccaatacctagaacattgcatatgagtatgctaggtgtgcgsgatttgtcagtgattgaaacgccgccagaaaatcgtttcccagttcaaacatatgtattagaacagaacatgagttttatcaaagaagctttagaaagagaactatcccgtgatggccaagtrttttatctttataataaagtgcaatccatttatgaaaaacgagaacaactccagatgttaatgccagatgctaacattgcagttgctcatggacaaatgacagagcgcgatttagaagaaacgatgttaagttttatcaataatgaatatgatattttagtaacgacgacgattattgaaacaggtgtcgatgtcccaaatgcaaatactttgatcattgaagatgcagatcgctttggattgagtcagttgtatcaattaagaggtcgtgttggtcgttcaagtcgtattggttatgcatacttcttacatccagcaaataaggtactaactgagactgcagaagatcgattacaagcgattaaagaatttacggagttaggctcaggatttaagattgcgatgcgtgatttgaacattcgtggtgctggtaatttgttaggtaaacaacagcacggctttattgatacagttggatttgatttgtacagtcaaatgttagaagaagctgtaaatgaaaaacgtggtattaaggaaccagaatctgaggtgccagaagtcgaagttgatttaaacttggatgcatatttgccracagaatatattgcaaatgaacaagctaaaattgaaatttataaaaagctamgaaaaactgaaacatttgatcaaattatcgacatwaaagatgaattaattgatcgtttyaatgattatcctgttgaagtagcacgtttgcttgatatagtggaaataaaagtacacgcattacattcaggtatcacgttgattaaagataaagggaaaataattgatattcatttatctgtaaaagccactgaaaatattgatggcgaagtgctgttcaaagcaacacaacctttaggtagaacaatgaaggttggtgttcaaaataatgcaatgacaattactttaacgaaacaaaatcaatggcttgatagtttgaagtttttagttaagtgcattgaagaaagyatgagaatcagtgatgaagcataa

SEQ ID NO: 1635 - DNA, 660 bp, Staphylococcus aureus
atggtaagtaagaaaaaagcattagaaatgattgatgttatagcaaatatgtttccggatgcagaatgtgaaytaaaacatgataatccgttcgaattaactattgctgtattattgtcagcgcaatgtacagacgttytagtaaatagagtaacaactgagctgtttaaaaaatacaaaacgcctgaagattatttggcagtcagtgatgaagaacttatgaatgatattcgttctatcggtctgtatcgtaacaaagctaagaatattaagaaactttgtcaatctttgattgatcaatttaatggagaaataccacaaacacataaggaattagaaagtttagcaggtgtaggacgtaaaactgctaatgtagtcatgagtgtagcatttgatgaaccttcattagctgttgatacgcatgtagaacgtgtttctaaacgcttaggtattaatcgttggaaagataatgtgagacaggtagaagaccgtttatgttctgtcatacctagagatagatggaatagkagccatcatcaactcattttctttggaagataccactgtttagcccgaaaacctaaatgcgatatttgtccaytattagaagattgtagagaaggacaaaaacgttataaagctagtttgaaagaagcgtga

SEQ ID NO: 1636 - DNA, 108 bp, Staphylococcus aureus
gtgtcgaatcctgataacatcaacatgatgatggttaacatgggtacgcctaatttaaatacagaaattaaactcgtaaatgatgttaaaagttttacggaccaatag

SEQ ID NO: 1637 - DNA, 1527 bp, Staphylococcus aureus
atgaagcataaagaagcatttaatggcgttgtcgtgttaactgctgcattaattgtcattaaaattctgagtgctgtatatcgaattccatatcaaaatatattaggygatacaggtttgtatgcatatcaacaagtgtatccaattgtagcattaggaatgatattatcgatgaatgccattcctagtgcaattacacaaaatatagggaagtatcatagtgacgaagcatatgcaaaagcrgtcgcttatatacaattagttggtatrttattatttattgctatttttgtgtttgcgaacaatattgcacatatgatgggtgatrgccatttaacaccwatgattcaagcwgcaagtttaagctttatatttataggtatgcttggcgtgttaagaggttattatcaatctgcaaataatatgacagttccggctatttcccaggttatagaacaagttatacgagtaggtattatcattgttactattgttatttttgtagayagaggttggacgatatatgaagcgggwacaattgctattttagcatcaacgataggttttttaggttcttcaatttatttagtagcgcaccgaccttttaagtttaaaatggtaaataacactgcaaagatygtttggaaacagttcgcactttcggttttgattttcgctatcagtcaattaatcgtaattttatggcaagtgattgatagtgttactattattaagtcacttcaagcgatacgcgtgccattcgatgttgcyataactgaaaaaggagtctatgaccgtggtgcatcatttattcagatgggattgattgtaactacaacatttagttttgcgctcattcctctgttaagtgacgcaatcaaaatgaataatcaggtacttatgaatcgttatgcaaatgcgtcattaaagattacgattttaataagtacagcagcgggaataggattaattaatttattgcctttaatgaacggtgtrttttttaagacgaatgatttaaccttaacgttaagygtttatatgattacggtyatttgtgtatcgttaattatgatggatatggcwttattacaagckcaacatgctgtgagaccwatttttgtyggtatgacggcaggattggttattaaatttatacttaatatcattttgattcgtttaagtggcattattggtgcgagcattagtactgttgtatcattaattatattcggtacgattatccatattgctgtcacgagaaaataccayttayatgcgatgagacgattttttatcaatgttgttttaggtatggtatttatgtcgattgttgttcaatgcgtgttaaacatagtgacaacacacggtagawtcactggactcrttgaattattatgtgcagcagtattaggtatcattgcattgtttttctatatttttagatttaatgttttgacatataaagagttaacttatttaccatttggttcaaagttgtatcaaattaagaaaggaagacgttga

SEQ ID NO: 1638 - DNA, 687 bp, Staphylococcus aureus
atggataaatatcaattaaaagcaagacctgtagtgatacgaagagaattattagaccattacagtgacttaggtttagatgagcaagatttagtcattttgcttaaattgatttatgcttccgaaacatcaaayaaacagccttcaattgaattrcttcagaagggctcaactatgcaaccacgygatattacaatggttattcaaaatttgatwcaacgtgaattgctagaattacaagttcaaaaagatgaagaaggtagatttacygaatatatgaatctagatccttttttcgaaaaattaagtcatatattgaagcaacaaagtatggaaacgaaagagcwaaatagtaaagaaaaatttaaacaattatttagasttttagaggatacatttgcaaggccgttatctccatatgaaatagaracgttaaatcaatggattgatgttgataaacacgatastgcaattatacaagcggcattagacgaggcgaatagtttgaataaacttagctttaaatatatrgatcgtattttacttaattggaagaaaaacaatgtcaaaacaattgacgattctagaaaaataagagaaaaattyaataaaccgaaaatgacgcacacagttaaaacggtacctaaatttgattggttaaacggggagaaccttgatggtaagtaa

SEQ ID NO: 1639 - DNA, 1194 bp, Staphylococcus aureus
atggmacataccattacgattgttggcttaggaaactatggcattgatgatttgccgctagggatatataaatttttaawgacacaagataaagtttatgcaagaacgttagatcatccagttatagaatcrttgcaagatgaattaacatttcagagttttgaccatgtttatgaagcacatraccaatttgaagatgtctatawygatattgtggcgcaattggttgaagctgctaatgaaaaagatattgtctatgcggttccgggtcatcctagagttgctgagacaactacagtgaaattactggctttagcaaaggacratactgatatagrtgtsawagttytaggtggkaaaagctttattgrtgatgtgtttgaagcagtkaatgtagatccaaatgatggcttcacactgttagatgcgacatcattacaagaagtaayacttaatgttagaacgcatacattgattacgcaagtttatagtkcaatggttgctgctaatttgaaaatcactttaatggaacgatatcctgatgattaycctgttcaaattgtcactggtgcacgaagcgatggtgcggataacgttgtgacatgcccattatatgaattggatcatgatgaaaatgcattcaataatttgacgagtgtattcgtaccaaaaatcayaacaycgacatatttgtatcatgactttgattttgcaacggaagtgattgatactttagttgatgaarataaaggttgtccatgggataaagtgcaaacgcatgaaacrctwaagcgttatttacttgaagaaacattygaattgttcgaagctattgacaatgaagatgattggcatatgattgaagarctaggagatattttattacaagtgttattgcatactagtattggtaaaaaagaagggtatatcgacattaaagaagtgattacaagtcttaatgctaaaatgattcgtagacacccacacatatttggtgatgcyaatgctgaaactatcgatgacttaaaagaaatttggtctaaggcgaaagatgctgaaggtaaacagccaagagttaaatttgaaaaagtatttgcagagcattttttaaatttatatgagaagacgaaggataagtcatttgatgaggcckcgttaaagcagtggctagaaaaaggggagagtaatacatga

SEQ ID NO: 1640 - DNA, 1293 bp, Staphylococcus aureus
atgaaaacaacgattaaacaagcgaaagatcatttaaaccaagacgttacaattggtgcttggytaacaaataaacgttcaagtggtaaaatcgcctttttacaattacgtgatggaacaggctttatgcaaggcgtagtagttaaatcagaagttgatgaagaggtattcaaacttgcgaaagaaattrctcaagaatcatctctataygttacaggcacaattacagaagataatcgttctgacttaggatacgaaatgcaagtgaaatcaattgaagttatttcagaagcgcatgactatccgattacacctaaaaatcatggtacagaattcttaatggatcaccgtcatttatggttacgttctaaaaaacaacatgctgtaatgaaaattagaaatgaagttattcgtgcaacgtatgaatttttcaacaaagatggatttacaaaggttgatccaccaattttgacagcaagtgcrccagaaggtacaagtgaattattccatactaaatactttgatcaagatgcgtttttatctcaaagtggtcagttatacttagaagctgcrgcaatggcacacggaaaagtattttcatttggtccaactttcagagctgaaaaatcaaaaacacgtagacacttgatcgagttctggatgattgaaggrgaaatggctttcayaaatcatgctgaaagtttagaaattcaagaacaatatgtaacacatgtwgtaaaatcagttttagaaaattgtaaactagagttgaaaatkttagagcgtgatacatcaaaacttgaaaaagttgcgacaccattccctagaatttcatatgatgatgcaattgarttcttraaakcagaaggctttgatgatattgaatggggygaagattttggtgcgccacatgaaacwgccattgctaatcattatgatttaccggtrtttattactaattatccaactaaaattaagcctttctatatgcaaccaaatcctgaraatgaagaaactgtmttatgtgcagacttaattgcacctgaaggatacggtgaaattathggtggwtctgaacgtgtggatgacttagaattgttagaacaacgcgttaaagaacatggattagacgaagaagcatatagttactacttagacttacgtcgttatggtagtgtrccacactgtggatttggtttaggtttagarcgyacagtmgcatggatttctggtgttgaacacgttcgtgaaacwgcgccattcccaagattattaaaccgtttatatccataa

SEQ ID NO: 1641 - DNA, 264 bp, Staphylococcus aureus
atgagattagataaatatttaaaagtatcacggttaataaagcgacgtacgctagcaaaagargtaagtgatcaaggtagaattacaataaatggtaatgttgctaaagctggatcggatgttaaagttgaagatgtgctgacgattcgctttggtcaaaaattagtaacagttaaagtaactgcattaaatgaacatgcatctaaagataacgcgaagggyatgtatgaaatcattgaagagcgtcgacttgaagaagcgtaa

SEQ ID NO: 1642 - DNA, 2694 bp, Staphylococcus aureus
atgggtatggcaacctatgccgttgtggatttggaaacaacaggcaaccaattagattttgacgatatcattcaaattggtataacgtttgtgcgcaataaccaaattattgatacatatcattctatgattagaacaaatttagagattccgcckttcattcaagcgttaacatccattgaagaaaatatgctacaacaagcgccatatttyaaycaagttgcasaagaaatctacgataagataaaagattgcatttttgtmgctcataatgtagattttgatttraattttattaaaaaggcatttaaagattgtaatattcaatatcgtcccaaaaaagttatagatacactagaaatctttaaaatagcttttcctacagataaaagytatcaattaagtgaattagcrgaggcacatggtattaccttagcaaatgcccatcgagctgacgaagatgccgctactactgctaaattgatgatattagcttttgaaaaatttgaaaagttaccgttagatactttraagcaattatattatttaagtaaacagttgaaatacgatttgtatgatattttctttgagatggttaggcaatatgatgcaaagccattggataaatcgtacgaaaagttcgaacagatwatmtatcgtaagcaagttgattttaaaaagccgacaacaaattataatggcagcttgaagtctttatatagcaaagctgtagatcaacttggcttaacatatcgaccgcaacaattatatttagcggaaactatattagatcagctcatgcatagtgaaaaagcaatgattgaagcatcactaggcagtggtaaatcattagcatatttacttgcggccttgatgtataatattgaaactgggaagcatgtcatgatttctaccaatactaaattactgcaaagtcaattgttagaaaaagatattccagcaatgaatgaagcgttraattttaaaattaatgcactattgattaaaagtaaaagtgattacatttcattgggrcttattagtcaaattttaaaagatgacacaagtaattacgaagtgaatatcttgaaaatgcaattgytratttggattacagagacgccgtccggagatatacaggaattaaatttaaaaggtggtcaaaagatgtattttgaccagaaaattgaaacatatgtaccggcacgtcacgatgttcattattataattttattaagcgaaatgcacagaacattcaaattggtattacaaatcatgcacatttaattcattctgatgttgaaaattcaatatatcaattgtttgatgattgtatagtggatgaagcacatcgcttaccagactatgccttaaatcaagtgacaaatgagttgagttatgctgatattaartatcagcttggtttgattggtaaaaacgaaaatgaaaaattgttaaaggcaatygatcaactggaaaagcagcgrattttggaaaaattagatattgcaccaattgatatttttggcttgaaggctagtatgaatgagattcatgagttaaatgagcaattgttctcaacgatatttacgattatcaatgattctgatgtttatgatgatgatattcatcgcttccataatgtatttacttttgaaacaaaagacattttgaaggatttacatgcgattatcgataagttaaataaracgctagaaatattcaatggcattagtcataaaacagttaaatcattacggaaacagttgttgtatttaaaagataaatttaaaaatatcgaacaaagtttaaaagctggacatactagtttcatttcrattaaaaatytatctcaaaaatcaacaatacgtttatatgtgaaagattacgctgtaaaagatgtattaacgaaacaagtattggaaaaatttaaatcactyatttttatatctggtactttaaaatttaatcattcgtttgawgctttyaaacagttattcaacaaagatgttcactttaatacatttgaagttaacacrtcgttacaaagtgcaaaaaatacaagtgtatttataccgagtgatgtagcatcttatcaatataaaaatatagatgagtatgtagcatcgattgtaagctatattattgaatatacgactataacgtcatcaaaatgtttagtcttatttacgagttataaaatgatgcatatggtacaagatatgctaaatgaattgccagaatttgaagattatgttgtattaacacaacagcagaaccaaaattataaaatagtacaacagtttaataattttgataargccatactgcttggtacgtcaacattttttgaaggytttgattttcaagcaaatggtattaaatgtgtgatgatagcgaagttaccgtttatgaacaagcataatgcaaaatattggcttatggattctgaattcacttcaactttcaaggaatatgtattacctgatgcagttacacgttttagacaaggacttggaagattaattagaartgaaaatgatcgcggcataatagtttcatttgatgatcgactyataaacagtaattataaaaacttttttgamcaaacacttgaaaattatcgtcagaaaaaaggcgacattcaacagtttggaaaattattaagacaaattcaaaaaaagaaaaagtra

SEQ ID NO: 1643 - DNA, 1935 bp, Staphylococcus aureus
atggtgactgcattgtcagatgtaaacaacacggataattatggtgctgggcaaatacaagtattagaaggtttagaagcagyacgtaaaagaccaggtatgtatataggatcgacttcagagagaggtttgcaccatttagtgtgggaaattgtcgataatagtatcgatgaagcattagctggttatgcaaatmaaattgaagttgttattgaaaaagataactggattaaagtaacggataacggacgtggtatcccagttgatattcaagaaaaaatgggacgtccagctgtcgaagttattttaactgttttacatgctggtggtaaattyggcggtggcggatacaaagtatctggtggtttacatggtgttggttcatcagttgtaaacgcattgtcacaagacttagaagtatatgtacacagaaatgagactatatatcatcaagcatataaaaaaggtgtacctcaatttgacttaaaagaagttggcacaactgataagacaggtactgtcattcgttttaaagcagatggagaaatcttcacagagacaactgtatacaactatgaaacattacagcarcgtattagagagcttgctttcttaaacaaaggaattcaaatcacattaagagatgaacgtgatgaagaaaacgttagagaagactcctatcactatgagggcggtattaaatcktaygttgagttattgaacgaaaataaagaacctattcatgatgagccratttatattcatcaatctaaagatgatattgaagtagaaattgcgattcaatataactcaggatatgccacaaatcttttaacttacgcaaataacattcatacgtaygaaggtggtacgcatgaagacggattyaaacgtgcattaacgcgtgtcttaaatagttatggtttaagtagcaagattatgaaagaagamaaagatagactttctggtgaagatacacgwgaaggtatgacagcaattatatctatcaaacatggtgatcctcaattcgaaggtcaaacgaagacaaaattaggtaattctgaagtgcgtcaagttgtagataaattattctcagagcactttgaacgatttttatatgaaaatccacaagtcgcacgtacagtggttgaaaaaggtattatggcggcacgtgcacgtgttgctgcgaaaaaagcgcgtgaagtwacacgtcgtaaatcagcgttagatgtagcaagycttccaggtaaattagccgattgctctagtmaaagtcctgaagaatgtgagatwttcttagtcgaaggggactctgcyggrgggtctacaaaatctggtcgtgactctagaacgcaggcgattttaccattacgaggtaagatattaaatgttgaaaargcacgattagatagaattttgaataacaatgaaattcgtcaaatgatcacagcatttggtacaggaatyggtggcgactttgatctagcgaaagcaagatatcacaaaatcgtcattatgactgatgccgatgtggatggagcgcatattagaacattgttattaayattcttctatcgatttatgagaccgttaattgaagcaggctatgtgtatattgcacagccaccgttgtataaactgacacaaggtaaacaaaagtattatgtatacaatgatagggaacttgataaacttaaatctgaattgaatccaacaccaaaatggtctattgcrckatacaaaggtcttggagaaatgaatgcagatcaattatgggaaacaacaatgaaccctgagcaccgygctcttttacaagtaaaacttgaagatgcgatygaagcggaccaaacatttgaaatgttaatgggtgaygttgtagaaaaccgtagacaatttatagaagataatgcagtttatgcaaacttagacttctaa

SEQ ID NO: 1644 - DNA, 1524 bp, Staphylococcus aureus
atgatgttaaaagtgattctatatgcctacacacaatctgtattctcaggtcgtaaaatagaaaaaatgcttaatgatagcatccgaatgatgtggctatcacaaaatcaaaaaccttcttataaaacaattaatcaatttagagtaaatccaaaagtagatgctttattagaatctttatttattcaattttacagtcagtgtgtaaaacaaaatcttatagatgataaagctatttttattgatggtacaaaaattgaagcaaatgccaatcgatatacatttgtatggaaaaagagtattcaaaaccatgaatcaaagatgaatgaggattctaaagccctctaccatgaattggtaaccaataaaatcataccggaaattaaagaagatcatgataatgaattaacaaaagaagaaatagatttgattggtagtcacttagataaagaaatcgaagatttaaaccaacatatcaacaatgaaaaatgtactaaaacaagaaaacaaatacgtctcaaaagaactaaaatcaaaaaatacaaaaagcaaatcaatgattattttgagcgaaagtatcgatacgaatttcaaaaatctattttaaaggatagaaatagttattctaagacagattatgatgcgacatttatgagaatgaaagaagatcacatgaaaaatggacaacttaagccagggtataatttacaaatagcaacaaattcccaatttgttttatcttataatgtgtatcaaaatccaacggatactagaacgatgattccatttttaaattcaattcaagagacctacggtcatttacctgaatatattgtagctgatgcaggttatggtagtgaatcaaattataaggcaattatagatgactttaatcgaacgccactcataacatatggaatgtttataaaagataaaactaaaaaatataaaagtgacatctttaatactcaaaattggaactatgacgaaattaatgacgaattcatttgtccgaataataaacggctaggttttaaaagatatgcctatcgtcatgataagtatggttataagcgagacttcaaattatatgaatgtgatgattgttcagaatgtcctctgaaaaatcaatgtatgaacttcaattcaaaaacaaacaaaaaaataatgaagaattataactgggaatattttaaatcccaaattaacaaaaagctttcagaaccagaaacaaaaaatatctacagtcaaagaaaaattgatgtggaacctgtttttggatttatgaaggctattttgggtttcactcggatgtctgtccgaggactcaataaagtcaaaagagaacttggttttgtattaatggcacttaatataagaaaagtagtagctcaacgagctgaaaataatcaaaaaatttataaaaaagacaatttctatattatttcaatagaaattgtcttttttcacttatccaagaactttatgtcccggactcattatgatttatttttttattgctga

SEQ ID NO: 1645 - DNA, 1335 bp, Staphylococcus aureus
atgttttttaaacagttttacgataatcatttatctcaagcatcatatttagtgggttgtcaacgtacaggagaggcaataataatagaccctgttcgtgatttatcgaaatatatagaagttgcagattctgaaggtttaacaattacacaagctacagaaacacatattcatgctgattttgcttcaggaattcgtgatgtggctaaacgcttaaatgcaaatatatatgtgtctggcgaaggtgaagatgcattagggtataaaaatatgccatcaaaaacacaatttgttaaacatggagatatcattcaagtaggcaatgttaaattagaagttctgcatactccaggacacacgcctgaaagtattagctttttactcactgatttaggtggtggttcaagtgttccgatgggattatttagtggtgactttatttttgttggtgatataggtagacctgatttattagaaaaatctgttcaaataaagggttctacagaaattagcgcgaaacaaatgtatgagtccgttcaaaatattaaaaatttaccagactatgttcaaatctggccgggtcatggtgctggaagcccttgtggtaaagcattaggtgccatacctatatctacaataggttatgagaaaattaataactgggcatttaatgaaattgatgagactaaatttattgaatcattaacatcaaatcaaccagcaccaccgcatcattttgcacaaatgaaacaagttaatcagtttggtatgaatttatatcaatcatatgatgtttatcctagtttagataataagagagtagcatttgatcttcgtagcaaagaggcctttcacggtggccacacaaaaggaacaatcaatataccatacaacaaaaactttattaatcaaattggttggtacttagattttgaaaaagatatagatktaattggagataaatctactgttgagaaagcgaaacacactttacaattaattgggtttgataaggtagcaggctatcgtttgccaaaatcaggcatttcaacccagtccgttcatagcgctgatatgacaggtaaagaagaacatgtattagacgtacgtaatgatgaagagtggaataatggacacttagatcaagcagttaatattccrcatggtaaattattaaatgaaaatattccttttaataaagaggataaaatatatgtacattgtcagtcaggtgttagaagttcaattgcagtgggtatattggaaagcaaaggttttgaaaatgtggtgaatattagagaaggctatcaagattttccagaatcattaaaataa

SEQ ID NO: 1646 - DNA, 957 bp, Staphylococcus aureus
atgaaaaawtttaagtrtttatttgtattaatgttagcagtcattgtttttgcagcagcatgtggaaaytcaagttctttagataatcaaaagaacgctagtaatgattcggattctaaatcaggaggatacaaacctaaagaattaacmgtwcaatttgtaccttcgcaaaatgctggaacattagargctaaagcaaaaccattagaaaaattactatctaaagaattaggrattccagttaaagtgtctgtatcaactaactacaatacaattgttgaagctatgaagtctaaaaaagttgatgttggtttcttaccaccaacggcatacacattagcacatgatcaaaaagcagctgatttattattacaagcacaacgtttyggtgtaaaagaagatggttcagcaagtaaagaacttgtagatagttataartcagaaattcttgttaaaaaagactcaaaaattaaaagcttgaaagatttaaaaggtaagaaaattgccttacaagatgtaacatcaactgctggatatacattcccacttgcgatgttaaaaaacgaagcaggtattaatgcaactaaagatatgaaaattgtgaatgttaaaggtcatgaccaagcagttatctcattattaaatggagatgtagatgctgcrgctgtatttaacgatgcacgtaatactgtgaaaaaagaccaaccaaatgtatttaaagacacacgaattttaaaattaacacaagctattccgaatgacacaatttctgtaagaccagatatggataaagayttycaagaraaattgaaaaaagcttttatagacattgctaaatcaaaagaaggtcacaaaattattagcgaagtttattcacatgaaggatacacagaaacgaaagattcaaatttcgacattgtaagagagtacgaaaaattagttaaagatatgaaataa

SEQ ID NO: 1647 - DNA, 972 bp, Staphylococcus aureus
atgtcaaaatatagtcaagatgtacttcaattactctataaaaataaaccgaattatatatctggacaaagcattgcggaatcacttaatatwtcrcgcactgcagtaaaaaargtgattgaccaattaaagttagagggatgtaaaatwgattcagtaaatcataaaggrcatttattacaacarctcccagatatttggtatcarggtataatagaccaatayacaaaaagttctgctttgtttgattttagtgaagtatacgattcaatagattctacacaacttgctgcgaaaaagtcacttgttggaaatcaatcttcattttttatcttgagtgatgaacaaacgaaaggtcgygggcgatttaatagacattggagttcttcaaaagggcaaggactwtggatgtctgtygtrttaagacctaacgttgcattctcaatgatatctaaatttaatttatttattgcattagggataagagatgcgattcaacattttagtcaagatgaagtcaaagtgaaatggccgaatgatatatwtattgataatggtaaagtgtgtggtttcttaactgaaatggttgctaataatgatggtatagaagcaataatatgtggtataggtattaatttgacgcaacaactagaaractttgatgaaagtattagayatagagcaacaagtrtacaattacatgataaaaataaattagatagatatcaatttttagagakattacttcaagaaattgaaaaaagatataatcaatttttaacgttacctttttctgaaattcgtgaagaatataytgcagcttctaatatytggaatagaacgttgctatttacagaaaatgataaacagtttaaaggacaagcaattgatttagattacgatggctatctaattgttagagatgaagcgggtgaatcacaccgtttaattagtgcagatatagatttttaa

SEQ ID NO: 1648 - DNA, 402 bp, Staphylococcus aureus
atgtcaatcgaagttggaaataagcttaaaggtaaagtcactggtattaaaaagtttggtgcattcgtagaattacctgaaggaaaaagtggtttagttcacattagtgaagtcgcarmtaattatgttgaaaacgtagaagakcacctttctgttggtgatgaagtagacgtraaagtattatctattgctgatgatggaaaaattagtctttcaatwaagaaagctaaagaccgtccacgtagacaacatacgagtaaaccaagtcatcaaaaaccagtgcaaaaagccgaagattttgaaaagaaattaagcaatttcttaaaagatagtgaagataaattaacttcaatcaaacgtcaaacagaatctagacgcggtggcaaaggttcwagacgttaa

SEQ ID NO: 1649 - DNA, 1101 bp, Staphylococcus aureus
atgggaagaaatattcatgatatagatatcacaacaagtgcaacgccrgatgaaatagaatctatctttagtcatacgatacctgtaggtaaagaacatggcacsataaatgtagtttttaatgatgaaaattatgargtgacaacattccgggctgaagaagattatgtcgatcaccgtagaccaagtggtgttacatttgttcgkgatttatacgaagatttgcaacgamgagatttcacgatgaatgcgatagcaatggatacagcawacaaattgtatgattattttgatggtcaacaagatattaataatcgaataataagaactgtaggtatagctgaggaacgattccaagaagatgctttacgtatgattcgatgtttaagrttccagtcacaattatcatttgatattgcaayggaaacattygaagcgatgcgtayacaaatggcagatattaaatttttatcaattgagcgtatagtgattgaactaactaaattaatgcgaggtattaatgttgaaragagttttaatcatttaaaatcgctgaaagcatttaattatatgccrtatttcgaacawcttgatatgaatcaaattaatgtractgaascaattgatttagaattgttgattgctatagtrtcagttaaatttgatattaattactcattgaagcctttaaagctaagtaaccgacaagtaaaagatatcaatcaatatattcaaattatgaatgcattaccaagtattattacaaaagaacaattaaaaatgtttgtttatgattatgatacgmatctcattaaaaatgtaatggttgcagcagacgtgwtaaaggcaaatgatattcaaggacatgaaccattaatcgttaaccttcaaacgattgatgaaacattacatcgtttacctatgcataatagaaaagacatgatggttaatggcggtgtacttatggcacatttaaatgcyaaaagtggtccgtggttaaaagatstgctaagacaaattgagatagcgattgtaacwggtaaagtaagcaacgaagaaactgaaattttgaaatgggtggataatcatgtcaaaatatag

SEQ ID NO: 1650 - DNA, 1296 bp, Staphylococcus aureus
atgcagttaaatagtaatggttggcatgttgatgaccatattgttgtcgctgtttctacaggtattgatagtatgtgtttattgtatcaactactaaatgattataaagatagttatagaaaactaacatgyttacatgtcaatcatggcgttaggtcagcttcaatygaggaagccagatttttagaagyatactgcgaacgtcatcacatygatttacatatcaaaaagttrgatttgtcgcatagtctcraycgaaataacagcattcagaatgaagctcgaattaaacgttacgaatggtttgatgaaatgatgaatgtattagaagcggatgtattgctaacggcgcatcatttggacgatcaattagaaactattatgtatcgyatttttaatgggaaatcaacrcgtaataaactaggatttgatgagttrtcgaagcgaaawggttatcagatttatcgaccacttttagctgtctctaaaaaagaaataaaacaattccaagagagatatcatatwccatattttgaagatgaatctaataaagataacaaatatrttagaaatgatattcgtaatagaattattccagctattgatgaaaataatcaacttaaagyatcgcatttattaaaattaaaacaatggcatgatgaacaatatgatattttgcaatattcagctaaacaatttattcaagaatttgtgaagtttgatgaacagtcaaaatatttagaggtttctagrcaagcttttaataacttrccaaactcattaaagatggttgtgttggaytgcctaytatcaaagtattatgagttgtttaatattagtgctaaaacatacgaagagtggtttaaacaatttagtagtaagaaagcacaattcagtattaatctcacggataaatggataattcaaatygcatatggtaaattaataataatggctaaaaataatggcgatacatattttagagttcaaacwattraaaagccaggtaattatwtttttaacaaatatcgattagagatacattctaatttaccaaaatgtttatttccrcttacagtgagaacacgacaaagtggcgatacatttaaactgaatgggcgcgatggttataagaaagtraatcgcctgtttatagattgtaaagtgcmacagtgggttcgggatcaaatgccaatcgtattggataaacaacagcgcattattgcggtaggagatttatatcaacaacaaacaataaaamaatggattataattagtaaaaatggagatgaatag

SEQ ID NO: 1651 - DNA, 1143 bp, Staphylococcus aureus
atgaagataggtataacatgttacccgtccatgggtggytctggaattattgccacagaattaggaattraattagcagagcgaggtcacgaagtacattttatcacttcaaatatcccgtttagaataagaaaaccattrccgaatatgatttttcatcaagttgaagtgaatcaatatgcagtwtttcartatccaccgtatgatattacgttaagtactaaaatcgctgaagttattaaagaatatgrtcttgatttgttgcatatgcactatgctgtacctcatgcaatttgtggrattttagctcgtgagatgtcaggtaaagatataaaaattatgacaacgctacacggtactgatattactgttttgggctatgatcattcactccaaggtgcaattaaatttggcattgaaaaaagtgatattgtgacaagtgtgagtaaatctttagcrcaagaaacacatgaaattatygaaactaacaaagaaattataccgatttataattttgtacgtgaaaatgagtttccaactaaacataacacagcattaaaatcacaatttggtatagcaccagatgaaaaagtgttaatacatgtatcgaattttagacaagtaaaacgcatagatactattatagaaacatttgcaaaagtacgtgaaaagatacctagtaaattaattttacttggwgatggtcctgaattagtgccaatgcgtcaawwgacgaaagagttaaacgtagaagargatgttttatttttagggaaacaagattgygtaagtgaattttaycaattatctgacttagtattattattaagtgaaaaagaaagctttggactaactttacttgaggctatgaaaacaggcgtcgttccaattggttcaaatgccggtggaattaaagaggttattaaacatggtgaaactggatttgtygtagatgtgggtgatwgtgattcagcgagtgactatgctatccgwttacttgaagayaaggygttatacaacaaacttcagaaaaacatgctagcagatattgctgaacgttttggatcagaactyattacagatcaatatgagtattaytatcaaaaaatgctaaatgagcataacaaaagtaaaggcgagtaa

SEQ ID NO: 1652 - DNA, 540 bp, Staphylococcus aureus
atgcataatgatttgaaagaagtattgttaactgaagaagatattcaaaatatctgtaaggaattgggagcacaattaacaaaggattatcaaggtaaaccattagtatgcgtgggtatcttaaaaggctcagcaatgtttatgtcagatttaattaaacgaattgatacccatttatcaattgatttcatggatgtttctagttatcacggaggcactgagtcaactggtgaagttcaaatcattaaagatttaggttcttctattgaaaataaagacgtattaattattgaagatatcttagagactggtactacacttaagtcaattactgaattattacaatctagaaaagttaattcattagaaatagttactttattagataaaccaaaccgtcgtaaagcggacattgaagctaagtatgtaggtaaaaaaataccagatgaatttgttgttggttacggtttagattatcgtgaattataccgaaacttaccatatatcggtacgttaaaacctgaagtgtattcaaattaa

SEQ ID NO: 1653 - DNA, 318 bp, Staphylococcus aureus
atgaaatcaatggtagaaatgcaacgtgaagttgatgaatatattggacaatttaaaacaggatatttttcaccattagctaacttagctagattgactgaagaagtgggcgaacttgcacgtgaaataaatcatacctatggtgaaaaaaagaagaaagattcagaggaagcaaatacgattaaagcagaattaggtgataatttatttgtgttgttatgtttagcgaattcaatgggaatagatatgacagagagctttaatgaaacwatggaaaagtttaatacaagagataaaaatcgattcraaagaaagtga

SEQ ID NO: 1654 - DNA, 2094 bp, Staphylococcus aureus
atgcagaaagcttttcgcaatgtgctagttatcgtaataataggcgttattatttttggtctattttcatatttaaacggtaatggaaatatgccgaaacagcttacatataatcaatttactgagaagttggaaaaaggtgaccttaaaactttagaaatccaaccacaacaaaatgtctatatggtaagtggtaaaacgaaaaatgatgaagactattcatcaactattttatataacaacgaaaaagaattacaaaaaattactgatgctgctaaaaagcaaaacggtgtaaaattaacgattaaagaagaagaaaaacaaagtgtctttgtgagtatactttcaacattaattccagttgtagtcatagcgttattatttattttcttcctaagccaagcacaaggtggcggtagtggcggtcgtatgatgaactttggtaaatctaaagcaaaaatgtacgataataataaacgtcgtgttcgtttctctgatgtagcaggggcagatgaagaaaaacaagaattaattgaaattgttgatttcttgaaagayaataaaaaattcaaagaaatgggatctaggattcctaaaggtgtcttacttgttggacctccaggtactggtaaaacattacttgctagagcggttgcaggtgaagcwggcgcaccattcttctctattagtggttcagactttgtagagatgtttgttggtgttggtgcgagccgtgttcgtgacttattcgataatgctaagaaaaacgcgccttgtatcatctttatcgatgagattgatgctgwtggtcgtcaacgtggtgcakgtgttkgtggcggtcatgatgaacgtgaacaaaccctaaaccaattattagttgaratggatggwttcrgtgaaaatgaaggtatcattatgatagctgctacaaaccgtcctgatatscttgacccagccttattacgtscaggtcgttttgatagacaaattcmagttggtcgtccagatgtgaaaggccgtgaagcaattcttcatgttcatgctaaaaaymaaccmcttgatgaaacggttgatttaaaagcratttcacaacgtacacctggtttctcaggtgctgatttagaraacttattaaatgaagcatctttaattgctgtacgtgaaggtaaaaagaaaattgacatgagagatatcgaagaggcaacggatagagttatagccggacctgctaagaaatctcgagttatttctaagaaagaacgtaatattgttgctcatcacgaagctggtcatacaattatcggtatggtacttgatgaggcagaagtagtgcataaagttactatygttccacgtggacaagcwggtggttatgcaatgatgctacctaaacaagatcgtttcttaatgactgaacaagagttattagataaaatctgtggtttacttggtggacgtgtatcagaagatattaactttaacgaagtatcaacaggtgcttcaaatgacttcgaacgtgcaacacaaatcgcacgctcaatggttacgcaatatggtatgagtaaaaaattaggrccattacagttcggtcatagcaatggtcaagtattcttaggtaaagatatgcaaggtgagcctaattattcaagccaaatcgcatatgaaattgataaagaagttcaacgaatcgttaaagaacaatacgaacgttgtaaacaaattttattagagcacaaagaacaattaattttaattgctgaaacattattaacagaagaaacattagttgctgaacaaattcaatcattattctacgaaggtaaattacctgaaattgattatgatgcagctaaagttgttaaagatgaagattctgaatttaatgatggtaaattcggtaaatcttatgaagagattcgtaaagagcaattagaagatggacaacgtgacgaaagtgaagatcgtaaagaagaaaaagatattgctgaggataaaaaagaagctgataaatctgatgaaaaagatgaaccagcacatcracaagccccaaatatcgaaaaaccttacgatccaaatcacccagacaataaataa

SEQ ID NO: 1655 - DNA, 708 bp, Staphylococcus aureus
gtgagtttattgtcttcaatttttactatgataatttatttcgtaatattaatggtgcttcctttatgggcacaacacaaagttaaatctaactatgagaaatattcacaagttagatcaactagtggtaaaacgggtcgtgaagttgcattagarattttacatgcaaacggtatttatgatgtcgaagttgttaaaggtgaaggattcttaacagatcattacgatcctaaaaagaaagttgtttcactatctcctgcaaactatgacagaccatcagttgctggaactgcaattgcagcccacgaagttggtcatgccattcaagatcaccaaggatattggttcttaagattcagagcagcattagtacctgttgcaaacctagggagttcattaagttatatgatcatcatgttaggtattatcttaacagcgataggtagtgcatttggttcaactgctttatggattggtgctggtttaatgtcattagcggtattattctcaattgttacgttaccagttgagtttgatgcgagttcaagagcgatgaaacaaattacggcattgaacattgtaaatgaaaargaatacaarcatgcgcgtaaagtattatctgcagcagcaatgacttatgtwgcagcaactgcwgtcgctgtagcagagcttgtacgtatyattttgmttgcgcgttcaagtgattaa

SEQ ID NO: 1656 - DNA, 882 bp, Staphylococcus aureus
atgacacacgattatattgttaaagcattagcatttgatggrgagattagggcttatgctgctttgacaactgaaactgttcaagaagcacaaacgagacattatacatggccgacagcatctgctgcaatgggaagaacaatgacagcaacagctatgatgggcgcaatgttgaaaggtgatcaaaaattaacwgtcactgtagatggccaaggacctattggacgaattattgccgatgcaaatgctaaaggcgaggtgcgtgcttatgtagaccatccacaaactcattttccattaaatgagcaaggtaaacttgatgtaagacgagcrgtagggacaaatggatctattatrgttgttaaagacgttggaatgaaagactatttctctggagcaagtccaattgtttcaggagaacttggtgaagattttacttattattatgctacaagtgaacaaacaccttcatcggtaggtcttggtgtattggtaaatcctgataatacgattaaagcagcaggaggatttatcattcaagttatgccaggtgcyaaagatgaaacaatttcaaaattagaaaaagcaattagtgaaatgacaccagtttctaaattaattgaacaaggattaacgccagaaggattactaaacgaaatcttaggtgaagaccatgtgcaaattttagagaaaatgcctgttcaatttgaatgtaattgtagtcatgagaaatttttaaatgctattaaaggattgggcgaggctgagattcaaaatatgatyaaagaagatcatggtgctgaagcagtatgtcatttctgtggaaataaatataaatatactgaagaagaattaaacgtgttgctagaaagtttagcgtaa

SEQ ID NO: 1657 - DNA, 588 bp, Staphylococcus aureus
atgacrattaawrmaytttggcaatatacwctttatcaacgttcttggytaatgatgctactcatttgtaatatattagggatgatttatggttatatatggtatggtgaacaattaagtcatacgccstggcaktttaagatttttgttccagatagcccaactgcaatattatwcttagttatttcwatctcawtgatattaathcaaaaacaaaatagtattatcgawgcactggcatttgtaacattattcaaatatgggatttgggcagttatwatgaatatattatttattattgarcaaggtgatattacagtaaatggyytgrtattaatgttttcccayagtataatggcygttcaggcaatttacttctatcctaggtttaaacgttctatgattggaatyagtgtagcgatgayttgggtrtttttgaatgattatattgactattttcaccttcaatttccatattatgattttataactacacatgtgtggcaaattggtgtattatcatgttgtctragtgtttttggacttttgctttatattgaattaaacaaattattaaagtgtaaatga

SEQ ID NO: 1658 - DNA, 933 bp, Staphylococcus aureus
atggcacaaaaaccagtagataatattactcaaattattggcggtacaccggtagtcaaattgagaaatgtagtagatgayaatgcagcagatgtttatgtaaaattggaatatcaaaatccaggtggttctgtaaaggatagaattgctttagcaatgattgaaaaagcagagcgagaaggcaaaattaaacctggcgayacaattgtagaaccaacwagtggtaatacaggtatcggtttagcatttgtatgtgctgctaaaggatataaagcagtatttactatgccygaaacaatgagccaagagcgtcgtaatttattaaaagcatacggtgcggaattagtyttaacgcctggatcagaagcgatgaaaggtgcaattaaaaaagctaaagaattraaagaagaacatggttacttcgagccacaacaatttgaaaaccctgcgaaccctgaagttcatgagttaactacaggtcctgagttattacaacaatttgaagggaaaactatcgatgcgttcctagctggtgttggtactggyggtacgttatctggtgtaggtaaagttctgaaaaaagaatatcctaacatcgaaattgttgctatagagcctgaggcttctccagtattgagcggtggtgagccaggtccacataaattacaaggtttaggtgctggatttattccaggyactttgaatacagaaatctatgacagtattattaaagtaggaaatgatacagcgatggaaatgtctcgtcgagttgctaaagaggaaggtattttagcaggtatttcatcaggtgctgcgatttatgctgccattcaaaaagcaaaagaattaggaaaaggtaaaacagtagtaacagtattgccgagtaatggtgaacgctacttatcaacacctttatattcwttcgatgactaa

SEQ ID NO: 1659 - DNA, 576 bp, Staphylococcus aureus
atgtcagagacaytcaatcaaattaaagaaagttttattgaatatttactttttcaatatcgatttaagtcgcgtattgcagtttgggtgcttaactatataaaagtgaatgaggcgaaattggcaaacattcattttgtagatacaaaaattaatcatcatgaaacattagaaattgcagargtgggaagtcacgcttctgcaattcaatttactaagcrtaatataaagttaatgaatacaaatgaaatatttgattatatcgctaatcataackgtgcttttgatattcaaattcacttcgcaaacgtgtcaaagcgtgagcaaaggctagatgatttaatagttgctcaactaacggaatcgcccagytatcaaacttatcttcatgayttaaatagtatggctatagatcggcataaacatgcgttattaatagattacttgytacayaatattgatttaagtttacagatgaatgaaaagcaacgtttttatcaactaacgcaaattttaaatacactcaagctagtaaataaacataatcaatttgaggacttagcagatgacrattaa

SEQ ID NO: 1660 - DNA, 654 bp, Staphylococcus aureus
aygagaccmggycatgaaatgrttwcwktrgaagaagaghtgaayagagtattaccwgttgttgaagckattgtcggttttgatgtaaaaatttcrgtygatacwtttcgwagtgargttgctgaagcwtgtttaaarytaggygttgatatkattaatgatcaatgggcrggyctktatgatcatcgyatgttycaarttgtagcyaaataygaygcggaaattrttttaatgcataatggmaatggtaatcgtgatgaaccggttgtcgaagaaatgttaacatctttgttagcacaagcacatcaagctaaaatagctggtataccttcaaataaaatttggctagatccaggtataggtttcgctaaaactagaaatgaagaagccgaagttatggcaagactggatgaacttgttgcaacagaatatccagttttattagcgacaagccggaaacgtttcactaaaragatgatgggttatgatacaacaccggttgaaagagatgaagtaactgcagctacgactgcatatggtattatgaaaggcgttagagcagtacgcgttcataatgtcgagttgaatgctaaattagctaaaggtatagattttttaaaggagaatgaaaatgcaagacacaatytttcttaa

SEQ ID NO: 1661 - DNA, 1104 bp, Staphylococcus aureus
atgccacaaggtttrgaagtattycgcgtgttatatcacaaatatccagacgaaagtgaattgctgatttattttattgaaggtttaatgtctgaaaatcaaactgacgaagcgttagaatatttaagttatgttgaaccatcacctgaaaagttgatgttagaagcagatttatatcaacaaattaatatgatggaagttgctattgmtaaattacaagaagcacttgaactagagccaaatgatccaataatccattttgcrttggctgaaatgttatattatgatggtcaatatttacgtgctacctctgaatacgaaacygttttagaaactggtgaatatcaagttaatggtgtaaacttattctctcgtatggcagattgtagyttacaaagtggtaactatagtgatgcgattcgcttatacgatgaaattaatgaagatgaaatgacttcagaagattatctcaaaaaagccatttcttacgataaaaatgacatcactcaagaagcaattaaaataatgactacattactttctaaagatcctgattatattcaaggctacttgtatttacaatcattatatgaaaatgaaaaaaattatccagatgccattgaracgggtaaagarggattacgactaagtcaattttataaagagttaatgtatacaactggatgtttggaaatagaacacggcgatgctaatgaaggtgtattattgttaaracaagcattagaggttgataatgcttaccaagaaccwttattgattttaagcgatttatatcgtaatgaagaagattatgaagcaatcattgaattattaacatatgtagatgaagaagatttggatcctacattcatstggcatttagcgttcgcctatggtcaagaagagcgagataaagaagctcaacatttctttgaattagcatatccaackatgaaaacaaatattgattttatgagtgattattatttctatttaaytgaaattggtcaaawrgaacaagcaattactattttaaatcaattgttggaactagarccaagtaacgaaaattggcatgacgaattatcaagattrcaatcttaa

SEQ ID NO: 1662 - DNA, 366 bp, Staphylococcus aureus
atgcaagacacaatytttcttaaaggtatgcgcttttatggatatcatggtgctttatcagctgaaaatgaaataggrcaaattttcaaagtggatgtamctttgaaagtagacttakctgaagctggkcgtactgataatgttattgatacagttcattatggtsaagtgttcgaagaggttaaatcaattatggaaggtaaggccgttaatttacttgagcatctagctgaacgtattgcaaatcgtataaattcacaatataatcgtgtaatggaaacraaagtgagaatcactaaagaaaacccaccgattccgggtcattatgatggagtaggtatcgaaatwgtgagggagaataaatga

SEQ ID NO: 1663 - DNA, 1299 bp, Staphylococcus aureus
atggtaartgaacaaatyatygatatttcaggkccsttaaaggkcgaaatagaagtgcckggmgataartcratgacacaycgwgcaatcatgttrgcrtckytagctgaaggwrywtcyamtatwtataarccaytacttggygaagattgtcgtcgtacratggayatwttccgaywvttaggygtagawatyaaagaagatgawgawaaattrgttgtgamttcmccwggatatmaakcttttaamacrccwcatcaagtwttrtatacwggwaaytctggyacracracwcgattrttrgcwggtttgttaagtggtttaggtawtgaaagtgttttgtctggcgatgtttcmatwggtaaaaggccratggatcgtgtyttragaccrttraaamktatgratgcraatattgaaggwattgaagayaattayacmccattaatyattaarccatctgtmatwaaaggtatwaattatcaaatggaagtkgcaagtgcacaagtraaaagtgccatyttattygcaagtytrttttcwaakgawvcracsrtmatwaargaattagatgtaagtcgaaatcatactgagacgatgttcaracattttaatattccaattgaagcagaarggttatcaatwamtacaayccctgawgcmattcrayayattaaacctgcagattttcatgttcctggcgatatttcatctgcagcgttctttattgttgcagcacttatcacaccagraagtgatgtaacaattcataatgttggaatcaatcmaacacgttcaggtattattgatattgttgaaaaaatgggcggtaatatycaacttttcaatcaaacaactggtgctgaacctactgcttctattcgtattcaatacacaccaatgcttcaaccaataamaatcgaaggagaattagtkccaaaagcaattgatgaactgcctgtaatagcattactttgtacacaagcagttggcacgagtacaattaaagatgccgaggaattaaaagtaaaagaaacaaatagaattgatacaacggctgatatgttaaacttgttagggtttgaattacaaccaactaatgatggattgattattyatccgtcagaatttaaaacaaatgcaacagwkgatagtttaackgatcatcgaataggaatgatgcttgcagttgcttststactttcaagcgarcctgtcaaaatcaaacaatttgatgctgtaaatgtatcatttccaggatttttaccaaaactaaagcttttasaaaatgagggataa

SEQ ID NO: 1664 - DNA, 477 bp, Staphylococcus aureus
atgattcaagcatacttaggattaggtagtaatattggtgatagagaaagccagttaaacgatgctataaagattttgaatgaatatgatggtattarcgtatctaatatttctycgatttatgaaacagcaccagttgggtatactgagcaacctaactttttaaatttgtgtgttgarattcaaacaacactcacagtattacaactgttggaatgttgtttgaagacagaagaatgtttacaccgtrttagaaaggaacgatggggtcctagaactttagatgtggatattttgttgtatggagaagaaatgatagatttaccaaawctgtcggtgccacatccgagaatgaatgaacgtgcatttgttttaatcccattaaatgatatagcagcaaatgtcrtagaaccacgttcgaaattgaaagtgaaagatttagtttttgtmgatgacagtgtaargmgatataaataa

SEQ ID NO: 1665 - DNA, 1065 bp, Staphylococcus aureus
atgaaattacaaacaacmtayccttcaaayaattatccaatatwtgttgaacryggtgcaattgaccatattagcacgtatattgatcagtttgatcaaagttttatattaattgaygaryatgtaaatcaatattttgckrataaatttratgatattttatcatatgaaaatgtrcataaagtyattattccagcwggtgaaaagacraaaacatttsakcaatatcaagaaacattagartayattttrtchcatcatgtracdcgtaatacagcrattatwgctgttggtggtggtgcracwggwgattttgcwggrtttrtwgcrgcracactwttamgaggygtbcaytttatacaagtkcchacrackatwytrgcgcatgattctagtgttggcggtaaagtgggtattaactcaaarcaaggtaaaaaccttatcggtgcattttatcgtccaactgctgtkatttatgatttagwctttttaaagacgttaccatttgagcaaatattaagtggctatgcagaagtttataagcatgcgttattgaatggtgaatcarcgacgcaagawatcgaacagcactttaaagatagagagatattacagtcattaaawggtatggataaatatattgctaaaggtattgaaacgaagctrgatattgttrttgcagatgaaaaagaacaaggtgtacgtaaatttttaaatttaggtcatacatttggkcatgcygtkgartaywaycayaaaatwscwcayggtcatgcmgtratgrtwggcatwatmtatcaatttatwgttgcgaatrywttrttyrattctaakcaygawatymawcattatattmawtatttaayrmaaythggytatcctttagamayrataacygacwtrgatttygaaacgwtataysaatayatgctaagtgataaaaagaaygayaarcaaggwgtwcaaatggtmttgattaracawtttggmgatatygtwgtrcaacayrttgatcaamyaacaytrcaacatgcrtgtgaacaaytaaaaacatattttaagtag

SEQ ID NO: 1666 - DNA, 1194 bp, Staphylococcus aureus
atgaataagcattatcaaattgttattattggtggcggtacagcaggtgttaccgtagcatcaagactattaagaaaaaatcaaaacttaaaagagaaaatagcaattatagayccagcagaccatcattactatcaaccattatggacgttggttggtgcaggggtatctagtttgaaaagttctcgtaaagatatggaaagtgttatacctgaaggtgctaactggataaaacaggctgtttcaagttttcaacctgaaaataatagcgttattttaggagataatacagtcgtttattatgattttttagtagtagctccaggattacagattaattggtcttcaattaaaggactaaaagaaaatataggtaaaaatggtgtttgctctaactattcacctgactatgttaacgaaacttggaaccaaatttctaattttaaacaaggaaatgccatttttacgcatccaaacactcctataaagtgtggaggtgcgcctatgaaaattatgtatttagctgaagattattttaggaaacataaaatccgttctaacgctaatgtgatatatgcaacgccaaaagatgctttatttgacgtaggaaaatataataaagaattagaaaggattgttgaagaaagaaatataacagtcaattataattataaccttgttgaaatcgacggtgacaaaaaagtggctacattcgaacatatcaaagcatacgatagaaaaacaataagttatgatatgttacatgtaacaccacctatgggtcccttagatgtagtaaaagaaagtacactttcagatagtgagggttgggtagatgttaacccaaccacattacagcataaaagctactctaatgtatttgcacttggtgatgcttcaaatgtacctacttcaaaaacaggcgcagctattcgtaagcaagcacctatcgtcgctaataatttattgcaagtgatgaataatcaaatgttaacgcatcattatgatggttatacttcatgccctattgttactggatataataggttaatacttgcagagtttgattataataaaaatactaaagaaacaatgccgtttaatcaggccaaagaacgtagaagtatgtatatatttaagaaagatttattacctaaaatgtattggtacggcatgctaaaaggattaatataa

SEQ ID NO: 1667 - DNA, 102 bp, Staphylococcus aureus
atgatattaataatgtacaaaaaatataaatcaaatcgacatccttataaaacatcagaaccactaaaaacaaaaaagcacaaaataaaattaaatttaaaa

SEQ ID NO: 1668 - DNA, 90 bp, Staphylococcus aureus
atggttaatgrtaaagtattagaaacatcgaaagagatgtatgttgagcaaaaatgtctgatattttataaaactttaaaggaaaatgtt

SEQ ID NO: 1669 - DNA, 1167 bp, Staphylococcus aureus
atgagatayctaacwtcwggagaatcacatggacctcaattaacagttattgtygaaggtrtaccwgcaaatwtagaarttaargttgargatattaataaagaaatgttyaagcgtcaaggbggttayggwcgtggmcgwcgyatgcaaattgaraaagatacagtrgaratwgtwtcrggygtwagaaatggttatacattaggtagyccwattacwatggttgtwacyaatgatgaytttacrcattggmgaaaaattatgggmsswgckccaataagygahgaagaacgwgaaaatatgaaacgtacwattacraarccaagacckggwcatgcagatttrsttggmggtatgaaatataatcatcgtgayttacgaaatgtrytagarcgwtcatctgcyagagaaacagcagcwcgwgtwgcrgtcggtgcmytatgyaaagtkttattasaacarttagatatcgawatatacagtcgtgttgttgarataggtggmattaaagataaagatttttatgattcaraaacatttaaagcaaaycttgatcgwaatgaygtycgtgtaattgatgayrgyatcgcacaagcaatgcgmgataaaattgaygaagckaaaamhgawggwgattcaatwggsgghgtmgttcaagttgtagttgaaaatatgcctgttggtgtwggtagttatgtrcattatgatcgtaarttagatggtaagatwgcacarggtgtygtyagyatwaatgcwtttaaaggtgtaagytttggwgaaggatttaaagcagctgaaaagccwggtagygarattcaagaygaaattctmtayaatastgaawtkggytattatcgtggrtcwaatcayttaggtggtttagarggyggtatgtcaaatggwatgccaattatygtwaatggtgtaatgaaaccwattccwacgttatataaaccattaaattcagtwgayatwaatactaaagaagactttaargcaacaattgaacgttctgatagttgtgctgtwcctgcagcaagtatmgtstgygaacaygtygtwgcatttgmaatwgcraaagcattaytkgaagarttycaatcaaaycatattgarcaacttmaacaacaaattrytgascgcagacaattaaatrttgagttttaa

SEQ ID NO: 1670 - DNA, 1488 bp, Staphylococcus aureus
atgtcagaagaaatgaatgaccaaatgttggttcgacgtcaaaaattacaagaattatatgatcttggtatagacccgtttggttctaaatttgaccgttcaggtttatctagtgatttgaaagaagagtgggaccagtattctaaagaagaattggtagaaaaagaagcggatagtcatgtcgctatagctggacgattaatgactaagcgtggtaaaggtaaagcaggatttgcacacgttcaggacttagctggacaaattcaaatwtacgttcgtaaagatcaagttggcgatgacgaatttgatttatggaaaaatgctgatttaggcgatatcgttggtgttgaaggtgtaatgttcaaaacaaatactggcgaattatcggttaaagcgaagaaattcacgctactaactaaatcattgcgaccattaccggataaattccacggtttacaggatattgaacagagatatcgtcaaagatatttagatttaattacgaacgaagatagcactcgtacatttattaatcgtagtaaaatcattcaagaaatgcgtaattatttaaataataaaggtttcttggaagtagaaacacctatgatgcaccaaattgctggtggmgcagctgctagaccatttgtaacacatcataatgcattagatgcaacgttatacatgcgtattgctattgagttgcatttaaaacgtttaattgtcggtggacttgaaaaagtatatgaaattggtagagtattccgtaatgaaggtgtatcaactagacataaccctgaattcacaatgattgaattatatgaagcatatgcagattatcatgacattatggatttaacagaatctatggtgagacatattgccaatgaagtrttaggttctgcaaaagtacaatacaatggggaaacgattgatttagaatctgcttggactcgtttgcatattgttgatgctgtaaaagaagctactggtgtrgatttttatgaagttaaaagtgatgawgaasstaaagctttagctaargaacatggtattgaaattaaagatacaatgaaatatggtcatattttaaatgaattctttgagcaaaaagttgaagaaacacttattcagccaacgtttatctatggtcatccgactgaaatttcacctttagcgaagaaaaatcctgaagatcctagatttactgatcgtttcgaattgttcattgtaggtagagagcatgcaaatssatttactgaattaaatgatcctattgatcaaaaaggtcgttttgaagcgcaacttgytgaaaargcgcaaggtaatgatgaagcgcatgaaatggatgaagattacattgaagcgttagaatatggtatgcctccgacaggtggtcttggtatcggtattgacagattrgttatgttattaactgaytctccatcaatcagagacgtrttattattcccttatatgagacaaaaataa

SEQ ID NO: 1671 - DNA, 201 bp, Staphylococcus aureus
atgaagaatattatttcgattattttggggattttaatgttcttaaaattaatggaattactatatggtgctatatttttagataaaccacttaatcctataacaaaaattatttttatactgactctcatttatattttttatgtattagtaaaagaattgattatatttttgaagtcaaagtataacaaaagcgcttaa

SEQ ID NO: 1672 - DNA, 888 bp, Staphylococcus aureus
atgagtaaaattattggatcagacagagtcaaaagaggtatggctgaaatgcaaaaaggcggcgttattatggatgtcgttaatgctgagcaagcaagaattgcagaagaagcwggcgcggtagcagttatggcattagaacgagtaccttctgatattagagctgctggtggygttgcacgtatggcaaaccctaaaattgtagaagaagtaatgaatgctgtttctattccagtcatggctaaagcacgtattggtcatatcactgaagcaagagtattagaggcgatgggtgttgactatattgatgaatcagaagtgttaacaccagcagatgaggaatatcacttaagaaaagatcaatttacagtaccatttgtatgtggatgtcgtaatttaggtgaagctgcgcgtagaattggtgaaggtgctgctatgttacgtactaaaggtgaaccaggtacaggtaatattgttgaagctgtaagacatatgagacaagttaattcagaagttagtcgattgactgtaatgaatgatgatgagattatgactttygcgaaagatatcggtgcgccttatgaaattttaaaacaaattaaagacaatggtcgtttaccggtagttaactttgcagctggtggcgttgcgactcctcaagatgctgctttaatgatggaattaggtgcygayggtgtattcgttggatcaggtatttttaaatcagaagatccagaaaaatttgctaaagcaattgttcaagcaacaacacattaccaagactatgarctaattggaagattagcaagtgaacttggcactgctatgaaaggtttagatatcaatcaattatcattagaagaacgtatgcaagagcgtggttggtaa

SEQ ID NO: 1673 - DNA, 561 bp, Staphylococcus aureus
atgaaaataggtgtattagcattacaaggtgcagtacgtgaacatattagacatattgaattaagtggtcatgaaggtattgcagttaaaaaagttgaacaattagaagaaatcgagggcttaatattacctggtggcgagtctacaacgttacgtcgattaatgaatttatatggatttaaagaggctttacaaaattcaactttacctatgtttggtacatgcgcaggattaatagttctagcgcaagatatagttggtgaagaaggataccttaacaagttgaatattactgtacaacgaaactcattcggtagacaagttgacagctttgaaacagaattagatattaaaggtatcgctacagatattgaaggtgtctttataagagcsccacatattgaaaaagtaggycaaggcgtagatatcctatgtaaggttaatgagaaaattgtagcygtycagcaaggtaaatatttaggcgtatcattccatcctgaattaacagatgactatagagtaactgattactttattaatcatattgtaaaaaaagcatag

SEQ ID NO: 1674 - DNA, 450 bp, Staphylococcus aureus
gtggaacgtacatttttaatgattaaaccagaygcagtacaaagaaatctaattggtgaagtaatttcaagaattgaamgaaaaggactaaaacttgtcggtggtaaattaatgcaagtaccaatggaacttgctgaaacacattatggtgaacaccaaggyaaaccrttttataatgatttaatttcatttattacatcagcaccagtgttcgcaatggtagttgaaggtgaagatgcagttaatgtatctagacatattattggcagcaccaatccttcagaagcttcaccaggatcaattagaggtgatttaggtttaactgttggtagaaatatcattcacggttcagattcattagaktctgctgaacgtgaaattaatytatggtttaatgaaaatgaaattactagctatgcttcaccacgtgatgcwtggttataygaataa

SEQ ID NO: 1675 - DNA, 462 bp, Staphylococcus aureus
atgcacaatatgtctgacatcatagaacaatacatcaaacgtttatttgaagagtcgaatgargatgtcgttgaaattcagagagcgaatatcgcacagcgttttgattgygtaccatcacarttaaaytatgtaatcaaaacacgattcactaatgaacatggttatgaaatcgaaagtaaacgtggtggtggtggttacatccgaatcactaaaattgaaaataaagatgcaacaggttatattaatcatttgcttcagctgattggaccttctatttctcaacaacaagcttattatattattgatgggcttttagataaaatgttaataaatgaacgtgaagctaaaatgattcaagcagttattgatagagaaacgctatcaatggatatggtttctagagatattattagagcaaatattttaaaacgtttgttaccagttataaattattactaa

SEQ ID NO: 1676 - DNA, 567 bp, Staphylococcus aureus
gtgctttgtgaaaattgtcaacttaatgaagcggaattaaaagttaaagttacaagtaaaaataaaacagaagaaaaaatggtgtgtcaaacttgtgctgagggrcaccatccgtggaatcaagctaatgaacarcctgaatatcaagaacatcaagataatttcgaagaagcatttgttgttaagcaaattttacaacatttagctacgaaacatggmatyaattttcaagaagtagcgtttaaagaagaaaaacgttgcccatcatgtcayatgactttgaaagatattgcacatgttggtaaatttgggtgtgctaattgttatgcaacatttaaagatgacatcattgatatcgtccgcagagttcaaggtggacaatttgagcacgttggaaagacaccacattcttcacataaaaagatagctttaaagcgaaaaatcgaagaaaagaatgaatatttgaaaaaacttrttgaaatccaagattttgaggaagcagccattgttagagatgaaattaaagcactaaaagctgagagtgaggtgcaacatgatgacgcataa

SEQ ID NO: 1677 - DNA, 603 bp, Staphylococcus aureus
atgaaagacatgggygttagaaaaggkaygaaagcattagatgtttgttgtggtactggtgattggacaatmgcattaagcaaagctgtaggaycaacaggwgaagttactggyattgactttagtgagaatatgttagaagtaggaaaagaaaaaactgcttcaatggaaaatgttaaacttgttcatggtgatgcaatggaattgccgtttgaagacaattcttttgattatgtaacaattgggtttggattaagraatgtgccagactatttagtcgcgttaaaagaaatgaatagagtacttaaaccaggtggtatggtggtatgtcttgaaacgagccaaccaactttgccagtctttaaacaaatgtatgcaytatactttaaatttgttatgcctatttttggraaattatttgcaaaatcaaaagaagaatatgaatggttacagcaatctacgtttaattttcctggaaaagaagagttgaagcgcatgtttgaagaagcrgrtttcataaatgtaagagtacgtagttttacagggggcgttgctgcaatgcaccttggctataaagaaaaagataataccaaaggtgattaa

SEQ ID NO: 1678 - DNA, 1008 bp, Staphylococcus aureus
atgacgcataatattcatgataatatcagccaatggatgaaaagtaatgaagaaacaccaattgttatgtcttctagaattcggttagcgcgtaatttagaaaatcatgtgcatccactaatgtatgctactgaaaatgatggatttagagttataaatgaggtacaagatgccttgccaaaytttgaattaatgcgtcttgatcaaatggatcaacaaagtaaaatgaaaatggttgcaaagcatttgattagycctgaactaataaaacaaccagcagccgcagtattagtgaatgaygatgaatctttaagtgtcatgataaatgaagaggaccatattcgtattcaagctatgggaactgacacgacattacaggctttatataatcaagcttcatcaattgatgatgaattagatcgaagccttgatataagttatgatgaacaacttggttatttaactacatgtcctaccaatataggtactggtatgagagcaagcgtgatgctacatttrccaggtctatctattatgaaaagaatgacacggattgctcaaaccattaatcgttttggatatacaatcagaggtatttacggtgaaggttcgcaagtttatggacatacttatcaagtatccaaccaacttacacttggtaaatctgagttagaaatcatagaaacattaacagaagttgttaatcaaatcattcatgawgaaaaacaaatacgacaaaagttagacacttataatcaaytagaaacacaagaccgtgtttttcgctcgctaggtattttacaaaactgtagaatgataactatggaagaggcttcttatagattaagcgaagttaaacttggtatagatttaaattacattgaattacaaaactttaaatttaatgaattgatggtagctatacagtcaccatttttattagatgaagaagatgacaaatctgtaaaagaaaaacgagcagatatactaagagaacatataaagtag

SEQ ID NO: 1679 - DNA, 573 bp, Staphylococcus aureus
atggaaacaactgttagcaaattggaaagacaaatagaagaaagattaaagggygtatcagaatatgaatccattaatattaatcatcggttaggtaagttrcttgattyatatgatattccagatgttgccaaagtrgcatgcctcacaattgacacatcaatgagacaccttgatgacattacatataatcatttgtctaaacattccattttgattggagatttaattagtgcacatttttatacgctactagcagaaatcaatgatttatcatttcaaaatgaaattagtaaagcaattgttgaaattaatgaattgaaatcttcattacatcatcaagctttaaatgattatgaaatttctcaagcaatagtaaaaattgaaacacttttcccatatattacgttatctcatttcggtatcaatattgatgagtcggaaatatataattatttatttgaagatatgtctgattactatccatcatacttcaagaaatataatcaaagtgaagtaaagcattacttacacgatatccaaaaaagttatttaaaaagtagaggtaattaa

SEQ ID NO: 1680 - DNA, 2457 bp, Staphylococcus aureus
atgttatttggtagattaactgarcgtgcacagcgcgtattagcacatgcmcaagaagaagcaattcgtttaaatcattcaaatataggaacagaacacctattattgggrttaatgaaagaacctgaaggaattgctgcaaaagtattagaaagttttaatatcactgaagataaagtaattgaagaagttgaaaaattaatcggacatggtcaagatcatgttggtacattgcattatacacctagagctaaaaaagtyattgaattatcgatggatgaagctagaaaattacatcacaattttgttggaacggaacatattttattaggcttgattcgtgaraatgaaggtgttgcagcaagagtttttgcaaatctagatttaaatattactaaagcacgtgcacaagttgtgaaagctttaggaaaccctgaaatgagtaataaaaatgcacaagctagtaagtcaaataatactccaactttagatagtttagctcgtgacttaacagtcattgccaaagacggtacattagatcctgttataggacgtgataaagaaattacacgtgtaattgaagtattaagtagacgtacgaaaaacaatcctgtrcttattggagagccaggtgttggtaaaactgctattgctgaaggtttagcgcaagccatagtgaataatgaggtaccagagacattaaaagataagcgtgttatgtctttagatatgggaacagtagttgcaggtactaaatatcgtggtgaatttgaagagcgtctgaaaaaggttatggaagaaatccaacaagcaggtaatgtcatcctatttattgatgarttgcatactttagttggtgctggtggtgctgaaggtgctatcgatgcttcgaatattttgaarccggcattagcacgtggtgaattacaatgtattggtgctactacattagatgaatatcgcaaaaatattgaaaaagacgcggctttagaacgtcgtttccaacctgtacaagttgatgaaccttcagtagtagatacagttgctattttaaaaggattaagagatcgttacgaagcacaccatcgtattaatatttcagacgaagctattgaagcagctgttaaattaagtaacagataygtttcagatcgtttcttaccagataaagcaattgatttaattgatgaagcaagttctaaagtaagacttaagagtcatacgacacctaataatttaaaagaaattgaacaagaaattgaaaaagttaaaaatgaaaaagatgcygcagtacatgctcaagagtttgaaaatgctgctaayctgcgtgataaacaaacaaaacttgaaaagcaatatgaagaagctaaaaatgaatggaagaaygcacaaaatggcatgtcaacttcattgtcagaagaagatattgctgaagtyattgcaggatggacaggtatcccattaactaaaatcaaygaaacagaatctgaaaaacttcttagtctagaagatacattacatgagagagttattgggcaaaaagatgctgttaattcaatcagtaaagcggttagacgtgcccgtgcagggttaaaagatcctaaacgaccaattggtagctttatcttccttggaccaactggtgttggtaaaactgaattagctagagctttagctgaatcaatgtttggcgatgatgatgcgatgatccgtgtagacatgagtgaatttatggaaaaacacgcagtgagccgattagttggtgctcctccaggatatgttggtcatgatgatggtggacaattaactgaaaaagttagacgtaaaccatattctgtaattttatttgatgaaattgaaaaagcwcatccagatgtatttaatattctattacaagttttagatgayggacatttgacagatacaaaaggacgtacagttgatttcagaaatacaattatcataatgacatcaaacgttggrgcacaagaattacaagatcaacgatttgctggattcggtggttcaagtgatggacaagattatgaaacaattcgaaaaacgatgttaaaagaattaaaaaattcattccgtccagaatttttaaaccgtgtagatgatatcattgtattccataaactaacaaaagaagaattaaaagaaattgtaacwatgatggttaataaattaacaaatcgattatcygaacaaaacataaatattattgtwactgataaagcgaaagayaaaatcgcagaagaaggatatgatccagaatatggtgcaagaccattaattagagcgatacaaaaaactatcgaagataatttaagtgaattaatattagatggtaatcaaattgaaggtaagaaagttacagtagatcatgatggtaaagagtttaaatatgacattgctgaacaaacttcagaaactaaaacaccatcgcaagcataa

SEQ ID NO: 1681 - DNA, 273 bp, Staphylococcus aureus
atgaacaaaacagatttaatcaatgcagttgcagagcaagctgatttaactaaaaaagaagctggttcagcagtagatgctgtattcgaatcaatccaaaactcacttgctaaaggtgaaaaagtacaattaattggtttcggtaactttgaggtacgtgaacgtgctgcacgtaaaggtcgtaaccctcaaactggtaaagaaattgatatcccagcaagtaaagttccagcattcaaagctggtaaagcattaaaagatgctgtaaaataa

SEQ ID NO: 1682 - DNA, 165 bp, Staphylococcus aureus
atggctaatgtgataattgtgcttrtgaacaaaataattgaagttataaatgacgctaatgtaaaaggtgtaaattgtgtgagcgataatatcaatgataaaaagaaccaagagatagcccctagaaattgtaaaatagcagaagaaattctaaaactcatataa

SEQ ID NO: 1683 - DNA, 1365 bp, Staphylococcus aureus
ttggccaagaaaaaagtgatttttgaatgtatggcttgtggttatcaatctcctaaatggatggggaaatgtcctaattgtggcgcttggaatcaaatggaggaaattgttgaaaaagcagccaatcctaaacatggagtkaaaaccaaggaattagyaggtaaagtacaaaaattaaatagtattaaacatgaaacaacgccgagagtgttaacagattcagcagaattyaaccgtgtattaggtggaggtattgtgagcggatcgttagtacttattggtggggatccaggtattggtaagtcaacgttacttttacaaatttgtgcatcgttatctcaaaagaaaaaagtactatatattactggagaagaatcgcttagtcagactaaattacgtgcagagcgattagatgaagattcaagtgaattgcaagtattagctgaaacagatcttgaagttatttatcaaacagtaaaagargaacaacctgatttaytagtagtggattcgattcaaacaatatatcatcctgaaatcagctctgcgccaggttctgtttcacaagttcgtgaaagtacacaaagtttaatgaatattgctaaacaaatgaacattgcaacttttatagtgggtcatgtaacgaaagaaggtcaaattgctggcccaagattgctagaacacatggttgatactgtrctttattttgaaggcgatgaacaccacgcatatcgaattttgcgagctgttaaaaaccgttttggttcaacgaatgaaatgggaatcttcgaaatgaagcaaagtggattaaaaggtgtaaataatccatctgaaatgtttttagaagaacgttcaacaaatgttccaggttcaacaattgttgcaaccatggagggaacyagaccacttttaatagaagttcaagcgctggtaactccaacgacttttaacaatccgagacgaatggcaacagggattgatcayaatcgattaagtttgttgatggctgttttggaaaagaaagaaaattatctattacaacaacaagatgcttatatcaaagtagctggcggtgtaaagttaacggagccagcagttgatttaagtgtaattgtagcaactgcrtctagctttaaagataaagctgtcgacggattagattgctatattggagaagttggtttaacrggtgaggtacgtcgtgtatctcggatagaacaacgcgtgcaagaggctgcaaaactaggtttcaaacgtgtaattattcctaaaaataatataggcggatggacatatcctgaaggtatacaagtaataggtgtaactactgtacatgaagyattgtcrtttgctcttcattcataa

SEQ ID NO: 1684 - DNA, 999 bp, Staphylococcus aureus
atgactaaaattaccgtttttggtatgggaagttttgggacagcccttgccaatgttcttgcagaaaatggacatgatgttttgatgtggggtaaaaatcaagawgctgttgatgaattaaatacatgtcatacaaataaaaagtatttaaaatacgcgaaattagatgttaacatcatcgctacttcagatatgaccaaagcaattcaatwtgcagatatttacttaatggctttacctactaaagcaatgcgagaagttgctwctcaaattaatgataagctgacmtctaaaaagacttttatacatgttgctaaaggtattgaaaatgggacrtttaaacgtgtgtcagaaatgattgaagattctatttcaccygaatataatgcaggtattggcgtgttgtcagggccaagtcatgcggaagaagttgtagtcaagcaaccaactacagttgctgcwtcatcaaaagataaaartgtaagtaaattaacgcaagatttatttatgaatgattatttgcgtgtgtacacgaatgatgacttgrttggtgttgaacttggtggtgcattgaaaaatatcatcgcagtagcaagtggtatcgtagctggaattggctacggtgataatgcaaaagctgcrttaatgactcgtggyttagcggaaattagyagattaggtgaaaagttaggtgccgatcctatgacatttctaggtttaggtggtatcggtgacttaatcgttacttgcayatcaacacattctcgraatttcacattaggatataarcttggacaaggtgaatcratggatcaagcattatctgaaatgaatatggtygttgaaggtatttatacaactaaatcmgtttatcatttagctaaagaaaaaaatgtggatatgccaattacaaatgcattatatagagtattatttgaaaatatctcagtaaaagaatgcgtaaaagatttaatggagcgcgataaaaaatctgaataa

SEQ ID NO: 1685 - DNA, 1074 bp, Staphylococcus aureus
gtgaatatcgttaaactaatggttattattatttacttaattattgggagcgcattaggaataattattattcctgaaattgcaaatgatcttggattacaaaactccagctttttaaaaaatcactatgtagatggcattatcggtagtatttttatgttcttaatttttggtgtatttattagacgagttactaacgctataawaggtttagaacattttattatgcgtagaagtgctgttgaaatactattcgcaacaataggtttaataatcggattacttatttctgttatggtgtcgtttatattrgaatcaattggyaactctatttttaatcatttcattcctgtcataattacgatattactatgttatttcggtttccaatttggccttaaaaaacgagatgaaatgttaatgtttttacctgagaatatagcgcgttccatgtcacaacatactaaaagtgctacrccaaaaattatcgacacaagcgcaattattgatggtcgtattttagaagtcattcgttgcggttttatcgatggcaatattttaattccrcaaggtgttattaatgaattacaaattgttgcagattcaaatgacagtgttaaacgtgaaaagggtaaaagaggcttagatatyttaaatgaattgtatgatttagaytatcctacaaaggttatacatccaactaaaacacatagtgatattgatacratgytattaaarytagcwaaacaatatcatgcaagtattatwacracagatttcaacctaaataaagtwtgtcatgtacatggtatyaaagcattaaatgttaatgatttatcagaagcaatcaaacctaatgtacatcaaggtgatcaactkcatattttactgacaaaaatgggtaargagcctggtcargcagtaggatatctagatgatggtacgatggtrgttgttgataatgctaaaaatcttattggcagtcatgtcaatttagaagtagtsagcttattgcaaacatcttcaggaagaattgtttttgctaaaaaaatcgaagatacagtatcattataa

SEQ ID NO: 1686 - DNA, 1311 bp, Staphylococcus aureus
atgactaaacctatagtagctattgtaggtaggcctaatgtaggtaaatctacaatttttaatagaatagttggagaacgtgtttcgattgtkgaagayacgccaggtgtaacacgagatcgtatttattcttcaggtgartggttaacacatgatttcaatattattgatacaggtggtattgaaattggtgatgcaccattccaaacacaaattagagcgcaggcagaaatcgccatagatgaagcggatgttattatttttatggttaacgtgcgtgaaggattgacacaaagcgatgaaatggtcgctcaaattttatacaaatctaaaaaaccggtcgtattagcggttaacaaagtagataatatggaaatgcgtacagacgtgtatgatttctattcattaggatttggtgaaccgtatccgatatcagggtcacatggtttaggtcttggtgacttgttagatgcagttgtttctcattttggtgaagaggaagaagatccttatgatgaagatacaattcgactatccattattggacgaccaaacgtaggtaaatcaagtttagtaaatgctattttaggtgaagatcgcgttatcgtttctaatgttgcagggacaacgagagacgctattgatacagagtatagttatgatggacaagattatgttttaatcgatactgctggtatgcgtaaaaaaggaaaagtatatgaatcaactgagaaatattcagtaytaagagctttaaaagcgattgaacgttcaaatgttgttttagtggtcatwgatgcagaacaaggcatyattgaacaagataaacgtgttgcaggatatgcacatgaacaaggtaaagcagtcgtgattgtcgtaaataaatgggatactgtggaaaaagatagtaaaacgatgaagaaatttgaagatgaagtacgtaaagaattccaatttttagattatgcacaaattgcttttgtgtctgctaaagaacgcacaagattacgtacattattcccttacatyaatgaagcaagtgaaaaccataaaaaacgtgttcaaagttcaactttaaatgaagtygttactgatgcaatttccatgaaccctacaccaacagacaaaggtagacgtttgaatgtcttttatgcaacacaagttgctatagaaccaccgacatttgttgtatttgtwaatgatgtagaattaatgcatttttcttataaacgctatttagagaatcaaatccgtgccgcttttggttttgaaggtacaccaattcatattatagctcgaaagagaaattaa

SEQ ID NO: 1687 - DNA, 204 bp, Staphylococcus aureus
atggaagrtttaaagsawtctttaaaaagtttaggttggtgggatttattttttgcgatacctatktttctgctattcgcataccttccaaactataattttataackatatttcttaacattgttatcattattttcttttccataggtttgattttaactacgcatataattatagataaaattaagagcaacacgaaatga

SEQ ID NO: 1688 - DNA, 327 bp, Staphylococcus aureus
atgtttatggcagaaaatagattacaattacaaaaaggcagtgcggaagaaacgattgaacgtttttacaatagacaaggyattgaaactattgaaggcttccaacaaatgtttgtcactaaaacattaaatacyraggatacagaygaagttaaaatcttaactatttgggaatctgaagatagctttaataattggttgaattccgatgtatttaaagaagctcataaaaatgtacgtttaaaaagtgatgacgatggacagcaaagtccaatattatcaaataaagtattcaaatatgatattggctaccactatcaaaaataa

SEQ ID NO: 1689 - DNA, 1455 bp, Staphylococcus aureus
atgagcgatcgtataagagtaagatatgcaccaagtccaactggktatcttcatattggtaatgcaagaacagcattattcaattacttgtatgctaaacattacaacggagattttgtgattcgaattgaagatactgataaaaaacgtaatttagaagatggagaaacatcacaatttgataatcttaaatggttaggattagattgggatgagtctgtagataaagacaatggctacggaccatatcgtcaatctgaacgtcaacatatctaccaaccattaatagatcagttactagcagaagataaagcatataaatgctatatgacagaagaagaattagaagctgaacgtgaagcrcaaatcgctcgtggtgaaatgcctcgctatggtggwcaacatgcgcatttgactgaagaacaacgtcaacaatttgaagcagaaggacgccaaccatcaattcgtttccgagtacctcaaaaycaaacgtattcatttgatgatatggtwaaaggraatatttcatttgattcaaatggtattggtgactgggttatcgtwaaaaaagatggcattccaacgtacaattttgcagtagctatagatgatcattacatgsaaatttcagatgtmattcgtggtgatgatcatatttcaaacacgcctaaacaaattatgatttatgaagcatttggctgggagccacctcgttttggtcatatgtcattaattgttaatgaagaacgtaaaaagttaagtaaacgtgatgggcaaattttacaatttattgagcaatatcgtgacttaggttatttacctgaagcgttatttaattttattgcgttattaggttggtctcctgaaggtgaagaagaaatcttttctaaagaagaatttatcaaaatctttgatgaaaagcgtttrtcaaaatcaccagcatttttcgataagcaaaaattagcatgggttaataaccaatatatgaaacaaaaagatactgaaacagtattccaattagcattacctcatttaattaaagcraatttgattcctgaggtgccgtcagaagaggatttatcttggggacgcaaattaattgcgctttatcaaaaagaaatgagttatgccggtgaaattgtacctttatcagaaatgttctttaaagaaatgccagctcttggtgargaagaacaacaagtgatyaatggaragcaagtaccagagttaatgacgcacttattcagtaaattagaagcacttgaaccatttgaakcggctgaaattaaaaagacaattaaagaagttcaaaaagaaacaggaataaaaggcaagcaattatttatgcctattcgtgttgctgtaacaggccaaatgcatggtcctgaattaccaaatacaattgaagtacttggtaaagaaaaagtgctaaaccgtttaaaacaatataagtaa

SEQ ID NO: 1690 - DNA, 1176 bp, Staphylococcus aureus
atgactgaagaattcaatgaatcaatgattaacgatattaaagaaggtgacaaagtcactggcgaggtacaacaagttgaagacaagcaagttgttgttcatatcaacggtggtaaatttaatgggattattcctattagtcaactatctacgcatcatattgatagcccaagtgaagttgtaaaagagggcgacgaagttgaagcatatgtcactaaagttgagtttgatgaagaaaatgaaactggagcttacatcttatctagaagacaacttgaaactgagaagtcttatagttatttacaagaaaaattagataataatgaaatcatcgaagcgaaagtaacagaagtagttaaaggtggtttggttgttgatgtaggacaaagaggttttgttccggcttcactaatttcaacagacttcattgaggatttctctgtgtttgatggacaaacaattcgtattaaagttgaagaattggatcctgaaaataatagagtcattttaagccgtaaagcagttgaacaagaagaaaacgatgctaaaaaagatcaattattacaatctttaaatgaaggcgatgttattsatggtaaagtagcgcgtttaactcaatttggtgcatttatagacattggyggtgtygatggtttagtgcatgtatctgaactttctcacgaacatgttcaaacaccagaagaagtagtttcaattggtcaagatgttaaagttaaaattaaatctattgatagagatacagaacgtatttcattatcaatcaaagatacgttaccaacacctttcgaaaatattaaaggtcaattccacgaaaatgatgwcattgaaggtgtcgtagtaagattggcaaactttggtgcatttgttgaaattgcaccaggtgtacaaggrcttgtacatatttctgaaattgcacacaaacacattggtacgccaggtgaagtrttagaacctggtcaacaagtaaatgttaaaatattaggtattgatgaagagaatgaaagagtatcactatctattaaagcaacattaccaaacgaagatgttgttgaaagtgatccttytacgactaaggcgtacttagaaarcgaagaagaagataatccaacaattggcgatatgattggtgataaacttaaaaatcttaaactataa

SEQ ID NO: 1691 - DNA, 642 bp, Staphylococcus aureus
ttgttaaaaagaatgagagacgatataaaaatggtatttgagcaggatccagcggcacgttcaacattagaagtcattacaacgtatgcaggtttacatgcagtttggagtcatttgattgcacataagttatacaaccaaaaaaaatatgttgcagcacgcgcgatatctcaaatttcaagatttttcacaggtatagaaatccatccaggtgctaaaattggaaagcgtctatttatagatcatggtatgggcgttgtaataggagaaacatgtacaattggtgataatgtgacaatctatcaaggcgtgacacttggtgggacagggaaagaaagagggaaaagacacccagatataggagacaatgttttaatagcagcsggtgcgaaagttttaggaaatattaaaataaattcaaatgtaaatattggtgcaaattcagttgttttacaatcagttccaagttattcaacggttgttggtataccaggacatattgttaagcaagatggtgttcgagttggaaaaacatttgatcatcgccatctacctgatccaatttatgaacaaattaagcatttagaacgacaacttgaaaagactaggaatggagagattcaagatgattacattatataa

SEQ ID NO: 1692 - DNA, 552 bp, Staphylococcus aureus
atgtatcgtgcattaacatacaaatatttaaaattaaacaaaactgaggactttgcaaaactagttgaccaaacaacattagatttaacttataaagcagataaaggtcaatgtgtcattttagataacgaagatgtaacagactttttaagaaataatgatgtgacgcaacatgtttcatacgttgcatctaaagagccagtacgttcattcgccgttaaaaaacaaaaagagttagctgcagaaaaaggtatcgtaatggatggtcgcgatatcggaactgtagtgctaccagatgcagatttaaaagtatatatgattgcatcagttgaagagcgagcagaaagaagatataaagataatcaattaagaggwatcgaatcaaattttgaagatttaaaacgtgatattgaagcwcgtgatcaatatgacatgaaccgtgaaatatcaccattaagaaaagcagatgatgcagtgacattagatacgacaggcaagwcgattgaagaagttactgacgaaattttagcgatggtgagtcaaattaaataa

SEQ ID NO: 1693 - DNA, 987 bp, Staphylococcus aureus
atgcaaaaagttgaaagtatcataattggtggagggccatgcggattaagtgcggctattgaacaaaaaagaaaaggtattgataccttaattattgaaaagggkaatgtcgttgaatcaatmtayaattatcctactcaccaaacatttttctcatcaagtgataaattaagtattggggacgtaccgtttatygttgaagaaagtaaaccaagacgtaatcaagcgctagtttattaccgagaagttgtaaaacatcatcaattaaaagtaaatgcatttgaagaagtattaactgttaaaaaaatgaataataaatttacwattactacgacgaaagatgtttatgaatgtcgatttttaacaatcgcgacaggctattatggtcagcataatacattagargttgaaggwgcggatttacctaaagtgttccattattttaaagaggcacatccgtattttgatcaagatgttgtwattatyggtggtaagaattcggctatcgatgctgctttggagttggaaaaagctggtgctaacgtgacggttctatatcgtggtggagattattcgccttcaattaaaccgtggatacttccaaatttcacagcattagtaaatcatgaaaaaattgacatggaatttaatgctaatgttacccaaataactgaagatactgtgacttatgaagtaaatggtgaaagtaaaacratacacaatgattatgtwtttgcgatgattggttatcatcccgattatgaatttttaaaatctgtaggyattcaaattaatacaaatgaatttggaacagcgcctatgtataataaagaracatacgaaacaaatatcgaaaattgctayattgcaggtgtrattgctgcagggaaygatgcgaataccatttttattgaaaatggtaaattccacggkggyattattgctcaaarcatgctagctaagaaacaaacgccsttagaatcataa

SEQ ID NO: 1694 - DNA, 747 bp, Staphylococcus aureus
gtggaagatacggttattgttggtaggcatgctgttagagaagcgattattactgggcatccgataaataagatattgattcaagaaggwattaaaaagcaacaaattaatgaaattttaaaaaatgcaaaagatcaaaaaatyattgttcaaactgtaccaaaatctaaattagattttttagcaaatgcaccacatcagggkgttgcagcgcttattgcaccatatgaatatgctgacttcgatcaatttttaaaacagcaaaaagaaaaagaaggtttatygacagtrcttatattagacggcttagaagacccrcataacttgggatcaattttaagaacagcmgatgcaacgggagttgatggtgttattattcctaaacgtcgttcagttacactaacgcaaacagttgcaaaagcctcaacaggtgcaattgaacatgtaccagttattcgagtgacaaatttagctaaaactatcgatgaactaaaagataatggyttttgggtagctggcactgaagctaataatgcaacagattatagaaatctwgaagcggacatgtcattggctattgtaattggyagcgaaggacagggtatgagtcgyctagtaagtgataaatgcgatttttatattaagattccaatggttggmcatgtaaacagtttgaatgcttcggttgcagcaagtttaatgatgtacgaagtatttcgaaaaagacatgatgttggagaaatataa

SEQ ID NO: 1695 - DNA, 525 bp, Staphylococcus aureus
atgaaagaacgttacttaatcattgatggatacaatatgataggacaatcaccaacgctaagcgccattgcaaaagagaatttagaagaagctagaatgcaattaatagatrcaattgcaaattataatgcagttatttcagatgaaattatttgtgttttcgatgcttatgaccaatcgggtgttgaaagagaatacatgtatcatggcgttaaaacratttttaccaaggaaaaagaaacagctgatagtttcatagaacgttatgtytatgaactttatgacaagcayactaagcatattrcagttgtaacaagtgatatgagtgagcaacatgctatctttggatcaggtgcatatagaatatcatctcgcgaaatgtggagagatttaaaagaaaatgaaattgatgtgagtaaatcattagatgatataagtgaaaacaagccaagaactcgaattccgttatcttctgaaatccttgcagaatttgaaaaaatacgaagaggacatcataagaaatga

SEQ ID NO: 1696 - DNA, 1461 bp, Staphylococcus aureus
atgtctaataattttaaagatgactttgaaaaaaatcgtcaatcgatagacacaaattcacatcaagaccatacggaagatgttgaaaaagaccaatcagaattagaacatcaggatacaatagagaatacggagcaacagtttccgccaagaaatgcccaaagaagaaaaagacgccgtgatttagcaacgaatcataataaacaagttcacaatgaatcacaaacatctgaagacaatgttcaaaatgaggctggcacaatagatgatcgtcaagtcgaatcatcacacagtactgaaagtcaagaacctagccatcaagacagtacacctcaacatgaagaggratattataataagaatgcttttgcaatggataaatcacatccagaaccaatcgaagacaatgataaacacgakactattaaarawgcagaaaataacactgagcattcaacagtttctgataagagtrwagctgaacaatctcagcaacctaaaccatattttrcaacaggtgctaaccaakcarawacatcmaaaratraacatgatratgwwwctgtwaarcaagaymaagatgaayctaaagawcatcatartggtaaaaaagsmgcagcwattggtgctggaacagcrggtgttgcaggtgcagctggtgcaatggstgyttctaaagctaagaaacattcaaatgacgctcaaaacaaaagtaattctgrcaagkygaataactcgactgaggataaagygtctsaagayaagtcwaaagawcatcataatggyaaaaaaggtgcagcratcggtgctggaacagcaggtttggctggaggcgcagcaagtaawagtgcttctgccgcttcaaaaccacatgcctctaataatgcaagycaaaacmatgatgaacatgacmatcatgacagagataaagaacgtaaaaaaggtggcatggccaaagtattgttaccattaattgcagctgtactaattatcggtgcattagcgatatttggaggcatggcattaaacaatcataataatggtacaaaagaaaataaaatcgcgaatacaaataaaaataatgctgatgaaagtaaagayaaagacacatctaaagacgcttctaaagataaatcaaaatctacagacagtgataaatcaaaagakgatcaagacaaagcgactaaagatgaatctgataatgatcaaaacaacgctaatcaagcgaacaatcaagcacaaaataatcaaaatcaacaacaagctaatcaaaatcaacaacagcaacaacaacgtcaaggtggtggccaaagacatacagtgaatggtcaagaaaacttataccgtatcgcaattcaatactacggttcaggttcaccggaaaatgttgaaaaaattagacgtgccaatggtttaagtggtaacaatattagaaacggtcaacaaatcgttattccataa

SEQ ID NO: 1697 - DNA, 570 bp, Staphylococcus aureus
ttgaaataygatttgacaactcaagacagtacaatcaaacgtaacaatkcaataaatgataaagacttcgaaaagttagtaatggatctacaaccattaattatwcgrcgcatcaaaacatttggatttaatcattatgatttagaagayttatatcaagaaatacttatacggatgtataggtcggtccaaacatttgattttagtgsagagcagcctttcacaaattatgttcaatgtttaattacgtctgtaaagtatgattatttgagaaaatatttagctacaaataaaagaatggataatttgattaatgaatatagagttacgtatccatgtgcaataaagcgttwtgatgttgaaaacaattatttgaataaattagcaattaaagagttgattygtcagtttaagtatttgagtgyatttgaaaaagatgtcatgtatttaatgtgtgaacaatataagccgagagaaattgctcaaytgatgcatgtaaaagagaaagtgatttataatgccatacaacgatgtaaaaataaaataaaacgttatttcaaaatgatttga

SEQ ID NO: 1698 - DNA, 1380 bp, Staphylococcus aureus
atgttgcatgatattttacgaaacaaatttggmttcgagarttttaaaccgggacaacaggaaattatagaaagtataatgtctcaacaacacactctaggtatwcttccaactggaagtggaaagagtttgtgttatcaaatacctacgtatttatcaggtaagccgacattaattatctcaccgttaatatctttaatggatgaccaagttatgcagttgaaaataaatggagaaaaacgtgtaacatgtattcactctggtatggatgaaattgagaaaaagcataatattaaatgtttackacatagccgcttcatctttctaagtccagaatttctcytgcarccgtcaaattttaaattaatatctatgatagactttggcatgattgttctagatgaagcacattgyctatctgaatggggatatgatttcagaccacattatgctctaatwggaaaagtaacaaagcattttaaagaagcggttgtcttagcrttgacagcaactgcaccaccgcatttrcaagatgatttgacggaaatgytagmgattcaattyaaygttattaaaactacaatgaatcgcccaaayataagctttaagcatcttaattttcatgatgaygaagataaaattgartggttgctgccgtttctacaacagtcgggaccaacgattatytatgtctcatcgaaaaagatgtgtctgaatttagcgcaacttatttatgattcaggttttcttacwggyatttatcatggtgatatgaattatcaagagcgacacacagttcaacaacaatttttaaataatgatattccgattatagtcgcaacgagtgcttttggtatgggwattaataaaaaagatattcgcacaatcattcactttcatctttcaacaagtccttctaactacattcaagaaattggmcgtgcrggtcgcgatggtgaactaagtcaggcaattagtttattycaaccggacgataaatatattttagaaacgttattatttgcagatatgataacagaagaagatgtacaaaatttcgaaataggagaatttttagcwcccgataaacaagmcgttttgacaacgttgcawtcattctatagtatcggcgccttgaaacagrtatttaagmaatcatttaaacgaaagcaattaggattctttcgyatgattggctattgcaaattggatcaatgtagacggaagtatttattagaatttttcggtgaatatccaccggcacaagatcgatgttgtgacaatgattctaatataactgatatcgyaattttaaataagaagaaggtaattagaagtattggatttgatgaaaagttgcaaaatttatttctcagatag

SEQ ID NO: 1699 - DNA, 219 bp, Staphylococcus aureus
ttgataatatgttcaaaggatttggaggttgagcagatggctaaaaaagaaagtttctttaaaggcgttaagtctgaaatggaaaaaacaagttggccgacgaaagaagagctatttaaatatactgtaattgtagtttcyactgttatattcttcttagtctttttctatgccttagatttaggaattacagcattgaaaaatttattatttsgttag

SEQ ID NO: 1700 - DNA, 954 bp, Staphylococcus aureus
ttgcaacacattataaaaacagcattacaacaaacatttaactataaaacaaataaaagtatttacaatatcttagttggtaagaaatctcaccaaaccttttttgacgcttgtagtcaacaacagttgtcattatatcacagtttaccactattaaaatatccgtcttttgagctatttttagaaaawatmamtgaatttaatgctgaaatggaaatcatgttgcatcctagatatacatttgaaagyatggggcaaacatttcaagcaattcaactattagtgcaaaccatgtctaatacyawrcarcawgwttttcrtttygtaccaatctctcaaaataataagatacaagaaactgtaaarattgtctataactayattaaagaaaaccaattacaaattgaytttgaaaatgaactacataacttgtttaaagcaataactttaaaagggccatgttacttacattattatttgcaaggctatgatgaaccaatgtatacgagacagcaagttagtttaatagaaaarctatctcaacagcaattgtttgaatwcgaaatgaataatttagtgacaatgatgtttgaattagaaagtggagaatatactattttatcaaaaataataatgaaacctacattattaaatcaaacytatattacttatacaarattgcttgaacaattcacgatrgaagatatagcggctcaacaacaagttaaaatcaatactatcgaagatcatgtacttgaaatcttaatcaaaggttayatgtctaattacgatgattatgttgaacwagaagatcaactscartttttgaatttttatcaacarcatcgtggygaacgattaaaattttacaaagaacaatttgacacgttatcatattttcaattaaaagtattaatcgttggwtttgaaagaggtgatctgaatgttgcatga

SEQ ID NO: 1701 - DNA, 549 bp, Staphylococcus aureus
atgtctgaagaagttggcgcaaagcgttggtatgcagtgcatacatattctggatatgaaaataaagttaaaaagaatttagaaaaaagagtagaatctatgaatatgactgaacaaatctttagagtagtcataccggaagargaagaaactcaagtaaaagatggcaaagctaaaacgactgttaaaaaaacattccctggatatgttttagtggaattaatcatgacagatgaatcatggtatgtggtaagaaatacaccaggygttactggttttgtaggttctgcaggtgcaggktctaagccaaatccattgttaccagaagaagttcgcttcatcttaaaacaaatgggtcttaaagaaaagactatcgatgttgaactcgaagttggcgagcaagttcgtattaaatcaggtccatttgcgaatcaagttggtgaagttcaagaaattgaaacagataagtttaarctaacagtattagtagatatgtttggccgagaaacaccagtagaagttgaattcgatcaaatagaaaagctttaa

SEQ ID NO: 1702 - DNA, 546 bp, Staphylococcus aureus
atgcaacaaaataaacgtcttatcacaataagtatgttgagcgcgattgcgtttgtrttaacttttatcaagtttcctataccatttttgccaccatacttaactttagattttagtgatgtaccgtcactactagctacatttacgtttggaccagttgccggtatcrtagttgcactggttaaaaayttrytgaactacttatttagtatgggcgatccagttggrccrtttgctaactttttagcaggcgcaagtttcttattaactgcttacgccatctataaaaataaacgttcaacaaaatctttgattactggattaatcattgcaacaatcgttatgactatygtgttgagtatyttgaactatttcgttctattacctttrtacggtatgatatttaacttagctgatatcgcaaataatcttaaagtaatcattgtwtcaggaattataccattcaatattattaaaggtatcgtyatttctattgtatttattttactatatagaaggcttgcgaatttcttgaaaagaatttaa

SEQ ID NO: 1703 - DNA, 432 bp, Staphylococcus aureus
gtgcacatcgtggctaaaaaagtagataaagttgttaaattacaaattcctgcaggtaaagcgaatccagcaccaccagttggtccagcattaggtcaagcaggtgtgaacatcatgggattctgtaaagagttcaatgcacgtactcaagatcaagcaggtttaattattccggtagaaatcagtgtttatgaagatcgttcatttacatttattacaaaaactccaccggctccagtattacttaaaaaagcagctggtattgaaaaaggttcaggygaaccaaacaaaactaaagttgctacagtaactaaaratcaagtacgcgaaattgctaacagcaaaatgcaagacttaaacgctgctgacgaagaagcagctatgcgtattatcgaaggtactgcacgtagtatgggtatcgttgtagaataa

SEQ ID NO: 1704 - DNA, 117 bp, Staphylococcus aureus
atgacgatttttactcaattgagtgatagaatcaaaaaagccatctcaaaaattaatcaagcaaacaacattccaaacaatgctcgcaaatcaccaatgtatcactctccaattacg

SEQ ID NO: 1705 - DNA, 384 bp, Staphylococcus aureus
atgcgacttattttaatcgtyattggcttaatatttacagcgcttggtattgcaggtgccgtattacctttactgccaacgaccccttttttactcgtagcagttttttgytttgctcgaagttcagatcgsttttacaattggcttattaatcaaaaaatttataaagaatatgtagaaaacttttatttacatcgaggctacacgctacaacagaaaattaaaattttaattagcttatacattgtaataggtttttcaatttatatggtggatgttcttgcagtmcgtrtaggattaatcataatggttatcatacaaaccgctgtactctttacatttgtaaaaacattacccaaatcaaatmataaaatagaggagtga

SEQ ID NO: 1706 - DNA, 693 bp, Staphylococcus aureus
atggctaaaaaaggtaaaaagtatcaagaagcagctagtaaagttgaccgtactcagcactacagtgttgaagaagcaattaaattagctaaagaaacaagcattgctaactttgacgcttctgttgaagttgcattccgtttaggaattgatacacgtaaaaatgaccaacaaatccgtggtgcagttgtattaccaaacggaactggtaaatcacaaagtgtattagtattcgctaaaggtgacaaaattgctgaagctgaagcagcaggtrctgactatgtaggtgaagcagaatacgttcaaaaaatccaacaaggttggttcgacttcgatgtagtagttgctacaccagacatgatgggtgaagttggtaaattaggtcgtgtattaggaccaaaaggtttaatgccaaaccctaaaactggaactgtaacaatggatgttaaaaaagctgttgaagaaatcaaagctggtaaagtagaataycgtgctgaaaaagctggtatcgtacatgcatcaattggtaaagtttcatttactgatgaacaattaattgaaaacttcaatactttacaagatgtattagctaaagctaaaccatcatctgctaaaggtacatacttcaaatctgttgctgtaactacaacaatgggtcctggagttaaaattgatactgcaagtttmwaataa

SEQ ID NO: 1707 - DNA, 501 bp, Staphylococcus aureus
atgtctgctatcattgaagctaaaaaacaactagttgatgaaattgctgaggtactatcaaattcagtttcaacagtaatcgttgactaycgtggattaacagtagctgaagttactgacttacgttcacaattacgtgaagctggtgttgagtataaagtatacaaaaacactatggtacgtcgtgcagctgaaaaagctggtatcgaaggcttagatgaattcttaacaggtcctactgctattgcaacttcaagtgaagatgctgtagctgcagcgaaagtaatttctggatttgctaaagatcatgaagcattagaaattaaatcaggygttatggaaggcaatgttattacagcagaagaagttaaaactgttggttcattaccttcacacgatggtcttgtatctatgcttttatcagtattacaagctcctgtacgcaacttcgcttatgcggttaaagctattggagaacaaaaagaagaaarcgctgaataa

SEQ ID NO: 1708 - DNA, 207 bp, Staphylococcus aureus
atgaataaaataaatgatagagatttaacagaattgagtagctatagggtttatcaagacatcaataaagataatgactttacagttaacgaaaaacgatttaagcaggcagatgtatttgaagatttatatagagagaaactaaaagacacaaataaattaagagagtataattatttacaaaatgaaacttttaaaagcgcataa

SEQ ID NO: 1709 - DNA, 369 bp, Staphylococcus aureus
atggctaatcatgaacaaatcattgaarcgattaaagaaatgtcagtattagaattaaacgacttagtaaaagcaattgaagaagaatttggtgtaactgcagctgctccagtagcagtagcaggtgcagctggtggcgctgacgctgcagcaraaaaaactgaatttgacsttgagttaacttmagctggttcatctaaaatcaaagttgttaaagctgttaaagaagcaactggtttaggattaaaagatgctaaagaattagtagacggagctcctaaagtaatcaaagaagctttacctaaagaagaagctgaaaaacttaaagaacaattagaagaagttggagctactgtagaattaaaataa

SEQ ID NO: 1710 - DNA, 162 bp, Staphylococcus aureus
atgaaaatattagcttgtaaaattgcaatgaaycctattgtaatgagtccgattgcagaaacacccgaygccaaaccatcgagtccatcaattaagttaattgcatttgtaatagcaacaatccaaatcacagtaattggaatactaagaaatccaaaatga

SEQ ID NO: 1711 - DNA, 609 bp, Staphylococcus aureus
atgagtcattattacgatgaagatccaagtgtaattagcaatgaacaacgtattcaatatcaattaaaccatcataaaattgatttaataactgataayggagtgttttcgaaagataaagtagattatggttcagatgttcttgttcaaacttttttaaaagcgcatccacctggtccaagtaagcgaattgccgatgttggttgtggttacggaccaattggtttgatgattgctaaagtatcaccacatcattcaattacaatgctagatgttaatcacagagcgctagccttagttgaaaaaaacaaaaaawtaaatggtattgataatgygatcgtaaaggaaagtgatgctttgtctgctgtggaagacaaaagttttgattttattttaaccaatccaccaataagagcagggaaagaaaccgtgcatcgtatattcgagcaagcattacatagattagactcgaacggtgaactattygttgtaattcagaagaagcaaggtatgccatctgcaaagaaaagaatgaatgaactttttggaaatgtagaagtggtaaataaagataaaggatattacattctgagaagtataaaagcttga

SEQ ID NO: 1712 - DNA, 3552 bp, Staphylococcus aureus
ttggcaggtcaagttgtccaatatggaagacatcgtaaacgtagaaactacgcgagaatttcagaagtattagaattaccaaacttaatagaaattcaaactaaatcttacgagtggttcctaagagaaggtttaatcgaaatgtttagagacatttctccaattgaagattttactggtaatttgtcattagagtttgtggattaccgtttaggagaaccaaaatatgatttagaagaatctaaaaaccgtgacgctacttatgctgcacctcttcgtgtaaaagtgcgtctaatcattaaagaaacaggagaagttaaagaacaagaagtctttatgggtgatttcccattaatgactgatacaggtacgttcgttatcaatggtgcagaacgtgtaatcgtatctcaattagttcgttcaccatccgtttatttcaatgaaaaaatcgacaaaaatggtcgtgaaaactatgatgcaacaattattccaaaccgwggtgcatggttagaatatgaaacagatgctaaagatgttgtatacgtrcgtattgatagaacacgtaaactaccattaacagtattgttacgtgcattaggtttctcaagygaccaagaaattgttgaccttttaggtgacaatgaatatttacgtaatactttagagaaagacggcactgaaaacactgaacaagcgttattagaaatctatgaacgtttacgtccaggtgaaccaccaactgttgaaaatgctaaaagtctattgtattcacgtttctttgatccaaaacgctatgacttagcaagcgtgggtcgttataaaacaaacaaaaaattacatttaaaacatcgtttattyaatcaaaaattagctgagccaattgtraatactgaaactggtgaaattgtagttgaagaaggtacagtgcttgatcgtcgtaaaatcgacgaaatcatggatgtacttgaatcaaaygcaaacagcgaagtgtttgaattgcatggtagcgttatagacgagccagtagaaattcaatcaattaaagtatatgttcctaacgatgatgaaggtcgtacgacaactgtaattggtaatgctttccctgactcagaagttaaatgyattacaccrgcagatatcatygcttcaatgagttacttctttaacttattaagyggtattggatatacagatgatattgaccatttaggtaaccgtcgtttacgttctgtaggtgaattactacaaaaccaattccgtatcggtttatcaagaatggaaagagttgtacgtgaaagaatgtcaattcaagatactgagtctatcacacctcaacaattaattaatattcgacctgttattgcatctattaaagaattctttggtagctctcaattatcacaattcatggaccaagcaaayccattagctgagttaacgyataaacgtcgtctatcagcattaggacctggtggtttaacacgtgaacgtgckcaaatggaagtrcgtgacgttcactactctcactatggccgtatgtgtccaattgaaacrcctgagggaccaaacattggattgattaactcattatcaagttatgcacgtgtaaatgaattcggctttattgaaacaccatatcgtaaagttgatttagatacacatgctatcactgatcaaattgactatttaacagctgacgaagaagatagctatgttgtagcacaagcaaactctaaattagatgaaaatggtcgtttcatggatgatgaagttgtatgtcgtttccgtggtaacaayacagttatggctaaagaaaaaatggattatatggatgtatcgccgaagcaagttgtttcagcagcgacagcatgtattccattcttagaaaaygatgactcaaaccgtgcattgatgggtgcgaacatgcaacgtcaagcagtgcctttgatgaatccagaagcaccatttgttggwacaggtatggaacacgttgcagcacgtgattctggtgcrgctattacagctaagcacagaggtcgtgttgaacatgttgaatctaatgaaattcttgtwcgtcgtctagttgaagagaacggcgttgagcatgaaggtgaattagatcgctatccattagctaaatttaaacgttcaaactcaggtacatgttacaaccaacgtccaatcgttgcagttggagatgttgttgagtwtaacgagattttagcagatggaccatctatggaattaggagaaatggcattaggtagaaacgtagtagttggtttcatgacttgggacggttacaactatgaggatgccgttatcatgagtgaaagacttgtgaaagatgacgtgtatacttctattcatattgaagagtatgaatcagaagyacgtgatactaagttaggacctgaagaaatcacaagagatattcctaatgtttctgaaagtgcacttaagaacttagacgatcgtggtatcgtttatattggtgcagaagtaaaagatggagatattttagttggtaaagtaacgcctaaaggtgtaactgagttaactgccgaagaaagattgttacatgcaatctttggtgaaaaagcacgtgaagttagagatacttyattacgtgtacctcacggcgctggcggtatcgttcttgatgtaaaagtattcaatcgygaagaaggcgacgayacattatcacctggtgtaaaccaattagtacgtgtatayatcgttcaaaaacgtaaaattcatgttggtgataagatgtgtggtcgacatggtaacaaaggtgtcatttctaagattgttcctgaagaagatatgccttacttaccagayggacgtccgatygatatcatgttaaaycctcttggtgtaccatctcgtatgaacatcggacaagtattagagctacacttaggtatggctgctaaaaatcttggtattcacgttgcatcaccagtatttgacggygcaaacgatgacgatgtatggtcaacaattgaagaagctggtatggctcgtgatggtaaaactgtactttatgatggacgtacaggtgaaccattcgataaccgtatttcagtaggtgtaatgtacatgttgaaacttgcgcacatggttgatgataaattacatgcgcgttcaacaggaccatattcacttgttacacaacaaccacttggmggtaaagcgcaattcggtggacaacgtttyggtgagatggaggtatgggcacttgaagcatatggtgctgcatacacattacaagaaatcttaacttacaaatccgatgatacagtaggacgtgtgaaaacatacgaggctattgttaaaggtgaaaacatctctagaccaagtgttccagaatcattccgagtattgatgaaagaattacaaagtttaggtttagatgtaaaagttatggatgagcaagataatgaaatcgaaatgacagacgttgatgacgatgatgttgtagaacgyaaagtagatttacaacaaaatgatgctcctgaaacacaaaaagaagttactgattaa

SEQ ID NO: 1713 - DNA, 2163 bp, Staphylococcus aureus
atgaataaaattaatgatagagacttaacagaattgagtagttactgggtttatcaagacatcaataaagataatgattttacagttaacggaaaaagatttaagcaggttgatgaatataatgataatggaaataaaaataaaaaaggtgcctcagatttaaaaatttatgaattgttggatgaaaaaggaaaaccaactggtgaacaaaccatgatttatcaaggaacatctaatgaggcaataaaccctaataatccattaaaatctttagatatcggagatgattggttacaaaatgcgaaattaatggataatagtaataagtcaacggattatcttaagcaatcagacgaatttgcagatttatatagagacaaactaaatgacgctaataaattaagtaagtataactttacacaaaaatatggtgttagtccaaataattacaaaaacaaaaccattgtggcggatggcggtaattcggaaggcggtgcaggagcaaaatatcaaggagcgaaacatccaaatgaaaaagttgttgctactgacccagcaatggtaccttatgctgcttggcagaaatttgctagaccacgctttgataatatgattagttttaatagtaccaacgatttattaacatggttacaagatccattcatcaaagatatgccaggaaaacgcgttaacattagtgatggtgtgcccaggttagatgctttaatagacagccatgtaggttataaaaggaagttaaatagaaaagacaacacatacgatactgtaccactaatcaaaattaagtcggtaaaagatacagaaattaaaaatggaaaaaaagtaaaaaagactattaacataacattagatatggatgggcgaattccgataaatgtttggacaggggattcgattgcacgttctggaagaggaactttaattaaacttaatttagaaaatcttgatgcgttgagtaaactgattactggtgaaactagtggtatgttagcagaatgcgtaatctttttaaatgaaagttttaacatctcagaaaatgaaaataaaaattttgcagatagaaagcaacaattatcagaaggatttaaggataagattaacttatttcaattagaagaaatggaaagaactttaattagtaaaataaactcacttgaagaagttgcagatgaaacaatagaaagtattagtgctgttaaacacttattacctgattttgcattggatgcattaaaagaaagaattaatgagttgtttaaaggtataaaatcttttatagaaaaagtgtatgatagtatagataatgaaattttagaaattttcaaaaatatagatcacgacttcagagatggagtatctgaagaaatgatgaaacatttgaaagtagtgaaacagaatatagagcgaataaaaaatcaaaatgatatttatggtaggcaaattgcagaaattagaagtattatgaaacaacaagatgcaacaattttagatgggaatttccaaattaattgtagcggcgaaaatatggtacagggtctagttataccttctaattatttaggaagaaaaatgaaaatattaaaagaccatatcgatgatggtattaaaaaaatagcagactatgttcaaagtatatatgatgaatatgcatcgaaaattgttgatgtaataaaatatttgattaatacaattcccaaaatacgtaagaatttaagacatgcaattgaaatgttaaatgtaaaaaagaaagaatttttgtccctgattcctaatgtaacttgtaattatattaaaactaaattagaagaattagataatactttaggcaaatgggagccatttcttaatgatttaaaagcagtgtcaccaattttagataaccatttagatgatattgttaagaacatgaagcctttgattgtacagatgttatttgaaccatcacattatgatgatatgtttattttaaacacacaagctcatgcrcgtcttgatcaaatggcacaacagtttgaagttgtttgtaatggcttgaacgaaaatgaaggacaagcaattcaaacgatggatcaatctgcctctctaatacggtcaaacttaattcaagttaaagaacaattagaaaaactagctgtatactaa

SEQ ID NO: 1714 - DNA, 2163 bp, Staphylococcus aureus
atgaataaaattaatgatagggatttaacagaattaagtagttactgggtttatcaaaatattgatataaaaaaagaatttaaagttaatggaaaaaggtttaaacaagtagacagttataatgatgataagaatagtaatttgaatggtgctgctgatattaaaatatatgagttattagatgataaaagtaaaccaactggtcaacagacaataatttatcaaggaacatctaatgaggcaattaatccaaataatccattaaaatcatcggggtttggagatgattggctccaaaatgctaaattaatgaataatgataatgaaagcacagattatttaaagcaaacagatcaattatcaaatcaatataaaataaagttagaagatgcagatagattatcaaatagtgattttttaaaaaaatatagaatggaatcaagtaacttcaaaaacaaaaccattgtggcggatggcggtaattcggaaggcggtgcaggagcaaaatatcaaggagcgaaacatccgaatgaaaaagttgttgctactgactcagcaatgattccttatgctgcttggcagaaatttgctagaccacgctttgataatatgattagttttaatagtaccaacgatttattaacatggttacaagatccattcatcaaagatatgccaggaaaacgcgttaacattaatgatggtgtgcccaggttagatactttaatagacagccatgtaggttataaaaggaagttaaatagaaaagataacacatacgatactgtaccactaatcaaaataaagtcggtaaaagatacagaaattaaaaatggaaaaaaagtaaaaaagactattaacataacattagatatggatgggcgaattccaataaatgtttggacaggagattcgattgcacgttctggaagaggaactttaattaaacttaatttagaaaatcttgatgcgttgagtaaactgattactggtgaaacaagtggtatgttagcagaatgcgtaatctttttaaatgaaagttttaacatctcagaaaatgaaaataaaaattttgcagatagaaagaaacaattatcagaaggatttaaggataagattaacttatttcagttagaagaaatggaaagaactttaattagtaaaataaactcacttgaagaagttgcagatgaaacaatagaaagtattagtgctgttaaacacttattacctgattttgcattggatgcattaaaagaaagaattaatgagttgtttaaaggtataaaatcttttatagaaaaagtgtatgatagtatagataatgaaattttagaaattttcaaaaatatagatcacgacttcagagatggagtatctgaagaaatgatgaaacatttgaaagtagtgaaacagaatatagaccaaataaaaaatcaaaatgatatttatggtaggcaaattgcagatattagaagtattatgaaacaacaagatgcaacaattttagatggraatttycaaattaattgtagcggcgaaaatatggtacagggtctagttataccttctaattatttaggaagaaaaatgaaaatattaaaagaccatatcgatgatggtattaaaaaaatagcagactatgttcaargtatatatgatgaatatgcatcgaaaattgtygatgtaataaaatatttgattaatacaattcccaaaatacgtaagaatttaagacatgcaattgaaatgttaaatgtaaaaaagaaagaatttttgtccctgattcctaatgtaacttgtaattatattaaaactaaattagaagaattagataatactttaggcaaatgggagccwtttcttaatgatttaaaagcagtgtcaccaattttagataaccatttagatgatattgttaagaacatgaagcctttgattgtacaratgwtatttgaaccatcacattatgaygatatgtttattttaaacacacaagctcatgcrcgtcttgatcaaatggcacaacagtttgaagttgtttgtaatggcttgaacgaaaatgaaggacaagcaattcaaacgatggatcaatctgcctctctaatacggtcaaacttaattcaagttaaagaacaattagaaaaactagctgtatactaa

SEQ ID NO: 1715 - DNA, 2046 bp, Staphylococcus aureus
atggggtgcacagtaaagatgaataaaattaatgatagggatttaacagaattaagtagttactgggtttatcaaaatattgatataaaaaaagaatttaaagttaatggaaaaaggtttaaacaagtagacagttataatgatgataagaatagtaatttgaatggtgctgctgatattaaaatatatgagttattagatgataaaagtaaaccaactggtcaacagacaataatttatcaaggaacatctaatgaggcaattaatccaaataatccattaaaatcatcggggtttggagatgattggctccaaaatgctaaattaatgaataatgataatgaaagcacagattatttaaagcaaacagatcaattatcaaatcaatataaaataaagttagaagatgcagatagattatcaaatagtgattttttaaaaaaatatagaatggaatcaagtaacttcaaaaacaaaaccattgtggcggatggcggtaattcggaaggcggtgcaggagcaaaatatcaaggagcgaaacatccgaatgaaaaagttgttgctactgactcagcaatgattccttatgctgcttggcagaaatttgctagaccacgctttgataatatgattagttttaatagtaccaacgatttattaacatggttacaagatccattcatcaaagatatgccaggaaaacgcgttaacattaatgatggtgtgcccaggttagatactttaatagacagccatgtaggttataaaaggaagttaaatagaaaagataacacatacgatactgtaccactaatcaaaataaagtcggtaaaagatacagaaattaaaaatggaaaaaaagtaaaaaagactattaacataacattagatatggatgggcgaattccaataaatgtttggacaggagattcgattgcacgttctggaagaggaactttaattaaacttaatttagaaaatcttgatgcgttgagtaaactgattactggtgaaacaagtggtatgttagcagaatgcgtaatctttttaaatgaaagttttaacatctcagaaaatgaaaataaaaattttgcagatagaaagaaacaattatcagaaggatttaaggataagattaacttatttcagttagaagaaatggaaagaactttaattagtaaaataaactcacttgaagaagttgcagatgaaacaatagaaagtattagtgctgttaaacacttattacctgattttgcattggatgcattaaaagaaagaattaatgagttgtttaaaggtataaaatcttttatagaaaaagtgtatgatagtatagataatgaaattttagaaattttcaaaaatatagatcacgacttcagagatggagtatctgaagaaatgatgaaacatttgaaagtagtgaaacagaatatagaccaaataaaaaatcaaaatgatatttatggtaggcaaattgcagatattagaagtattatgaaacaacaagatgcaacaattttagatggaaattttcaaattaattgtagcggcgaaaatatggtacagggtctagttataccttctaattatttaggaagaaaaatgaaaatattaaaagaccatatcgatgatggtattaaaaaaatagcagactatgttcaaggtatatatgatgaatatgcatcgaaaattgtcgatgtaataaaatatttgattaatacaattcccaaaatacgtaagaatttaagacatgcaattgaaatgttaaatgtaaaaaagaaagaatttttgtccctgattcctaatgtaacttgtaattatattaaaactaaattagaagaattagataatactttaggcaaatgggagccttttcttaatgatttaaaagcagtgtcaccaattttagataaccatttagatgatattgttaagaacatgaagcctttgattgtacaaatgatatttgaaccatcacattatgacgatatgtttaattcaagaaaagctttaacgccagtgttctcaagcgttttataa

SEQ ID NO: 1716 - DNA, 258 bp, Staphylococcus aureus
atggctacgaaaattaaaaagataccaaaatataaattaaatgactcaaatgttaaatatctactaatgaaggacccaagcaatgaacctggtaatagtccaaataaaaagatggaaccatttttaatatcaacttgttttgtttttaaatatccaagtgatgaagaaagtcctgtcacaattagaatgactgaagacgtccctatcgctacttgtgttgtaatattatgtagtaatccatgttcaacaccgaggtaa

SEQ ID NO: 1717 - DNA, 3624 bp, Staphylococcus aureus
ttgattgatgtaaataatttccattatatgaaaataggattggcttcacctgaaaaaatccgttcttggtcttttggtgaagttaaaaaacctgaaacaatcaactaccgtacattaaaacctgaaaaagatggtctattctgtgaaagrattttcggacctacaaaagactgggaatgtagttgtggtaaatacaaacgtgttcgctacaaaggcatggtctgtgacagatgtggagttgaagtaactaaatctaaagtacgtcgtgaaagaatgggtcacattgaacttgctgctccagtttctcacatttggtatttcaaaggtataccaagycgtatgggattattacttgacatgtcaccaagagcattagaagargttatttactttgcttcttatgttgttgtagatccaggtccaactggtttagaaaagaaaactttattatctgaagctgaattcagagattattatgataaatacccaggtcaattygttgcaaaaatgggtgcagaaggtattaaagatttacttgaagagattgatcttgacgaagaacttaaattgttacgcgatgagttggaatcagctactggtcaaagacttrctcgtgcaattaaacgtttagaagttgttgaatcattccgtaattcaggtaacaaaccttcatggatgattttagatgtacttccaatcatcccaccagaaattcgtccaatggytcaattagatggtggacgatttgcaacaagtgacttaaacgayttataccgtcgtgtaattaatcgaaataatcgtttgaaacgtttattagatttaggtgcacctggtatcatcgttcaaaacgaaaaacgtatgttacaagaagccgttgacgctttaattgataatggtcgtcgtggtcgtccagttactggcccaggtaaccgtccattaaaatctttatctcatatgttaaaaggtaaacaaggtcgtttccgtcaaaacytacttggtaaacgtgtygactattcaggacgttcagttatygcrgtaggtccaagcttgaaaatgtaccaatgtggtttrccraaagaaatggcacttgaactatttaaaccattygtaatgaaagaattagttcaacgtgaaattgcaactaacattaaaaatgcgaagagtaaaatcgaacgyatggatgatgaagtttgggacgtattggaagaagtaattagagaacatcctgtattacttaaccgtgcaccaacacttcatagacttggtattcaagcatttgaaccaactttagttgaaggtcgtgcgattcgtctacatccacttgtaacaacagcttataaygctgactttgayggtgaccaaatggcggttcacgttcctttatcaaaagaggcacaagctgaagcaagaatgttgatgttagcagcacaaaacatcttgaaccctaaagatggtaaaccwgtagttacaccatcacaagatatggtacttggtaactattaccttactttagaaagaaaagatgcagtaaatacaggcgcaatctttaataatacaaatgaagtrttaaaagcrtatgcaaatggctttgtacatttacacacwagaattggtgtacatgcaagttcrttcaayaayccaacatttactgaagaacaaaacaaaaagattcttgctacgtcagtaggtaaaattatattcaatgaaatcattccrgattcatttgcttatattaatgaacctacgcaagaaaacttagaaagaaagacaccaaacagawayttcatcgatcctacaactttaggtgaaggtggattaaaagaatactttgaaaatgaagaattaattgaacctttcaacaaaaaattcttaggtaatattattgcagaagtattcaacagatttagcatcactgatacatcaatgatgttagaccgtatgaaagacttaggattcaaattctcatctaaagctggtattacagtaggtgttgctgatatcgtagtattacctgataagcaacaaatacttgatgagcatgaaaaattagtcgacagaattacaaaacaattcaaycgtggtttaatcactgaagaagaaagatataatgcagttgttgaaatttggacagatgcaaaagatcaaattcaaggtgaattgatgcaatcacttgataaaactaacccaatcttcatgatgagtgattcaggtgcccgtggtaacgcatctaactttacacagttagcaggtatgcgtggattgatggccgcaccatctggtaagattatcgaattaccaatcacatcttcattccgtgaaggtttaacagtacttgaatacttcatctcaactcacggtgcrcgtaaaggtcttgccgatacagcacttaaracagctgactcaggatatcttactcgtcgtcttgttgacgtggcacaagatgttattgttcgtgaagaagactgtggtacwgatagaggtttattagtttctgatattaaagaaggtacagaaatgattgaaccatttatcgaacgtattgaaggtcgttattctaaagaaacaattcgtcatcctgaaactgatgaartwatcattcgtcctgatgaattaattacacctgaaattgctaagaaaattacagatgctggtattgaacaaatgtatattcgctcagcatttacttgtaacgcamgacayggtgtttgtgaaaaatgttacggtaaaaaccttgctactggtgaaaaagttgaagttggtgaagcagttggtacaattgcagcccaatctatcggtgaaccaggtacacagcttacaatgcgtacattccatacaggtggggtagcaggtagcgatatcacacaaggtcttcctcgtattcaagagattttcgaagcacgtaaccctaaaggtcaagcggtaattacggaaatcgaaggtgtcgtagaagatattaaattagcaaaagatagacaacaagaaattgttgttaaaggtgctaatgaaacaagatcataycttgcttcaggtacttcaagaattattgtagaratcggtcaaccagtwcaacgtggtgaagtattaactgaaggttctattgaacctaagaattacttatctgttgctggattaaacgcgactgaaagctacttattaaaagaagtacaaaaagtttaccgtatgcaaggkgtagaaatcgacgataaacacgttgaggttatggttcgacaaatgttacgtaaagttagaattatcgaagcaggtgatacgaagttattaccaggttcattagttgatattcayaacttyacagatgcaaatagagaagcatttaaacaccgyaagcgycctgcaacagctaaaccagtattacttggtattactaaagcatcacttgaaacagaaagtttcttatctgcagcatcattccaagaaacaacaagagttctwacagatgcagcaattaaaggtaagcgtgatgacttattaggtcttaaagaaaacgtaattatyggtaagytaattccagctggtactggtatgagacgttayagcgacgtaaaatacgaaaaaacagctaaaccagttgcagaagttgaatctcaaactgaagtaacggaataa

SEQ ID NO: 1718 - DNA, 255 bp, Staphylococcus aureus
ttgtctaaggaaaaagttgcacgctttaacaaacaacattttgtagttggtcttaaagaaacgcttaaagcgttaaagaaagatcaagttacatctttgattattgctgaagacgttgaagtatatttaatgactcgcgtgttaagccaaatcaatcagaaaaatatacctgtatcttttttcaaaagcaaacatgctttgggtaaacatgtaggtattaacgtcaatgcgacaatagtagcattgattaaatga

SEQ ID NO: 1719 - DNA, 1752 bp, Staphylococcus aureus
atgatgagccggctaaatagtgtcgtaattaaactgtggttaactattattttaatagtgacgacagttttaattttattaagtattgctttaattacctttatgcaatactatttcacacaagaaacygaaaatgccataagagaagatgctagacgtataagttcactggtcgaacaatcacataataaagaagaagcaataaaatatagtcaaacattaattgaaaatcctggtgggttgatgattataaataataaacatcgtcaatcaacggcttcrctttctaatattaaaaagcaaatgttgaatgaagtagtcaacaacgaccattttgacgatgtgtttgataaaggtaaatctgttactcgaaatgtaacgattaaagaaaagggytcatctcaaacatatattttgttaggctatccaacaaaagcacagaagaatagtcatagcaaatatagtggagtctttatatataaagacttgaaatcaatcgaagatacaaataatgctattacgattatcacyataattacggctgttattttcttaacaattacaacagtctttgcgtttttcttatcrtcaagaattacaaaacctttaagacgtttaagagaccaagctacacgtgtatctgaaggggattactcttataaaccttctgtcacaacgaaagatgaaattggtcaattatcrcaggcatttaatcagatgagtacagaaatcgaagagcatgtcgacgcattatccacatctaaaaatattagagacagcttaattaactctatggtagaaggtgtcctaggtattaatgagagtcgacaaattatcttatckaataagatggcgaatgatattatggacaatattgatgaagatgctaaagctttcttattaagacaaatwgaagatacttttaaatcaaaacaaackgaaatgcgygatttagaaatgaatrcacgattctttgttgtgaccacaagctatatcgayaagattgaacarggaggtaaaagtggtgttgttgtgacagttcgtgatatgactaatgagcacaatctagatcaaatgaagaaagatttcattgctaatgtatcacatgaattacgwacacckatatcattactwcaaggttatactgaatcaattgtagatggtattgttacagaaccggatgaaataaaagaatcgctygccrttgtccttgatgaatcgaaacgtttaaatcgwttagttaatgaattgttaaatgtcgcwcgcatggatgctgaagggttatccgtaaataaagaagttcagcctattgcagcgttactagataagatgaaaattaagtatcgycaacargctgatgatttaggtctaaatatgacttttaattattgtaagaagcgtgtttggasttatgatatggatcgcatggaccaagtactaacgaacttaattgataatgcatcacgttatacgaaacctggwgatgaaattgcaattacttgtgatgaaaatgaaagcgaagatattttatacattaaagatacaggyacaggcattgcaccagaacatttacaacaagtatttgatcgtttttataaagttgatgcagcgagaacgcgaggtaaacaaggtaccggtttaggtttgttcatttgtaaaatgattatcgaagagcatggtggttccatwgatgttaaaagcgaattaggraaaggcacaacatttattattaaactaccaaaaccagaataa

SEQ ID NO: 1720 - DNA, 414 bp, Staphylococcus aureus
atgccaactattaaccaattagtacgtaaaccaagacaaagcaaaatcaaaaaatcagattctccagctttaaataaaggtttcaacagtaaaaagaaaaaatttactgacttaaactcaccacaaaaacgtggtgtatgtactcgtgtaggtacaatgacacctaraaaacctaactcagcgttacgtaaatatgcacgtgtgcgtttatcaaacaacatcgaaattaacgcatacatccctggtatcggmcataacttacaagaacacagtgttgtacttgtacgtggtggacgtgtaaragacttaccaggtgtgcgttaccatattgtacgtggagcacttgatacttcaggtgttgacggacgtagacaaggtcgttcattatacggaactaagaaacctaaaaactaa

SEQ ID NO: 1721 - DNA, 726 bp, Staphylococcus aureus
atgtcgaacgaaatacttatcgtagatgatgaggatagaatcagaagrttacttaaaatgtatttagaaagagaatcttttgaaatccatgargcaagtaatggccaagaggcttatgaacttgcaatggagaataattatgcttgcatactactagatttaatgttgcctgaaatggatggtatccaggtggcaactaaattgcgtgaacataaacaaacaccgattattatgttgactgctaaaggtgaagaaacaaaccgtgttgaaggttttgartctggtgcagatgattatatcgtcaaaccattttcaccaagagaagtagtcttaagagttaaagcacttctaagaagaacgcaatctacaactgtagaacaaagcgaacctcacgcacgtgatgtgattgaatttaaacatttagaaatagataatgatgcacatcgcgtacttgctgataatcaagaagttaatttgactcctaaagagtacgaattattaatatatttagctaaaacaccaaataaagtatttgaccgtgaacaattattaaaagaagtttggcattatgaattctatggtgatttaagaacagttgatactcatgttaaacgacttagagaaaagttaaatcgtgtgtctagygaagctgcgcatatgattcaaacagtctggggcgttgggtataaatttgaggttaaatctaatgatgagccggctaaatag

SEQ ID NO: 1722 - DNA, 471 bp, Staphylococcus aureus
atgcctcgtaaaggatcagtacctaaaagagacgtattaccagatccaattcataactctaagttagtaactaaattaattaacaaaattatgttagatggtaaacgtggaacagcacaaagaattctttattcagcattcgacctagttgaacaacgcagtggtcgtgatgcattagaagtattcgaagaagcaatcaacaacattatgccagtattagaagttaaagctcgtcgygtaggtggttctaactatcaagtaccagtagaagttcgtccagagcgtcgtactactttaggtttacgttggttagttaactatgcacgtcttcgtggtgaaaaaacgatggaagatcgtttagctaacgaaattttagatgcagcaaataatacaggtggtgccgttaagaaacgtgaggacactcacaaaatggctgaagcaaacaaagcatttgctcactaccgttggtaa

SEQ ID NO: 1723 - DNA, 738 bp, Staphylococcus aureus
atgactaaagaattagaacgattacaaaaacgtatagctaatagcggttatacttcaagacgtaargcagaaactttaatttctgaaggaaaagtgaaagtgaatggtacgactgtcactgaattaggaacaaaagtraagccatcagatacgattgaagttgaaggtattaaaatagarctagaagacaaaatttacattttattccataaaccaactcaagtgataacaagtgtatcwgatgatagaggacgtacagtggttacrgattactttaaagatatagaagcrcgtatttatcctgttggtcgtttagactatgatacttctggattgttattactyacaaatgatggtgaatttactaatttaatgacacatccaagatatcaaattaagaaraaatatgtwgcraaattaaaaggttayttaatgagagaagaagtgaaagcsctagaaaaaggtattgaattagaagatggtatgacgcaaccggctgaagtgaaagttaagaaacaagataaagataaaaacacaacattggttgaaattacaatwacagaaggtcgtaatcgycaagtcagaagaatgttcgaacattttggtcatcaagtgacgaaactgtctcgtattgaatatgggcctttaaatgttgtcggtttgaatgctggtgaaggacgtgtattgacgcctcatgaagtaaaagtgatgcgtcatttagcagaacatgggaaataa

SEQ ID NO: 1724 - DNA, 2082 bp, Staphylococcus aureus
atggctagagaattttcattagaaaaaactcgtaatatcggtatcatggctcacattgatgctggtaaaacgactacgactgaacgtattctttattacactggccgtatccacaaaattggtgaaacacaygaaggtgcttcacaaatggactggatggagcaagaacaagaccgtggtattactatcacatctgctgcaacaacagcagcttgggaaggtcaccgtgtaaacattatcgatacacctggacacgtagacttcactgtagaagttgaacgttcattacgtgtacttgacggagcagttacagtacttgatgcacaatcaggtgttgaaccwcaaactgaaacagtttggcgtcaggctacaacttatggtgttccacgtatcgtatttgtaaacaaaatggacaaattaggtgctaacttcgaatactctgtaagtacattacatgatcgtttacaagctaacgctgctccaatccaattaccaattggtgcggaagacgaattcgaagcaatcattgacttagttgaaatgaaatgtttcaaatatacaaatgatttaggtactgaaattgaagaaattgaaattcctgaagaccacttagatagagctgaagaagctcgtgctagcttaatcgaagcagttgcagaaactagcgacgaattaatggaaaaatatcttggtgacgaagaaatttcagtttctgaattaaaagaagctatccgccaagctactactaacgtagaattctacccagtactttgtggtacagctttcaaaaacaaaggtgttcaattaatgcttgacgctgtaattgattacttaccttcaccactagacgttaaaccaattattggtcaccgtgctagcaaccctgaagaagaagtaatcgcgaaagcagacgattcagctgaattcgctgcattagcgttcaaagttatgactgacccttatgttggtaaattracattcttccgtgtgtaytcaggtacaatgacatctggttcatacgttaagaactctactaaaggtaaacgtgaacgtgtaggtcgtttattacaaatgcacgctaactcacgtcaagaaatcgatactgtatactctggagatatcgckgctgcggtaggtcttaaagatacaggtactggtgatactttatgtggtgagaaaaatgacattatcttggaatcaatggaattcccwgagccagttattcacttatcagtagagccaaaatctaaagctgaccaagataaaatgactcaagctttagttaaattacaagaagaagacccaacattccatgcacacactgacgaagaaactggacaagttatcatcggtggtatgggtgagcttcacttagacatcttagtagaccgtatgaagaaagaattcaacgttgaatgtaacgtaggtgctccaatggtttcatatcgtgaaacattcaaatcatctgcacaagttcaaggtaaattctctcgtcaatctggtggtcgtggtcaatacggtgatgttcacattgaattcacaccaaacgaaacaggcgcaggtttcgaattcgaaaacgctatcgttggtggtgtagttcctcgtgaatacattccatcagtagaagctggtcttaaagatgctatggaaaatggtgtyttagcaggttatccwttaattgatgttaaagctaaattatatgatggttcataccatgatgtcgattcatctgaaatggccttcaaaattgctgcatcattagcacttaaagaagctgctaaaaaatgtgatcctgtaatcttagaaccaatgatgaaagtaactattgaaatgcctgaagagtacatgggtgatatcatgggtgacgtaacatctcgtcgtggacgtgttgatggtatggaacctcgtggtaatgcacaagttgttaatgcttatgtaccactttcagaaatgttcggttatgcaacatcattacgttcaaacactcaaggtcgcggtacttacactatgtacttcgatcactatgctgaagttccaaaatcaatcgctgaagatattatcaagaaaaataaaggtgaataa

SEQ ID NO: 1725 - DNA, 543 bp, Staphylococcus aureus
ttggataatcatggtatattagagtcgctwttatttacagctggcgatgaaggtttagatgaaaaacarctattagaaatwttrgatatrtcgaaaraycaactcgtwgaattaattgaaaattattcatcacatggattaatratacaacgatttggaaygacgtatgttttaacgactaaaaaagaagcgkcaaygtatattgaacaattaattgaacaaaagtcacaaatgaaattatcacaagcagcaatggaagtwctatcaattattgcttataaccarccattatcaagaagtgatattgaattaattcgtagtatcaattcagatggtgcrgtyaagacattgattgccaaaggactagttgaggctaaagtggtyaatgaacagcgtagccaacarttaattactactgatttatttttaaatgtatttggtatttccaatatagaagatttgccgacaactgaagaagacgatgaagaaatggatgctttyttcagtaatctagtcaatcaaaaaggagaaaataatgactaa

SEQ ID NO: 1726 - DNA, 861 bp, Staphylococcus aureus
ttgaacttaaacattttaaaatcatttttagtaactagtgaaacaaagaaccttactaaagcatcagagttacttaactattcacagtcaactgtatctacacatattgaaaaattagaaaggcaattagatgttaaattattttatagaaaaaaatatggtatggaactaacggaagaaggcttagcatacgttaaataygctaaagtgattttagatagtaatagcgaatacgagagagaaataaaaggactttacaataagaaggtaaatataagtattaacatgcaagaaagtcagtatttgtatcgctactataataagattagtgaatggttagctgaacacccatatgtaaacttgaagtttaaatccgcacattctaatttctatattaaagaagaaattgctaatttcaaatcggatattagccttatcacagacgaaaagattattaatagtaacttaactgctattcctataactgaagaacgtttaatatttgttactaacaaagagatgaaagatttcaaattaaacgatattcaaaaccatacattacttgttactgaaaaagggtgtagttacagagaacagttagaaatgattttatataaatatagcttttcaacaaaacaaatgattgaatttctaggaattgagtcattaaaaaaacacttgaaaaattcaggtgggattgcgctattgccggaatttattgttgcagatgaattagaaaataaaagtttgtttcaaatagacgtagatgtcgatattccgaatttagaaacaacattgataattaatcctgaatcgaataagcaagtacttgaatcttttgtaaaagatgtttttttataa

SEQ ID NO: 1727 - DNA, 204 bp, Staphylococcus aureus
atggataaagaatctgtcgtagcaagtttagcwagaaacaaaaagattgctgtagaaacaatgrccggtcaaagrtacatcatagaacgcattttacatacaaatgatgaaaaacatattcatattttgaaacctaaagatgtcgtgttagatgtagatascatcaaagamatygacgaaaatcatttaratgatgcaacataa

SEQ ID NO: 1728 - DNA, 732 bp, Staphylococcus aureus
atgtatgaagttaaattagatgctttcaatggaccattagatttattrctgcatcttatccaaaaatttgaaatagatatttatgatattcctatgcaagcattaacagagcagtatatgcagtacgttcatgcaatgaaacagcttgaaattaatattgcaagtgaatacctagtattagcgtcagaactcttaatgattaaaagtaagatgctattaccacaatcaacatcagatatrgatgttgatgatgacccacgggaagatttagttgggcgtttaatagaatatcaaaattataaagaatatactgctattttaaatgacatgaaagaagaaagagatttttattttacwaaaagaccgacagakttatctcatttggaaacrgatgaatcttgggatccaaatcatacgattgayttaactgaattaattgtagcttatcaaagagttaaaaatagagttgagttaaatacacctaaatctgttgaaatccgaaaagagacatttaccattcaacaagctacagaacaagtgacatcgagattgaaagataaagatcattttaacttctttagtctgtttacgttttctgagccaattgaacaagtagtcactcactttttagctattttagagatgtcaaaagcaggaataattaatattgagcaacaacgtaattttgaagatattaacattrttagaggagtgaactaccattttggataa

SEQ ID NO: 1729 - DNA, 1188 bp, Staphylococcus aureus
gtggttcaatcattacatgagtttttagaggaaaatataaattatctaaaagaaaatggtttgtataatgaaatagatacaattgaaggtgcaaacggaccagaaatcaaaatcaatgggaaatcatacattaacttatcttcaaataattatttaggactagcaacaaatgaagatttgaaatcagctgcaaaagcagctattgatacacatggwgtaggtgcaggcgctgttcgtacaatcaatggtacattagatttacacgacgaattagaagaaacactagcaaaatttaaaggaacagaagctgcaatagcttatcartcaggatttaattgtaatatggctgctatttcrgctgtyatgaataaaaatgatgctattttatcagatgagcttaatcatgcatcaattattgayggatgtcgcttatcwaaagctaaaattattcgagttaaccattcagacatggatgatttacgtgcgaaagcaaaagaagcagttgaatcaggtcaatacaataaagtgatgtatatcactgatggcgtttttagtatggatggtgatgtggctaaattacctgaaattgtagaaattgcagaagaatttggtttattaacttatgtwgacgacgctcatggttcaggtgttatgggyaaaggcgctggtacggttaaacattttggtttacaagataaaatcgatttccaaatwggtacgctttctaaagcaattggtgtcgttggcggytatgtagcaggtacaaaagagttaatagattggttaaaagcacaatcacgaccattcttattctctacatcattagcacctggggatacyaaagcaatmactgaagcagttaaaaagttaatggmttcaactgaattacatgataaattatggracaatgcacaatatttaaaaaayggattgtcaaaattaggatatgatacaggwgagtcagaaactccrattacaccagtaattattggtgawgaaaaaacaactcaagaatttagtaagcgtttaaaagacgaaggtgtctatgtgaaatctatcgttttcccaacagtrccaagaggtacaggacgtgtaagaaatatgcctacagctgcacatacaaaagacatgttagaygaagcaattgcggcttatgaaaaagtaggaaaagaaatgaakttgatttaa

SEQ ID NO: 1730 - DNA, 888 bp, Staphylococcus aureus
atggaaacaattattgaagaatatttgcgttttatacaaattgaaaaaggactaagttctaacacaattggtgcttatagacgtgatttgaaaaagtatcaagattatatgactgaacatcatatctcgcatattgattttatagatcgacaattaattcaagagtgtttggggcatttaatagaccaagggcaatctgctaaatcyattgcgcgatttatttcaacaatccgtagttttcatcaatttgctataagagaaaaatatgcggcgaaagatccaacggtattattagattcaccaaaatatgacaaaaaattgcctgacgttttaaatgttgacgaagtrttggctttattagaaacgccrgatytaaataaaattaatggwtatcgtgatcgtacgatgttagaacttctgtacgcaacgggaatgcgtgtatctgaattgatacatttagagytagaraacgtgaacttaataatgggrtttgtacgcgtatttggtaaaggcgataaagaaagaattgtrccattaggcgacgcagtcattgagtacttaactacttatattgaaacgattagaccgcaacttttaaaaaagactgttacygaagtcttatttttaaatatgcatggtaaacctttatcacgacaagcaatatggaaaatgattaaacaaaatggygtaaaggcaaacattaaaaagamgytaacgccacatacgttrcgccaytcttttgcgacacatttattggaaaatggcgcagatttaagagcagtgcaagaratgttaggtcactctgacatatctactacscaactctatacacatgtttcraaatctcaaattaraaaaatgtatwaccmatttcatsctararcataa

SEQ ID NO: 1731 - DNA, 879 bp, Staphylococcus aureus
atgtcacaagatgtaaatraattaagtaagcaaccaacgccagataaagcagaagataacgcatttttcccatcaccatattcccttagtcaatatacagcacctaaaacagattttgatggtgttgaacacaaaggtgcctataaagatggtaaatggaaagtattgatgattgctgctgaagagmgatatgtattattggaaaatggaaaaatgttctctacgggtaatcatcctgttgaaatgttattacctttacatcatttaatggaagcaggttttgacgttgatgttgcgacattatctggttatccagytaaattagaattatgggctatgccaactgaagacgaggcagttataagyacttataataaattgaaagaaaaattaaaacagccaaaaaaattagcagatgtgattaaaaatgaattaggacctgattcagaytatttatctgtctttatcccaggcggrcatgctgcagttgttggtatttctgaaagtgaggaygttcaacaaacattagattgggcattagamaatgaccgctttatagttacattatgtcatggaccagcmgcactactttcagcaggkcttaacagagaaaaatctmcattagaaggatactctgtttgtgtyttccctgactcattagatgaaggtgcaaatattgaaataggttatttacctggacgyttgaaatggttagttgctgatttattaactaaacaargwttaaaagtagttaacgacgatatgacaggaagaacgttaaaagatcgtaaattattaacaggtgacagtcctttagcttcaaatgagttaggaaaattagcagttaatgaaatgttaaatgcaatacaaaataaataa

SEQ ID NO: 1732 - DNA, 450 bp, Staphylococcus aureus
wtggaagaacgattaaatcgcgttaagcaacaattacaacaatcatcatataagctaacgccacaacgcgaagctactgttagagttctaattgaaaatgaaaaagatcatctaagtgctgaagacgtatatctgaaagtaaaagayaaagcgcctgaaattggcttggcgacagtatacagaacgttagagttgttagctgaactaaaagttgtcgacaaaattaactttggtgatggcgtcgctcgttttgatttaagaaaagaaggcgcaaaacatttccaccatcatttagtatgtatggaatgtggtcgtgtagatgaaatcgatgaagatttgttaccagaagttgaaaatcgagttgaaaatgagttcaattttaaaattttagatcatcgtttaactttccatggtgtgtgtgaaacrtgccaagctaaaggtaaaggatag

SEQ ID NO: 1733 - DNA, 1638 bp, Staphylococcus aureus
atgtcktatagcattggaattgattatggaacwgcttcaggccgtgtgtttttaattaatacaactaacggtcaagtagtatcaaaatttgtgaarccatatacacatggtgtcattgarrgtgaattaaatggtttraaaataccacatacatatgcacttcaaaatagtaatgattatttagaaattatggaagaaggaatatcatatatagtacgtgaatcaaaaatagatccagwcaatatagtaggtattggtatagactttacttcatctactattatttttactgacgaaaaycttaacccggtacataayttaaaacaatttaaaaacaatccacatgcgtatgtgaaactttggaaacatcatggtgcatataaagargcagagaaattatatcaaactgcyattgaaaataataataagtggttaggccattatggatataatgttagtagtgaatggatgattcccaaaataatggargtcatgaatcgagcaccagaaattatggaaaaaacggcttatattatggaagcgggcgattggattgtaaataaattaactaataaaaatrtacgstcgaattgtggattaggtttcaaagcattttgggaagaagaaacagggtttcattatgatttrtttgataaartagaccccaaattatcaaaagtaattcaagataaagtatctgcaccggttgttaatattggtgaagyagtagggaaactggaygataaaatggcacagaaattaggattatcaaaagavactatggtaagtccttttattattgatgcccatgctagtttattaggtattggrtctgaaaaagataaagaaatgactatggtgatgggaacaagcacatgccatcttatgttaaatgaaaagcaacatcaagtgccaggtatatcaggttctgtaaaaggagcaattattccagaattatttgcttatgaagcggggcaatcagcagtaggtgatttgtttgagtatgtcgctaagcaagcaccaaagtcatatgtagatgaagcagmaaatagaaatatgactgtatttgaattaatgaatgaaaagataaaacatcaaatgccaggtgaaagtgggctcattgctcttgattggcataatggaaatcgaagtgtattaagtgatagcaatttaacaggttgtatctttggattaactttacaaactaagcatgargatatttatagagcatatttagaagctacagcatttggtactaagatgattatgcaacagtatcaagattggcatatggaagtagaaaaggtatttgcatgtggcggtatacctaaaaagaatgctgttatgatggatatctatrcgaatgtactgaataaaaaactaattgttatggatagtgagtatgcaccagcaataggmgcagcaatattaggtgcagtcagtggtggcgcacataattcaattaatgaygcagttgatgctatgaaagagccaattttatacgaaattaatccagaagcggaaaaagtacaaaggtatgaaacattatttaaagcttataaggctttacatgatatccatggttataaaaaagctaatataatgaaagatatccagagtttaagagttgagggataa

SEQ ID NO: 1734 - DNA, 543 bp, Staphylococcus aureus
atggatttaaatgaaaaaacaattgatcgaacagttatttataatggcaaaattgtagatgtagaaattcatacagtgacattaccaarcggtgaaacrtcaacaagagaattagtttatcataatggtgcagttgctgtttgtgcaktgacacctaaaaaagaagtcgtattagtgaaacagtatcgtaaaccagtagaaaaaccattgytagaaattccagctggtaaattagaagatgatgaaratagagtcgaagcggcwaarcgtgaattagaagaagaaacaggatatattgccaaagagttaacacatgttgtagatatgtatggttcaccaggtttttgygatgaacaattatcaatwtattttackgataatktagaagaaggyacagttcacttagatgaagatgaatttgtcgaagtcattaaagttccgattgagaatgttaaatcgatgctaatgaataaagaaatagaagatgcgaagactatcattgcattgcaacacctattattaaattataatcattctaaataa

SEQ ID NO: 1735 - DNA, 966 bp, Staphylococcus aureus
atgaaaaaaattatgattactggtgcattaggacaaattggtacagaattagttgttaagtgcagagaaatttatgggacagataatgttcttgctacagatattagggaacctgaagcagactcacctgtacaaaatggaccatttgaaatyttagacgtaacagatcgtgaccgyatgtttgagttagttagggactttgaagcggatagtctaatgcatatggcagcattattatcagcaactgcwgagaaaaatccaattctwgcttgggatttaaatatgggtggattaatgaatgcattagaagctgcaagaacttataatttgcactttttcacaccaagttcaattggtgcatttggagactcaactcctaaagttaatacgccacaagtaacgattcagcaacctacgacaatgtatggtgtaaataaagtagctggmgaattrttgtgtcaataytatttcamacgwtttggtgtagatacaagaagtgttagattcccwggtttaatctcgcatgttaaagarccrggtggyggyacwacrgactaygcwgttgaaatwtacttcaargcwgtaagagarggwcattatacaagcttcatagataaaggsacrtatatggatatgatgtatatggatgatgcrattgawgcaattattaaacttatggaagcagacgaygckaaattagaaacwagraayggttataatttragygcaatgagytttgatccagaratggtwaaagaagcaatwcaagaataytayccmratttyamattagawtaygatgttgaycctattagacaaggtatcgctaatagttggccggattctattgatacaagctgttcacgtggcgaatggggatttgatcctaaatatgatttagygagcatgactaaattaatgttagaagctattgaacaaaaagatactgttaaaaataataactaa

SEQ ID NO: 1736 - DNA, 249 bp, Staphylococcus aureus
atgaactgtcaatcggagagtgtggtaagactttgtgtacgatatgcggaacaactatcagtatttgaagaatttacagtgctggatattttargcgatatttctgtagaccaaatttcagacrgtacattatattatacttgtgaaaaattcaaactacttgtgttgcaaggaaatgtgytgggtgtacaartaataactaataatgatgaatyaacatgcgaagtgaaatatagaaagatgttttaa

SEQ ID NO: 1737 - DNA, 1077 bp, Staphylococcus aureus
atgtcacaagcagttaaarttgaaykacgmgaaacattaaaasaaaaaccaratacatctcaaytaggwtttggtaartattttacwgattatatgttgagttatgattatgatgcrgataaaggatggcatgatttgaagatwgtaccttatggtccwattgaaatttcrccwgcwgcacaaggtgttcaytatggwcaatcrgtrttcgaaggwttaaaagcatataaaaragatggrgargttgcacttttccgtccwgawgaaaaytttaagcgtcttaataactcgttagcacgmttagaaatgcctcaagtmraygaagswgaattgytagarggrctwaarcaattagttgatwtwgaragagawtggrttcckgaaggkgaaggtcaatcattatatattcgtccwtttgtttttgcracagaaggggyacttggcgttggtgcatcacatcagtataaattattaattattttatctccttcaggtgcatattatggtggtgaractttaaaaccaactaaaatctatgtagaagatgaatatgtrcgtgctgttcgtggcggtgtaggctttgcraaagttgcaggtaactatgcggcaagtttattagcacaaacwaatgcaaataaattaggttatgaccaagtattatggcttgatggtgttgaacagaaatatatcgaagaagttggtagcatgaayattttcttcgttgaaaatggmaaagtaattacaccagagttgaatggcagtattytacctggtattacacgtaaatctattatcgaattagctaaaaacttaggatatgaagtcgaagagcgccgcgtttcaatcgatgaattattcgaatcatatgataaaggtgagttaacagaagtatttggtagtggtactgcagcagttatttcacctgtrggtacattgagataygaagatcgtgaaatcgttattaataataatgagactggtgaaattactcaaaaattatacgacgtctatactggtattcaaaatggtactttagaagataaaaatggttggagagtcgttgtaccaaaatattaa

SEQ ID NO: 1738 - DNA, 756 bp, Staphylococcus aureus
atgaaaggacaacattttatagtgactggtggtacgagtggtttaggtttatcgattgtccgaaagttactagaaaataaagtgcatgtaacgttgttggtgcgtgatgttgataaagcaactagaatctttgamcargaattggggaaaactataaatgttattccttgtgacttaaatgatttgaagtcgatacaggcactgcaatttgaagacaatacatyattcgatggattcatttatagtgcaggtttaggttatttcaaatctatttcagaccatagtttttcagaaatgatygaaacgtatcagcttaatttaattagttttaatgttttatatactgtgttgagaccatatttaacatctaacgcacatattgtaggtatttcaagtcaagctgcattttcyacacaagcaaatgctgcacattatggggcatcgaaagcagggttttatgcattaatgaatgctttaagactagagtcaccaaacttacatatcatgacagttaatgttggcccgattgatacaccttttcatcaaaaagccgacccatcaatgaagtatgctaaaargatggggraaattatgcttgatgctaatcagcttgcagaagatatcatttatggcattaaaacaaaacaattggaaattaatcggcctaaatggatgcatcatgcgttgaaaatgtatcaaattgcgcctagattttttgaacgatgtttccctaaattatttaaaaataaagcataa

SEQ ID NO: 1739 - DNA, 141 bp, Staphylococcus aureus
ttgatagttttaaaatctaatgacaaagtaataaacaatgcttgccaaataryaawaawttataaaaataacccgtcaaacacagtgcttgcgatgatgcatacatgtgttggcgggtttgtttttattggtcttctatat

SEQ ID NO: 1740 - DNA, 684 bp, Staphylococcus aureus
atggaatggatattatttgataaagatggyacgttaattgaatttgatagaagttgggaaaaaataggggtacgatttgtacaatcattgcttgagactttyccagtacataataaagaagctgctttaagacaactcggtgtcattaaagaatctattgatccaaaatcagtgatgggttcaggatctttacaacaaattatycaggcatttaatgatgtgacgggacaagatacaaccgactggtccaagtcaacaagtcaaaagytggtagatgaacgtattcctgaaattaattgggtagaaggtgttaaagaagcacttatcgatttgaaagcaaaaggctatcaactwggtattgttacgagtgatactaaaaaaggtgtagaacaatttttagcacataccaatgctayctcgttgttcgatttgatcatttctaccgaagcggatgcctatgagaagccaaatcctaaagtattatcgcctttatttgagcaatataatgtagatcctcagaaagtagctatagtaggagacactgctaatgatatgaaracmgcwagtaatgcaaatttaggtatggcaataggtgtattaacaggtattgcaacaaaagaagaattacatgaagctgatattattttaaatagtgcggcagatattttagaagctttaawttaa

SEQ ID NO: 1741 - DNA, 921 bp, Staphylococcus aureus
atggaagttacattttttggaacgagtgcaggtttgcctacaaaagagagaaatacacaagcaatcgccttaaatttagaaccatattccaattccatatggcttttcgacgttggtgaaggtacacagcaccaaattttacatcatgcaatyaaattaggaaaagtgacacatatatttattactcatatgcatggcgatcatatttttggtttgccaggattactttctagtcgttcttttcagggcggtgaacaraagccgcttacattrgttggaccaaaaggaattaaagcatatgtggaaatgtctatgaatttatcagagtcacatttaaactatccaattacatatattgaaatcgatgatcatctracatatcatcatgatggttttactgtagaggcgcatttacttaatcatggtrttccatcatatggatatagagtaatggcacctgaaactacaggtacaatcaatgttgaagcgttaaaaaacattggtcttgaaccaggtcctaaatatcaagaagtaaaatctcatgatacatttgaacataatggtcaagtttatcaatcaaaagattttagaggtgagtccaaacagggtccarttgtagcaatttttggtgatacaaaaccatgttctaatgaacgtgtgatttctagagatgctgatgtgatggtacatgaagcgacctatatagatggtgaaaagcatttagccaacaattatcatcatagccatattgaagacgtatttgcattgataaaagaagccaatgttaaacgtacgttgattacacatttgagcaatcgctataatacagaagatataaatgaaatttatcaaayattgatacaaaatgaagatacrcckaattttaattttgtraaagattttgatagttttaaartctaa

SEQ ID NO: 1742 - DNA, 471 bp, Staphylococcus aureus
atgacaaatgatatatattttatgacattagcgattgaagaagctaaaaargcagctcaactaggcgaagtacctataggtgctatcatcactaaagatgatgaagttatcgctagagcacataatttaagagaaacactacaacaaccaacggcgcatgctgaacatattgcaattgaacgtgcagccaaagtgttaggtagttggcgtttagaagrttgcacattatatgtaaccttagaaccatgtgtcatgtgcgcaggaacaattgtaatgagtcgcattccaagagtcgtctatggcgcagatgatcctaaaggtggttgtagtggcagtttaatgaatttattgcaacaatctaattttaatcatcgtgcaattgttgataaaggtgtacttaaagaagcatgtagcacattattaacaacattttttaaaaacttaagagccaataagaaatccaccaattag

SEQ ID NO: 1743 - DNA, 1650 bp, Staphylococcus aureus
atgaataagcaatggtggaaagaagcagtagcatatcaagtatatccaagaagttttaatgatagtaatcacgatggtattggggatttacctggaatgattgataaattggactacttaaaagatttmggtatcgatgtcatttggctcagtccaatgtttaaatcacctaatgatgayaatggttatgatattagtgactaycaagarattatggatgaatttggaacgatggaagactttgatygtttattaaaaggtrttcatgatagaggyatgaagcttattttagatttagttgtraatcatacatctgatgaacatccttggtttatagaatcyaaatctagtaaagacaatcccaaacgtgattggtayatttggcaagatccaaagcmagatggctctgaacctaacaactgggaaagtatmtttaatggatctacatgggaatatgatgctaatactgagcaatattatttccatytattcagtaaaaaacaacctgatttgaattggggtaatccrgaagttagagatgctgtatttgaaatgatgaactggtggtttgataaaggcattgatggatttagagtagatgcaattacgcatattaagaagacgtttgaagcgggtgacttacctgtacctgagggtaaaacatatgccccagcatttgatgtagatatgaatcagccaggtatacaaacttggttacaagagatgaaagatcgctcattaagtaagtatgacattatgactgtyggtgaagcgaatggtgtaagccctgatgatgctgatgactgggtcggggaagaaaatggtaaatttaatatgatattccaatttgaacatttgggactgtggaatagtggtgattctcactttgatgtaaattcgtataartctgtattaaatagatggcaaaaacaacttgaaaataaaggttggaatgcgttgtttattgaaaatcaygaccaaccacgacgtgtatcgacgtggggtgacgatgacaagtattggtatgaatcagcaacaagtcatgcagcwgtttatttcttgcaacaaggtacgccattcatttatcaaggtcaagaaattggtatgacgaattatccatttgaaagtattgaaacrtttaacgatgttgctgtwaaaaatgactatcaaatwgtgaaagctcaaggtggagatgtagacgctttacttgcgaaatataaagatgagaaccgagataattctcgcacaccaatgcaatgggatgatacgttaaatggaggatttacaaatggtgaaccgtggttcccagtgaatcygaattataaaactatcaatgttgcacaacaattagaagatgagsattcagtattacaattttataaagatttaattcaattaagaaagtctaatgatgtatacgtatatggtcaatttgatttagtagatgctgaaaattcacaagtttttgcgtacacgagaacattaaatgaaaagcaagttcttattgtaggtaatcttactaaccacgaagcagaattaactgtaccatttgatwtaagycatggagaagtraagctatttaattatgatgccaaagttaatttaaaacagttacktccatatgaagcatgtgttatcgaactaaattaa

SEQ ID NO: 1744 - DNA, 870 bp, Staphylococcus aureus
atgataaaactaatagccactgatatggatggcacgctacttaatgcagcacatgaaatttctcaacctaatattgatgcgattaaatacgctcaagaacaagggataacggttgttatcgcgacaggtcgagcattttatgaagcacaagcaccagttgctgacacagatttaacagtaccatatatttgtttgaatggtgctgaagtacgtgatgaaactttcaatgtaatgagcacttcacaccttaataaatcgytagtacacaaaattacaaatgttttaaaagatgcaggtatttattatcaagtatacacgagtcgtgcgatttatactgaagatccacaaagagatttagacatttacatagatattgctgagcgtgcaggtcaacaygcaaacgttgagcgtattaaaaatggtattcaaagacgcatagataatggtacgttgaaagttgttgataattatgatgctattgaaaacatacctggtgaattaattatgaaaatattagcatttgatggaaatttagaaaaaattgacaaagctagtaaaattttagctgaatctccgaatttagctatatcatcatcttcgagaggaaatatagaaataacgcattcagatgcacaaaaaggyattgcgctagaaacaattgccgaaagattagggattgaaatgaaagawgtcatgkcaataggtgacaatttaaatgacktatcaatgttagagaaagttggctatccagttgcgatggaaaatggtgcwgaagaagttaaaaaaatagcgaaatatgtcacagatacgaatgaaaatagtggtgttggaaaagctattatgaaattattacgtgaacaacaagtttaa

SEQ ID NO: 1745 - DNA, 1020 bp, Staphylococcus aureus
atggttacgattaaagatgttgcactaaaagccggtgtttctccttcgacagtttcaagagttataaaaggaaatmaacgtatwagcgaagcgacaatttcaaaagtgaagaaagttatggaagaattgaattattttcctaataccgctgctagaactttaattacwaaccaaacatataaaattggtttagtgttaaaagggtctgaggagcctattcgactgaatccattctacatcaatgtattgctaggaatttctgaaacgtgtaaccagcatggctatggtacacaaacgacagtctcaaataatatgaatgatttaatggatgaagtttataaaatgattaaacaacgaatggttgatgcgtttatactgctytattcaaaagaaaatgatccrattaaacaaatgttaattgatgaaagyatgccatttattgtgattggtaagcctacatcggatatagatcatcaatttacacayatagataatgataatatattagcttctgaaaatttgacacgacatgttattgaacaaggtgtagatgaattaatatttattacagaaaaaggmrattttgaagtttcraaagayagrattcaaggatttgaaacrrtwgcwtcwcaawwtaawmtkrattatcaaattattgagactagtaatgaaagaraagttattttwaattacatgcaaaatctrcatacgcgyttgaaggacccaaatattaaacaggcaatcatttcgttagatgctatgttacatttagcgattttaagtgtsctatatgaacttaatattgaaattccraaagatgtaatgacagcaacrttcaatgattcttatttaaccgaaattgcgtcaccaccwcaaaccwgtattgacatcaagcctcgaatgttaggtcaacaggctggtkcagcaattttaaatatattraaaaayaaagcacaggatgttattgaactcgtcattatagatacagaattaaaaataagaaaatcaacacagcgatag

SEQ ID NO: 1746 - DNA, 744 bp, Staphylococcus aureus
gtgattaaattgaactttaatgatttggaaatttttataactgtatgtgaagaagcatctatcaataaagctgcaattaaacttagatatgcacaatctaatatatctcaaagaattagcaagcttgaaaatgaattaggtgtagttttgctttttagaaatcaaaaaggtgctaaggcaactaaagcaggcgaagaattcttagcgtatagcaaaaaagtattaagagatacagagactataaaaaataaaatgaaaaataatactatgtctattttatgctcagaactgttatttaattatttatctgagagcgaagaaattatgatgtcgaataactcaattaattttatttctagtggaaatattagaaaagctataraaaaaaataattatgataaggttatttcattcataaaaattaacgactcaaattatagacttagtaatgttgatactatgaaagtaacgctttacagtaatggaagtaattatgataaagaggctttactaataaataaagatgagttttgtcctttaaggaaaataactttagataataagcttgattcacaacgggtaatggaaattgattcattggcagcaataataaacttagttaaacaaggaaaaggaaaggctttattacctatgacttttgagaataaaagagatatagtacaggacatttctaagatatttgaagttaactactatacttataatcatattatgcatcattaa

SEQ ID NO: 1747 - DNA, 495 bp, Staphylococcus aureus
ttgacraaacgacaaatgggtatattcatttatgctggaattatcggtggcttgttatctggaattgtaaaattaggttgggaggtcatgtttccacctcgcacaccagaacgtaatgcaacgaacccacctcaagagttattgcaacaattaggatttagtagtgagtttacgcatcaaacatatacattttcaaatatgsaattgccttgggtaagctttattgtccactttagtttttctatcgtcattgcaattatttactgcatattagttaaaaaatacgcttacttagcaatkggacaaggtgctgtttttggtattgctatttgggtattattccaccttatcattatgccaatcatgcatactgtacctgctgtgtgggatcaaccatwccaagagcatctgtcagaattctttggccatatcgtctggatgatgacaattgaattagtgcgacaacattttgtctatcgctataaattaaattaa

SEQ ID NO: 1748 - DNA, 567 bp, Staphylococcus aureus
atgaaaggattaattattattggcagtgcacaagtgaattcacatacaagtgcactagcaagatacttaactgagcattttaaaacacatgatattgaagcggaaatattcgatttagcagaaaaaccgttaaatcaattagatttttcaggaacaacaccgtctattgatgaaatcaaacaaaatatgaaagatttaaaagagaaagcaatggcggcggactttttaatattaggaacgccaaactatcatggttcatattctggaatattgaaaaatgcattagatcatctaaatatggattattttaaaatgaaacctgtaggcttaataggaaatagtggtggwattgttagttcagagccattgtcacatttaagagtaatcgtcagaagtttactaggcattgcwgtaccaactcaaatagcaacacatgattctgattttgctaaaaatgaagatggttcatattacttaaatgatagtgaattccaattacgagcaagattatttgtcgatcaaattgtatcttttgtgaataatagyccatatgaacatttaaaataa

SEQ ID NO: 1749 - DNA, 372 bp, Staphylococcus aureus
atggaaaagttaaatcaagttatgttatatgttgatgatgtygamaaagcgaaagcattttggacagaaaytttagaatttgttgttgtaagtgaaacaccgttagctgaggactatgttgcagttgaagtatcacctacsaaagatgctgaaacgtcattgacgattatggcaaaagaatttattgaaaagyatagyccrgargtgaacctaggaacaccatctttaatgtttaaagagaaaaactttgatgcattatactcaaaattaaatgatttaggtttaactgggcatgatatagtagaaaygratggtcaacgtgtatttaatttycaagatggmcaaggtaaytattttgcagttagtgactaa

SEQ ID NO: 1750 - DNA, 1407 bp, Staphylococcus aureus
atgacacaacaaattggagttattggtttagccgttatgggtaaaaacctagcttggaatattgaatcacrcggatatagtgtatctgtatttaaccgctcaagtgaaaaaactgatttaatggttgaagaatcaaaagggaaaaatattcatccaacgtaytcattggaagaatttgttaattctttagaaaaaccacgtaaaattttattaatggttcaagcaggtaaagctacggaygcaacrattgatagtttgttacctttattagatgatggagatattttaattgatggtggtaatacaaactatcaagatactatcagacgtaataaagcattagcacaaagtgcaatcaactttattggtatgggcgtttctggtggtgaaattggagcgttaactggtccgtcattaatgccgggtggacaagaagaagcttataacaaagttgcagatattcttgatgcaattgctgcwaaggcaaaagacggtgcttcatgtgttacttatattggaccwaatggtgctggacactatgtgaaaatggtacayaatggtatygaatatgctgacatgcaattaattgcagaaagttatgctatgatgaaagaattattaggyatgtctcatgaagacattgctcaaacgttcaaagactggaatgctggtgaattagaaagttatttaattgaaatcactggtgatattttcatgaaattagatgaaaataaagaagcattagttgaaaaaattcttgatactgcaggtcaaaaaggtacaggaaaatggacttcaattaaygcattagaattaggtattccattaacaatcatwactgaatctgtatttgcacgttttatctcttcaatcaaagaagagcgcgtaaatgcttctaaagaattaaatggtccaaaagcatcatttgatggtgacaagaaagactttttagaaaaaattcgtaaagcattatatatgagtaaaatttgttcytatgcacaaggtttcgcgcaaatgcgtaaagcaagtgaagataatgaatggaatttaaaacttggtgatttagctatgatttggagagaaggttgcattatmcgtgcacaattcttacaaaagatcaaagatgcttacgataataatccwggattacaaaacttattgctagatccttactttaaaaacatcgttactgaatatcaagatgcgttacgtgatgttgtcgcaactggtgttcaaaatggtgtaccaacacctggtttctcatcaagtattaattactatgatagttaccgtgcwgctgatttacctgcaaacttaattcaagcacaacgtgactacttcggtgctcayacgtacgaaagaaaagataaagaaggcgtattccatacacaatggattgaagaataa

SEQ ID NO: 1751 - DNA, 1134 bp, Staphylococcus aureus
atgattaatgagcaaagattacttaatacgtttttwgaacttgtacaaatcgattctgagacagggaatgaatcaacaatccaacctattttaaaagaaaaattcatakcattagggttagatgttaaagaagatgaagcggctaaacatcctaaattaggtgccaataatctagtgtgtacaatgaawagtactatcgaagaaggcgaagtacctaaattatatytracgagccatatggatactgttgtacccgcaattaatgtaaagccaattgtaaaagatgacggctacatatactctgayggtacgactatwctaggtgcagatgataaagcaggattakcagckatgcttgaagttttgcaagtgataaaggaacaacaaatcccacatggacaaattcaatttgtgattactgttggrgaagaatcaggtttaattggtgctaaagaattaaattcagagttgttggacgcggactttggttatgctattgatgcaagtgctgatgtcggyactacggttgtaggtgcaccgacgcaaatgttaatttcagctaaaattwttggcaaaacrgctcatgcaagtacgccaaaagagggtgttagtgctattaatattgcggckaaagcaattagtcgaatgaaattaggacaagttgatgaaatmactactgccaatattggtaagtttcatggcggttcagctacgaatattgttgcagatgaagtcattttagaagcagaggcacgttctcacgatccagaaagaataaaaacacaagtcaaacatatgactgatgtgtttgaaactactgcatcagaattaggtgggaaagcagwagttacagtggagcaaagttatccaggatttaaaattaatgataatgaarcggtwgttaaaattgcacaagaaagtgctcgtaatttaggattatctgcaaatacaattatttctggtggyggttcagacggcagtattattaatacatttggtattccttcagtcattttaggagtgggttatgaaaaaatccatacaacaaatgagagaatgccgattaaatcattgaacttgcttgcaagtcaagtgttagaaataatcaaaatagttgcgcgacawtcgaaatga

SEQ ID NO: 1752 - DNA, 195 bp, Staphylococcus aureus
atgatgctaaataatcttgatttagcgaaaagaattaaaaaggcagcacttaataataaaattacgatacaaacttcgaaaattctaatcggactaacgtctttaaaattaatgttgaaaggtactgagaatatagtgacaaatgttaataaaattaatgcaccaaaaatgataactaaattattacgtgaataa

SEQ ID NO: 1753 - DNA, 981 bp, Staphylococcus aureus
atgttaaagttaaatccttacaagattggatttagaacaataaaaacagcagtgggtatgactttaggtgtaattattagtaagctgttaggtttagataattatgcttcaagygccatattagtcgtattatgtattaaacatacaaaagtacattcgctacaagcgattatttcaagattagtatcatgttttttagtattgtttttaggttcagcaatatttagtttattaggycagagtccaattgtactcggtattatcgtattgttatttataccattaactgtcgtattaaaagtacaagaaggtgtcattacgagttgcgttatattacttcatgtttttaatgcaaaatcaattgatgcacatttaattgttaatgaaacattattactgttaattggactragcattgcatttacaatgaatttaatgatgccaagtttagacaaacaactagacgaatacaaatgtaaaattgagcaacaaattgctgatatttttagtaaatatagttatatttgtgaaaartatgaagataccattgcgattgaatttgaagygttacttttaaatattaaaaaggcgaagtctatcgcgttccgagatgttaaaaatcattttgttagaaacgaaaattcatactatcattattttgatatgcgagaagagcaagtggaattgttaatgagaatgaaaccgctcatcgaaagtatctgtcataaagatccrcttttaaatgatgttkcgtcactgctgaaagaaattggtctaaatgtgaatagtaatgactatacagcaatgcgtttacacaatttgtatgagacgcgtttgaaattggatgaactkccattgccaacaacacacaaagcgcttaactcgagagcaagtattattcaaatattaaatgaattagaagaatatttacaaatcaaatcgcaatttggttcattgaaaatgcatagtgaagtagcttaa

SEQ ID NO: 1754 - DNA, 1473 bp, Staphylococcus aureus
atgaattacattttaggaacaattttagaaagtaaaattacaggtgtagaaaaagcrcaaataaatagaytgaagttgttcaaacaacacggcatatcttcaaaatgtgtatatgttaaatggaatccttattcatacacatatgcgaagcaacatcagattgaaaatgatstrtttacaatgtatgactattttcaaaaagcaatcaattataaaaagacaaagcaagttaactggatacagtattgggaaaagtcatgtaggtacacrttgaaatttgtggaaaattcaaatgatgtcagaatatatgatgaagagcaatttrtaatgtatgctcattttttagataaacagtatcatcawttaaaytatgtgaattattttgatcataaaagaagaaaagtaaaacgygaattgtatgatggaagaggctttttaagttgttctcgaattttaggtgaaggacaacggattgtactcgaaaattactatacacctaatggggaaatcgtcatccaaaaatatttygacgatataaaaggraaaaacacgctcacaaaggttatcttaaatgaagaycagcakcaacaattttttgatacagaagatgaattagttcaatattttctccatcaattatgtaaaaataatgatcaaatcatattagaycgtcctcatgaattaggaaatgttatwgcgggattaaatcaaagtattccagttrttgttgtrctccayagtacacatttakccgryrccggtaatgrtataaaaartttttataaaacagtrtttaataatttaacacgttataaagcgattgttgtatcaacagaamagcaatgccaagatatttcacaatatattgaaaataaaataccagttatcaatattccggttggctacgtggcaaayttaaagtatcaatttgacatcaatcaaaaggakaaaaatcatatyatatcaattgctcgcctcgttgaaaayaaacaaattamacatcaarttgaagtratcaagcaattagtaacmaaacatcccaawattcaattgaatatttatggacatggaaatggtttgtcagaatatcgacaacttgtagaagrttatcatttatcggaacatgtwaaatttcatggttttaagacgcatattaatgaagagattgctaaagcagaactgatgttatcgacaagtaaaatggaaggttttggcttagcaattttagagtcgctttcagtaggtacaccagtgatcagttatgatrtagattatggkccatcagaactgattcaagatggatttaatggctatttagtacctmmaggtgacatcaatcaaatggttgaaaaggtygaycaattaytaaataatasycaaawrwtgcaacarttttcrattaatagcatagaatctgcacaacagtacaatgcaactactatcagtacaaagtggcaaaawattttaaactaa

SEQ ID NO: 1755 - DNA, 438 bp, Staphylococcus aureus
atggacatgaatttcgatttatacatgaacggtgttgtagaacaagcaaggaatgaaattgaatctgcgggatatgagcaattaactactgcagaagatgttgacaaagttcttaaacaagatggtacaacactagttatgatcaattctgtatgtggttgtgcaggtggtatcgcaagaccagcagcatcacatgctttacattatgacgtattacctgatcgtctagtgacagtatttgctggacaagataaagaagcgacacaaagagcgcgtgaatacttcgaaggttatgcgccttcaagtccgtcatttgcattagtaaaagatggaaakattacagaaatgattgaaagacatcaaatcgaaggtcatgatgtgatgaacgtaattaatcaattacaaacattattcaataaatattgtgaagaaagataa

SEQ ID NO: 1756 - DNA, 759 bp, Staphylococcus aureus
atgaaagtattaaacttaggwtcraaaaaacaagcatcattctatgttgcatgtgagttatataaagagatggcatttaatcagcactgtaaactwggtttagcaactggyggyacaatgacagatttgtatgarcaacttgttaagttrttaaataaaaatcagttaaacgtagacaatgtatccacgtttaatttagacgaatatgtaggtttaaccgcatcacatccgcaaagttatcactattatatggatgacatgcttttcaaacaatayccttattttaatagaaagaacattcatattccraatggagatgcckatgatatgaatgcggaagcgtcaamatataatgacgttttagaacaacaaggtcaacgtgatattcaaattttaggtattggwgaaaatggtcatattggatttaatgaacctggtacgccgtttgayagcgttactcatatcgttgatttgactgaaagtactattaaggctaatagtcgatattttraaaacgaagatgatgttccaaagcaagccatttcgatgggacttgctaatattcttcaagcyaaacgtatcattttactcgcatttggtgaaaagaaacgtgctgctattacacatttattaaatcaggaaatttctgttgatgttccagccacattacttcacaaacacccgaatgttgagatatatttagacgacgaagcttgcccgaaaaaygttgcgaaaattcatgtcgatgaaatggattga

SEQ ID NO: 1757 - DNA, 633 bp, Staphylococcus aureus
gtggaattacaattagcaattgatttattaaacaaagaagacgcggctgagttagcaaataaagtaaaagattatgtagatatcgtagaaatcggtacgccaatcatttacaacgaaggtttaccagcagttaaacatatggcagacaacattagtaatgtaaaagtattagcagacatgaaaattatggatgcagctgattatgaagttagccaagcaattaaatttggcgcggatgtaattacaatactaggtgttgcagaagatgcatcaattaaagcagctattgaagaagctcataaaaataataaacaattactagttgatatgattgctgttcaagatttagaaaaacgtgcaaaagaactagatgaaatgggtgckgattatattgcagtacacactggttatgatttacaagcagaagggcaatcaccattagaaagtttaagaaccgttaaatctgttattaaaaattctaaagttgcagtagcaggtggaattaaaccagatacaattaaagawattgtcgctgaaagtcctgatcttgttattgttggtggcggaatcgcaaatgcagatgatccagtagaagctgcraaacaatgtcgcgctgcaatcgaaggtaagtaa

SEQ ID NO: 1758 - DNA, 1275 bp, Staphylococcus aureus
atggaaataacaatgcctaagttaggtgagagtgttcatgaaggyaccattgaacaatggttagtttctgttggtgatcatattgatgaatatgaaccattatgtgaagttattacagataaagtgacrgctgaagtcccttccacgatatcaggaacaattacagaaattttagttgaagcggggcagacrgtagctattgatacaattatctgtaaaattgaaactgctgatgaaaagacaaatgaaacaactgaagagatacaagcaaaagtggatgagcatactcagaaatctactaaaaaagctagtkcaacagtggaacagacatytactkctaaacaaaatcaaccwcgwaataatggtcgcttttcacctgttgtatttaaactcgcttcagagcatgacattgatttatcacaagttgtaggtagtggatttgaaggtcgtgtaactaaraaggatwtaatgtcagttattgaaaatggtggtaccacagctcaatctgacaaacaagttcaaacamaatcaacwtcagtagatasatcaagtaaccaatcatctgaagacratagtgaaaayagcacaataccagtaaatggtgtgcgtaaagcaattgcrcaaaayatggttaatagtgtaacrgagattccacatgcatggatgatgattgargtwgatgctacaaaycttgtgaawacgagaaaycattataaaaacarctttaaaaataaagaaggatataatytaacgttctttgctttctttgtaaaagctgtagcagatgctttaaaagcatatccwttattaaatagtagctggcaaggaaatgaaattgtcttacataaagacattaatatttcaattgctgttgctgatgaaaataaattatacgtacctgtgattaagcatgcagacgaaaagtcaatcaaaggtatagctagagaaattaatactttagcaacraaagcgcgtaataagcaattgacarctgaagatatgcarggyggwacatttacrgtwaataatactggtacatttggttcagtatcatcaatgggkattataaatcayccwcaagcagcgatwttacaagtagaatcaatcgttaaaaagccagtagtaattaatgatatgattgcaattcgwaryatggtwaatttatgtatttcaatwgatcatcgyattttagatggtttacaaacwggtaaatttatgaatcatattaaacagcgtatcgaacagtatactttagaaaatacaaatatatattag

SEQ ID NO: 1759 - DNA, 504 bp, Staphylococcus aureus
atgactttgtcacatgttgaagcggatgagttttcaacktttgcrtccaaaatactacatgctgaacatatatttgtagctggyaaaggacgttcaggattcgtggcgaatagttttgcaatgcgcttaaatcagctcggcaaacaggcacatgttgttggagaatcaacgacacctgcgattaagtcgaatgatgtatttgtaattatctctggttcaggttccacggaacatttaagattattagcagayaaagcaaaatcagtaggtgctgacatcgtattaattactacaaataaagattctgcaataggcaatctagctgggacgaacatcgttttgcctgcaggtacaaaatatgatgaacawggytckgcacaaccrttaggaagtttgtttgaacaagcatctcaaytatttttagatagygttgtaatgggattgatgactgaaatgaatgttwcrgaacaaacgatgcaacaaaatcatgctaatttagaataa

SEQ ID NO: 1760 - DNA, 984 bp, Staphylococcus aureus
atggctaaattatcttatttagaggcgatwcgccaggcacaagacttagcwttacaacaaaataaagatgtrtttattcttggtgaagatgttggtaraaaaggtggcgtatttggtactactcaaggactrcaacaamaatatggtgaagayagagttatcgatacgccattagctgagtcaaatattgttggaactgccattggtgcagctatggtaggtaaaagaccaattgcagaaattcaatttgcagattttattttacctgcracaaatcaaattattagtgaagctgcgaaaatgcgttatcgttcaaataatgattggcaatgcccattaacgattcgtgcaccatttggtggcggtgttcacggaggactatatcattcacaaagtattgaaagtatatttgcttcatcrccaggtttaacaattgttatwccttcmacaccgtatgatgctaaaggkctwttattatcwtcwatygaatcaaatgatccwgtwttrtactttgarcataaaaargcttatmgwttcttaaaggaagaagtgccagaagaatattacactgtacctttaggaaaagcagatgtkaaacgtgaaggtgaagatttaacagtattttgttatggattaatggtcaattattgtttacaagcmgckgatattttagcwgcagacggtatcaaygttgaagtygtwgatttacgaactgtttatccattagataaagaaacaattattgatcgtgctaaamatacaggtaaagttttacttgtwactgaagataatttagaaggtagyattatgtcagaagtgtcagcgattattgcagagcattgcttgttcgatttagatgcaccaatcatgcgtttagctgctccagatgtaccatctatgccattttcwcctgtattagaaaatgaaattatgatgaatccagaaaaaatcttaaataaaatgcgtgaattagcagaattctag

SEQ ID NO: 1761 - DNA, 657 bp, Staphylococcus aureus
gtgttaatattgaagtttgamaattatatttttgattttgatggtacgttggcagacacgaaaaaatgtggtgaagtagcaacacaaagtgcatttaaagcatgtggyttaacrgaaccatcakctmaagamatawcgcattatatgggaatacctattgaagaatcatttttaaaattagcagaccgaccattagatgaagcarcattagcaaagttaatcgatacatttagacatacatatcaatctattgaaaaggactatatttatgaatttgcgggtataactgaagccattacaagtttgtataaccaagggaaaaaacttttcgtggtgtctagtaagaagagtgatgtattagaaagaaatttatcggctatwggrttaaatcayttratyacygaagctgttggatccgatcaagtaagtgcatataaaccaaatcctgaaggcatacacacaattgtgcaacgctacaatttaaatagccaacaaacggtktatattggtgattcaacrtttgatgttgagatggcrcaacrtgctggtrtrcmatctgcagcwgtmacwtggggwgcacatgatgcaaggtcattacttcattcaaatccrgattttatwatyaatgatccatcagaaattaatacmgtattataa

SEQ ID NO: 1762 - DNA, 993 bp, Staphylococcus aureus
atgattgattataaatcattaggccttagcgaagaagacctaaaagtaatatataaatggatggatttaggtagaaaaatagatgaaagactgtggttattgaaccgtgcaggtaaaattccatttgttgtaagtggtcaaggacaagaagcaactcagattgggatggcatacgcattagaagaaggtgatattacwgcgccttattatagagatctagctttcgttacttatatgggtatmtcagcgtatgatacgtttttatcagcgtttggaaagaaagacgatgttaactctggtggaaaacaaatgccatcacactttagtagtagagctaagaatattttgtcwcaaagttcaccggtagcaactcaaataccccatgctgttggtgctgctttagctytaaaaatggatggtaagaagaaaattgcaacagcaactgttggtgaaggtagytcaaaccarggtgacttccatgaaggtttaaacttcgcgggtgtacacaaacttccttttgtatgtgtcattataaataataaatatgcaatttcagtacctgattcattacaatacgcagctgaaaaattatcggatagagcacttggttacggtwtacatggtgaacaagtagatggtaatgatccattagcaatgtataaagcgatgaaagaagcaagagatcgagctatttctggtcaaggttcaactttgattgaagcagtaacaagtcgtatgacagctcattcatcagatgatgacgaccaatatcgtacgaaagaagagcgtgaarcgcttaaaaaagcwgactgcaatgaaaagttcaaaaaagagttgctttcagctggcattatcgatgatgcttggttggcagaaatagaagcggagcataaagacatcatcaataaagcgacaaaggctgctgaagacgcgccatatccaagtgtcgaagaagcctatgcatttgtgtacgaagaagggagtcttaactaa

SEQ ID NO: 1763 - DNA, 1401 bp, Staphylococcus aureus
atggattttaataaagagaatattaacatggtggatgcaaagaaagctaaaaaracygttgttgcaaccggtatcggtaatgcaatggaatggttcgattttggtgtctatgcatatacaactgcgtacattggagcgaacttcttctctccagtagagartgcagacattcgacaaatgttgactttcgcagcattagccattgcgtttttattaagaccaattggtggtgtbgtatttggtattattggtgacaaatatggacgtaaagttgtattaacatcwacaattattttaatggcattttcaacattaaccattggattattrccaagytatgatcaaattggactttgggcaccaatactattattrcttgcamgagtactacaaggrttttcaacaggtggagagtatgcgggggcaatgacatatgtwgcsgartcatctccagataagcgtcgtaactcattaggtagtggaytagaaatwgggacattatcaggttayatagctgcktcaattatgattgchktaytmacwttcttyttaacwgatgaacaaatggcatcatttggttggagaatcccattcttactyggtttattcctaggattattcggcttatatttacgtcgtaagctkgaagaatcaccagttttcgaaaatgatgttgcaacacaaccagaamgagayaacattaactttttacaaatcatcagattttattacawagatatatttgtrtgttttgtagctgttgtattcttcaatgttacraactatatggtaacygcatayttaccaacytayttagaacaagttattaaaytagatgcaacgacaacwagtgtattaattacttgtgtcatggcaataatgattccattagcattaatgtttggtaagttagcggataaaataggtgaaaagaaagtatttctaatyggtactggygggytaacattattyagtatcatcgcatttatgttattacattcacaatcatttgttgtratagtmatcggtatatttrkattaggattyttcttatcaacwtacgaagcgacaatgccagggtckttaccaacratgttttacagtcatataagatatcgaactttatcrgtaacmtttaatatctctgtttcratatttggtggtacgacgccattagttgcaacatggttagtyrcgaaaactggwgatccattagcacctgcgtattatttaacagcaatcagtgttattggstttttagtkatyacattcttacatttragyacagcaggaaaatctctmaaaggttcrtatccaaatgtagataacgagcaagatagagcttattatgyagaacayccaaaagaagcattatggtgggtkaaagaacgtaarrattag

SEQ ID NO: 1764 - DNA, 1422 bp, Staphylococcus aureus
atgtcagagaaacaatatgatttagtcgttctcggtggaggtactgcaggatatgttgctgcgatacgtgcgtctcaattaggtaaraaagtggcaatagtagaacgacaactattaggaggtacttgtctccataaaggttgtattcctactaaatcgctgcttaaatctgctgaagtatttcaaacagtaaaacaggcagcaatgtttggcgttgatgtcaaagatgctaatgttaattttgaaaatatgttggcacgaaaagaagacattattaatcaaatgtatcaaggtgtaaagcatttaatgcaacacaatcacattgacatttataatggcacgggacgtattctaggtacatctatattttcacctcaaagtggcacaatwtctgtcgaatatgaagatggtgaatcagacttattaccmaaccaatttgtattaattgcaactggttcttcgcctgcagagttgccattcttatcatttgatcatgataaaattttatctagcgatgatatattatcattaaagacgttaccatcaagtrttggtattattggtggtggtgttatcggaatggaatttgcatcattgatgatagatttaggtgttgacgtaacagttatagaagcwggtgaaagaattttaccaactraaagtaaacaagcttcacaactattaaaaaaatcattgtcagcacgtggtgttaaattctatgagggaataaaactttctgaaaatgatatmaatgttaacgaagatggtgttacrtttgaaatttcytcagacataattaaagtagataaagtgttgctatcgattggtagaaaacctaacacatcagatatwggtttaaacaacactaaaataaaactttcwacatcaggacatattttaacgaacgaatttcaacaaactgaagataaacatatttatgcagctggtgattgtatwggaaaattacaattggcacatgttggatcaaaagaaggtgttgtggctgtygatcatatgtttgargggaacccaatcccagtaaactataacatgatgcctaagtgtatttattcacaacctgaaattgcttctatcggtttaaacattgarcaagcaaaggcagagggaatgaaagttaaaagttttaaagtaccatttaaagcaattggtaaagcagtgattgatagccatgacrcaaacgaagggtatagcgaaatggtgattgatcaatcaactgaagaaattgtgggtattaatatgattggtccacatgtaacagaattgattaatgaggcatcactgttrcagttcatgaatggctcggcattagaattaggactaacaacacacgcacatccttccatctctgaagtgttgatggaattaggattgaaagcagaaagtagagctattcacgtataa

SEQ ID NO: 1765 - DNA, 603 bp, Staphylococcus aureus
atgttaattagtctygtaatcccagtttttgctttgttagttattggtggtattatttggrtgattatagaaggtatagtacatatttcaaaaaagaataaagcaatygataactttttwaacmaagttaataaagtaagtgagacatataaattcgctactrcttttttatttctaatcttggctacggckggtatttctcaattttatctatattatatagtatcagmgttwcttttttkgctkgtyatayttacctttggyattgcaggtatcatttttttaatgccatatggmttatgtttyctaccrytttataarcaaaaaaagaaaaaacagacatttaaaaaatacatggyttacactacgattggtttgtcaatttrtctaggcttatctctagttttggttcacactacgaaaatttatatggacgaaggtggcgtaagatactattacggtagttttgtaatgaaacaagcgggcggttatgcttatttagctttagcrgtactttcaacgttgttaattgttgcgaaaaaagctacaaataaaaataaaraaatcgaaaccgtcgacaatacaaatataayggaaagataa

SEQ ID NO: 1766 - DNA, 771 bp, Staphylococcus aureus
atgaaatttattgtcattaaaattggtggcagtacactwagtgacatgcatccatcaattattaacaacattaagcatttacgatcaaacaacatctaccccattatcgttcayggcggtggcccatttattaatgaagcattatcaaaccagcaaatcgagccacactttgttaatggcctaagagtgactgataaagcaaccatgacyattactaaacacacgctcattgcagacgttaacactgcattagtagctcaatttaaccagcascaatgttctgcaataggcttatgtggtttggatgcwcarytrtttgaaattamaysttttgatcaacaatatggatatgtcggkgttccraccrctttaaatawrgaykcwttrymktatttatgtactaaatttgtacctatcatcaattcgattggtttcaataaccatgatggagaattttacaayatwaatgcwgacacrctygcctattttattgcakcatcattaraagcrccyatttatgtaytaagtaatattgcwggygtrctmatcaaygatgttgttatacctcaaytrccmttagycgatattmatcartatattgarcatggtgatatttatggaggtatgattcccaaagtgctwgatgcyaaaaatgckattraaaatggctgtcctaaagttatcattgcatcaggaaacaagccaaatatyatygaakctatttacaataatgattttgttggsacaacratmctwaawtcatmagtatga

SEQ ID NO: 1767 - DNA, 1377 bp, Staphylococcus aureus
atgracgtaattttagaacagttgraaacacatactcaaaataarcctaatgacatagcattacatatmgatgatgaaacaattacatatagtcaactaaatgcccgcatcactagcgcagttgaatctttgcagaaatattcacttaaccctgtygttgctattaatatgaaatcaccggtkcaaagtattatttgttatttagctttgcatcgtttacataaagtgcctatgatgatggaaggtaaatggcaaagtactatacatcgtcaattgattgaaaaatatggtattaaagatgtaattggagatacakgtctcatgcagaatatagactcacckatgtttattgattcaacgcaattacagcactaccccaatttattacatattggttttacttcagggacaactggactgccaaaagcatattatcgtgatgaagattcatggttggcttcttttgaagttaatsaaatgttgatgttaaaaaatgaaaatgcaatagcagccccyggaccactatcgcactcgttaacattatatgcgttattgtttgctttaagttccggtcgtacttttataggacagaccacttttcatcctgaaargttacttaatcaatgtcrtaaaatatcatcatacaaagttgctatgtttcttgttccaacgatgattaaatcattattgttagtttayaacaatgaacatacaatccaatcattttttagcagtggrgataagctgyattcttctatttttaaaaagataaaaaatcaagcaaatgacataaatttgattgaattttttggtacatcggaaaccagttttatcagctataacttgaatcagcaagcaccagttgaatcwgtaggtgtgctatttccaaatgtggaattgaaaacaacgaatcacgatcacaatggtataggaactatttgtrtaaaaagtaatatgatgtttagtggctatgtaagygaacaatgtataaataatgatgaatggtttgttactaatgataatggctatgtaaaagagcagtatttatatttaacgggacgwcaacakgatatgttaattattggtggtcaaaatatatatccagcacatgttgaacgccttttaacgcaatcktcgagcattgatgaagcaattatcatcggtattccaaatgagcgttttggtcaaataggygtattgctttattctggtgatgtgacacttacacataaaaatgtaaaacaatttttaaawaagaaagtgaaacgctatgaaattccatcgatgattcatcatgtagaaaagatgtattacactgcaagtggtaaaattgctagagaaaaaatgatgtcgatgtatttgagaggtgaattataa

SEQ ID NO: 1768 - DNA, 1539 bp, Staphylococcus aureus
atgagagcttcatctgattttgtaagacatggtgaaaaaaaggctgtcatcgaaggtatatttgatattgacgagagtaaagatgctatacatatattgaaaaatatggatattgatgtagatgaagattttttattagttaaacgggaaattttyagctctggtaaaagtctttgtaaaattaataatcaaacagttactttacaagatttacgaaaagttatgcaagaattattagatattcatggccaacatgaaacgcartctttgttgaaacaaaaataccatttaacattattggataattacgcagaatcacgttatcaagatttgttggataaatatcaycaaacttttcaaaattataaagccaaaaagcaagrgttagaagatttagaatcagcagaccaagcattgctrcagcgtttagatttaatgaaattccaattagaagaattgtctgaagcacatctaaaagaaggcgaaatagagcaacttgaaatagatattaaacgcattcaaaactctgaaaaattaagcttagckcttaataacgcayatatgacattaacggatgaaaatgctatcactgatcgtttrtatgaactaagcaaccatttgttaacaataaacgatatagttccaaayaaatatgacaaattaaaagaagatattgatcaattttaytacattttagaagatgcaaaacatgagttatatgatgaaatggctaatacagaattcgacgaacaagtgttaaaygagtatgaatctcgtatgaatttgctgaataatttaaaacgyaaatatggaaaagatatttcagaattaatcgcatatcaagaaaarcttaataatgaaatcaataaaattgaaaactatgaacaaagtacatcgcagttacgagaagaaataaatgcattgtataatcaagttatagaggttggacaagcgttatcwaagcagcgtcgtatagtygctagggagttaagagaccacattgtatcggaaattcaaaacttacaaatgaaagaygcaaatcttgagatttcatttaaaaaattagaagaaccgaatattgatggaatcgaatttgtagaatttttaatcagtccwaataaaggggaaccattaaaaagyttaaataaaattgcrtcaggtggagaactttctagaattatgttagcgttaaaaagtatttttgttaaatcgagaggtcaaactgcaattttattcgatgaggttgactcaggtgtatctggacaagcygcacaaaaaatggcagagaaaatgcgagatatagcwgaatatatacaagttatttgtathtctcacttrccacaagttgcatcgatgagcgaccatcatttattaatttcgaartcatcaaaagatgatcgtacaacaacacaagttcaagagttaattrgcgatgataaagtagatgaaattgcacgaatgatttcaggtgcaagtgttactgatttaactcgwgaaaatgcaagagaaatgatacaacacaatcaaagacrtagataa

SEQ ID NO: 1769 - DNA, 1140 bp, Staphylococcus aureus
atgaatcaagcagtcatagttgcagctaaacgaactgcatttgggaaatatggtggcactttaaaacatttagagccagaacaattgctyaaacctttattccaacattttaaagagaagtatcyagaggtaatatctaaaatagatgatgtagttttaggtaatgttgttgggaatggtggcaatattgcaagaaaagcattgcttgaagcggggctyaaagattcaatacctggcgtcacaatcgatcggcaatgtgggtctggacttgaaagtgttcaatatgcatgtcgcatgatycaagccggagctggcaaggtatatattgcaggyggtgttgaaagtacaagtcgagcaccttggaaaatcaaacgaccgcattctgtgtacgaaacmgcattacctgagttttatgagcgtgcatcatttgcacctgaaatgagcgacccatcaatgattcaaggtgctgaaaatgtrgccaagatgtatgrtgtttcaagagrattacaagatgaatttgcttaycgaagtcatcaaytgacagcggaaaatgtaaagaatggaaatatttctcaggaaatattacctataaccgttaaaggagaamtattcaayactgatgaaagtctaaaatcacatattccgaaagataactttggccgatttaagcccgtratcaaaggtgggaccgttaccgctgcgaatagttgtatgaaaaatgatggtgcagttytattgcttattatggaaaaagatatggcatacgaattaggtttcgakcatggtttattatttaaagatggtgttacggtaggtgttgattctaatttwcctggcattggtccagtaccagccatttccaacttactaaaaagaaatcaattaacgatagaaaatattgaagtcattgaaattaacgaagcgttcagtgcacaggtrgttgcctgccaacaagctttaaatatttcraatacgcaattaaatatatggggtggtgcattagcatcaggtcatccatacggtgcaagcggtgcccaattagtgackcgattattttatatgtttgacaaagagastatgattgcatctatggggatwgggggaggtctaggaaatgcagcattatttactcgattctaa

SEQ ID NO: 1770 - DNA, 453 bp, Staphylococcus aureus
gtgcccaaaaaatcggttaggcatataaaaattagagaaattatttcaaatgaacagatagagacacaagatgaattagttaaacgattaaacgattatgatttaaatgtcactcaagcaactgtttctcgtgatattaaagaactacaacttattaaagtacctataccttcaggtcaatatgtttatagtttaccaaatgatagaaaattccatcctttagaaaaattgggacgttatttaatggattcctttgttaatatagatggtactgataatttacttgttctaaaaacrttacctggtaatgcacaatctattggagctatattagaycaaatcaattgggaagaagtactaggcacaatttgtggtgatgatacttgtttaattatttgtcgaagcaaagaggcaagtgatgaaatcaagtcaagaattttcaatttgttataa

SEQ ID NO: 1771 - DNA, 366 bp, Staphylococcus aureus
atgcagcattatttactcgattctaaccagcgattaaatgtgtcattttctaaggatagtgtggctgcatattatcaktgttttaaccaaccttatagwaaagaagtaccaccattaatgtgtgcgtcattatggycaaaatttgatttatttaaaaaatatgcaaatagcgaactgattttaacaaaatcagyaattaatcaaactcaaaagataraagtagacacaatatatgtaggrcatttagaagatattgaatgccgacagaytcgcaatatcacacgttatacaatggctttaacattaactaaaaatgatcaacatgtcataacggttacacaaacttttattaaggcgatgaagtag

SEQ ID NO: 1772 - DNA, 882 bp, Staphylococcus aureus
atgacgaatctaccgatgaataaattaatagatgaagtcaataatgaattatcggttgcgataaataaatcagtaatgratactcagctagaagaaagyatgttgtattcattaaatgctggaggtaaacgcatccgaccagttctgttattactcactttagattcactaaataccgagtatgagttaggtrtgaagagcgcaattgcactagaaatgattcatacatattcacttattcatgatgacctaccagcgatggataatgatgattatcgacgaggraaattaacraatcataaagtatatggtgagtggackgcgatattagcaggtgatgctttattaactaaagcatttgaacttatttcaagtgatgatagattaactgatgaagtaaaaataaaagttctacaacggctgtcaatagcaagtggtcatgttggaatggtcggcggtcaaatgttagatatgcaaagcgaaggccaaccaattgatcttgaaactttggaaatgatacacaaaacaaaaacaggagcaytattaacttttgcggttatgagtgcagcagatatcgctaatgtcgatgatrcaactaaagaacatttagaaagttatagttatcatttaggtatgatgttycagattaaagatgatttattagactgctatggtgatgaagcraagttaggtaaaaaagtgggcagcgatcttgaaaataataaaagtacgtacgtgagtttattaggraaagatggcgcagaagataaattgacttatcatagagacgcagcagtggatgaactaaygcaaattgatgaacaattcaatacaaaacacttattagaaatcgttgatttattttatagcagggatcactaa

SEQ ID NO: 1773 - DNA, 270 bp, Staphylococcus aureus
atgragtttaatgagatatggataaatgaatatttggcgctcgtaaatgatgataatccaatacataatgagattgtgccaggacaattagtgagtcaaatgatgytgatggctatgtcattagagrcraaccagtgtcaaattaactaygttaaacctattttaataaatgaaaatatcraattcattgaasaacacgarcamgaaattatagcaattaatgacgatggagagattaaaataaaratttctttgagcacaaaaaaataa

SEQ ID NO: 1774 - DNA, 231 bp, Staphylococcus aureus
atgactaaagaaacgcaaagttttgaagaaatgatgcaagaattagagcraattgttcaaaaattagataatgaaacagtatctttagaggaatcattagatttataycaacgtggtatgaaactatcagcagcttgtgacacaactttaaaaaatgccgaaaaaaaggtgaatgacttaataaaagaagaagctgaggatgtaaaaaatgacgaatctaccgatgaataa

SEQ ID NO: 1775 - DNA, 657 bp, Staphylococcus aureus
atggaatggtcgcaaatttttcatgacataacaacgaaacatgactttaaagctatgcatgattttttagaaaaagaatattcgactgcaatcgtataccctgatagggaaaatatwtatcaagcgtttgatttaacaccgtttgaaaatatcaaagttgttatattaggacaagacccgtatcatggtccraaccaagcacatggattagcattttcagtgcaacctaacgcaaaattccctccatctttacgtaatatgtataaagaattagcagatgatattggatgygttagacaaacaccrcatttacaagattgggcaagagaaggygtcttgttattgaatacagttttaaccgtaagacagggtgaagcaaattctcatcgtgatattggttgggaaacatttactgatgaaattattaaagcagtgtctgattataaagaacatgttgtctttattttgtgggggaaacctgcacagcaaaaaataaagcttatcgatacatctaaacattgtattataaaatcagtgcatcctagtccactgtctgcatatagaggattctttggatcaaaaccgtattccaaagcgaatrcctatttagagtcagtaggaaaatyaccaattaattggtgtgaaagtgaggcgtag

SEQ ID NO: 1776 - DNA, 1338 bp, Staphylococcus aureus
atgtcagattatttaagtgtttcagctttaacgaaatatattaaatataaatttgatcaagayccacatctccaatctgtattgattaaaggtgagctttcaaatttcaaaaagcattcaagtggtcatttatactttaatgtgaaagataaagaragcgttataagtgccatgatgttcaaaggtagtgcttctaaattaaacttcgaacctaaagaaggagatgaagtcttattagaagcacgtgtttctgtttttgaacgtcgtggaaactatcaaatttatgtaaataaaatgcaattagatggtatagggaacttatatcaaaaattagaagcattaaagaaaaaattaactgaagaaggttgttttgataaagcgaataagaaatcaatacctaagtttcctaaaaaaattgcagttttaacagcgagtacaggtgccgcaattcgagatatccattcaacgataaatagtcgttttccattagctgaacaaatacaaattagtactttggttcaaggtgaaaaagcaaargacgacattattgaaaaaattgaatatgcagatagtttaggtgtagataccattattgtaggtcgaggyggtggatccatagaagatttatggaatttyaacgaagaagctgtcgtccgtgcaatatataattgtaagacaccgattatatcagcagtwggtcatgaaacagactttacattaagtgattttgctgcagacatcagagctgcgactccaactcaagctgctgttattgcaacaccagaccaatatgaattgctgcaacaaatacagcaatatcagtttacattgactcgtttcatcaagaaacatttagaacaacaacgtaaacatgttgaacatttgtcatcgtattacaagtttaaacaaccaactttattgtatgatcaacagatacaacgtcgwgatgatttagaaaagagactgaaacaacaaattcaggcaacttttgaacaacagagacatcgattaatgctgttgcarcaacgytataatttaaaagcrttactaagtagtgttaatcaagaacaacaaaataatcttcaattgacaaaccaacttgttaaattattgaattctaagatattaagttataaaaatgatttgaaaaataaagtagaaaacttaaacaatttaagtccaactaatacaatgttgcgtggatatgcaattgttaataaaaaagacgaagtcattacgagtactaaagatttaacagaaaatgatcaattgacgttaacaatgaaagatggcttagtagatgcaaaagttacgaaagtaaggtgtaataatgactaa

SEQ ID NO: 1777 - DNA, 381 bp, Staphylococcus aureus
atgktgaatagagaaactttaatagcacgaattgagcaagaattagtacaagcagagcaggcrcagcatgaccaygactttgaaaaacatatgtatgccatacatatattaacatctttatatgctycaacatcaaatacaccacatattggtgaacaacaaatgaatcrtcgtattgctaaccataatcaaatgccacawtcacaaatwacgcagycaacwcatcaagtgacagytgctgaaattgaagcgatgggtggtaaagtaaatacgcattcagcacatcatcataataagtcatattcacaaccttcaaaccaacaacaaagattagcgacagatgatgacattggcaatggtgaatccatatttgatttttaa

SEQ ID NO: 1778 - DNA, 390 bp, Staphylococcus aureus
atgagtcgtaaagaatcccgagtgcaagcttttcaaactttatttcaattagaaatgaaggacagtgatttaacgataaatgaagcgataagytttattaaagacgataatccagatttagacttygaatttattcattggctagtttctggcgttaaagatcacgaacctgtattagacgagacaattagtcctwatttaaaagattggactattgcacgtttattaaaaacggatcgtattattttaagaatggcaacatatgaaatattacacagtgatacacctgctaaagtcgtaatgaatgaagcagttgaattaacaaaacaattyagtgatgatgatcattataaatttataaatggtgtattgagtaatataaaaaaataa

SEQ ID NO: 1779 - DNA, 369 bp, Staphylococcus aureus
atgaaattatttattattttaggtgcattaaacgcgatgatggctgtcggwacaggtgcatttggtgcrcatggtttacaaggaaaaataagtgatcactatttatcagtatgggaaaaagcaacgacgtatcaaatgtaccatggcttagcattattaattataggtgtaattagtggtacaacttcaatcaatgttaactgggctggctggttaatatttgctggtattattttctttagtggatcattatatattttagtattaactcaaattaaagttttaggtgcgattacgccaattggtggcgtattgttcatcattggmtggataatgttaatcattgcgacattcaaatttgctggttaa

SEQ ID NO: 1780 - DNA, 363 bp, Staphylococcus aureus
atggtcaaagtaactgattattcaaattcaaaattaggtaaagtagaaatagcgccagaagtgctatctgttattgcaagtatagctacttcggaagtcgaaggcatcactggccattttgctgaattaaaagaaacaaatttagaaaaagttagtcgtaaaaatttaagccgtgatttaaaaatcgagagtaaagaagatggcatatatatagatgtatattgtgcattaaaacatggtgttaatatttcaaaaactgcaaacaaaattcaaacgtcaatttttaattcaatttctaatatgacagcgatagaacctaagcaaattaatattcacattacacaaatcgttattgaaaagtaa

SEQ ID NO: 1781 - DNA, 1485 bp, Staphylococcus aureus
atggaaaaaaagaataagcaaatagatagaggcgatttaaaacaaaacctatctgaaaagtttgtatgggcgattgcatatggttcatgtatcggatggggcgcattcatcwtaccaggagactggattaagcagtcaggtccgattgcagcatcaattggtatwgttattggtrcattattaatgatattaattgcggttagttatggcgcattagtagagagatttccagtatcagggggcgcgtttgcctttagtttcttaagtttcggcagatatgtgagtttcttctcatcatggtttttaacttttggttatgtctgtgtygttgctttaaatgcgacmgcattcagtttactagttaaattcttattgccagatgtcttaaataatgggaaactatacaccattgcgggctgggacgtttatattacggaaatcattattgcgaccgtattactacttgtattcatgctagtaacgattcgtggcgcaagtgtatctggatcattacaatattatttctgtgtggcgatggtaatcgtcgtattattgatgttctttggttcattctttggtaataattttgcacttgaaaatttacaaccgttagctgaacctagcaaaggatggttagtgtctattgtggttattgtatccgtggcaccatgggcatatgttggatttgataatattccacaaacagcagaagagtttaactttgcaccaaacaagacatttaagcttatcgtgtacagtttattagcagcatcattaacttatgttgtcatgattttatacactggttggttatyaacaagtcatcaaagtttaaatggrcarttgtggttaacaggtgctgttacacaaacagcatttggttatattggattaggtgtattagcaattgcaattatgatgggtatatttactggtttaaatggattcttgatgagttcaagtcgcttgttattttctatgggacgttcaggtatwatgccaacaatgtttagtaaattacatagtaaatacaaaacaccatatgtcgcaatcatattcytagtargwgtgtckttaattgcaccttggctaggaagaackgcattgacttggatygtagatatgtcatctacwggtgtatccattgcctactttattacatgtttgtctgcwgcgaaattattcagttataacaaacaaagtaatacgtatgcaccggtttacaaaacgtttgctattatyggctcatttgtatcattcattttcttagcgttgttattagtgccaggttctcctgcagcactgactgcaccrtcttatattgcattrcttggatggttaatcatcggtttaatattctttgtgattcgatatcctaaattgaaaaatatggataatgatgaattaagtcgcttgattttaaatagaagtgaaaatgaagttgatgatatgattgaagaacctgaaaaagaaaaaactaaataa

SEQ ID NO: 1782 - DNA, 1356 bp, Staphylococcus aureus
atgaaaaaggttttaattgcaaaycgcggtgaaatcgcagttaggattattcgcgcttgtcgtgatttaggcatccaaactgttgcaatctattctgaaggggataaagatgcgctacatactcaaattgctgatgaagcatattgcgtaggtcccactttgtctaaagattcatatttaaatattccgaacatcttatctattgcaacttctacaggttgtgatggcgttcatccgggttatggctttttagctgaaaatgctgaytttgcagaattatgcgaagcatgccaattgaagttcattggaccaagttatcaatctatccaaaaaatgggtatcaaagatgttgctaaggcagaaatgatcaaagccaatgttccagttgttcctggtagtgayggtttaatgaaagacgtctcagaagctaagaaaatcgcyaaraaaattggytatccggtcatcattaaagctactgctggyggtggcggaaaaggtatycgtgttgctcgtgatgaaaaagaacttgaaactggcttccgaatgacagaacaagaagcwcaaactgcatttggtaatggtggactttatatggagaaattcatcgaaaacttccgccatattgaaatccaaattgttggggacagctatggtaatgtaattcatttaggagaacgtgattgtacaattcaaagacgtatgcagaaattagtggaagaagcaccttccccaattttagatgatgaaacacgtcgtgaaatgggaaatgcmgcagtkcgtgcagcgaaagctgtaaattatgaaaatgcgggaacaattgagtttatatatgatttaaatgataataaattttattttatggaaatgaatacacgyattcaagtagaacatcctgtaactgaaatggtaacaggaattgatttagttaaattacaattacargttgctatgggtgacgtgttaccgtataaacaagaagatattaaattaacaggacacgcaattgaatttagaattaatgctgaaaatccttacaagaactttatgccatcaccaggtaaaattgagcaatatcttgcaccaggtggatatggtgttcgaatagagtcagcatgttatactaattatacgataccgccatattatgattcgatggtagcgaaattaatcatacatgaaccgacacgagatgaagcgattatggctggcattcgtgcaytaagtgaatttgtggttcttggtattgatacaactattccattccatattaaattattgaataacgatatatttagaagcggtaaatttaatacaaactttttagagcaaaatagcattatgaatgatgaaggttaa

SEQ ID NO: 1783 - DNA, 987 bp, Staphylococcus aureus
atggctgatttattaaatgtattaaaagacaaactttctggtaaaaacgttaaaatcgtattacctgaaggagaggacgarcgtgttctaacagctgcaacacaattacaagcaacmgattatgttacaccaatcgtgttaggtgatgagactaaggttcaatctttagcgcaaaaacttratmttgatatttctaatattgaattaattratcctgcracaagtgaattkaaagctgaaytagtycaatcatttgttgaacgacgtaaaggtaaarcgactgaagaacaagcrcaagaattattaaacaatgtgaactacttcggtacaatgcttgtttatgctggtaaagcagatggtytagttagtggtgcagcacattcaacaggmgacactgtgcgtccagcwttacaaatcatcaaaacgaaaccaggtgtatcaagaacatcaggyatcttctttatgattaaagrtgatgwacartacatctttggtgattgtgcaatcaatccagaacttgattcacaaggwcttgcagaaattgcagtagaaagtgcaaaatcagcattaagctttggcatggatccaaaagttgcaatgttaagcttttcaacaaaagggtctgctaaatcagacgaygtgacaaaagttcaagaagctgtcaaattagcacaacaaaaagctgaagaagaaaaattagaagcaatcattgatggcgaattccaatttgatgctgcgattgtaccaggtgttgctgagaaaaaagcgccaggtgctaaattacaaggtgatgcaaatgtctttgtattcccaagtttagaagctggtaatattggttacaaaattgcacaacgtttaggtggatatgatgcagttggtccagtattacaaggtttaaattctccagtaaatgacttrtcacgtggctgctcaattgaagatgtatacaatctttcawtyatyacagcagcgcaagccttacaataa

SEQ ID NO: 1784 - DNA, 465 bp, Staphylococcus aureus
atgaactttaaagaaatcaaagaattaattgaaattctggataaatcaactttaacggaaatcaatattgaagatactaaaggcaaagtgacgcttaagaaagaaaaagaaactgagattatcacgccacaaatctcacaaatgccakttgaagctgcggcaatgcctatgcctcaagyacaatcaactgatarcaataaaactgaagctccaaagccaacttcagataatcacaaaacaattaatgcacctatggtaggtacattttacaaatcgccatctccagacgaagaagcmtatgtgcaagttggggacactgtttcaaatgaaacaacagtgtgtattttagargcaatgaaactatttaatgaaattcaagcagaaatttcaggtgaaattgttgaratcttagtagaagacggacaaatggtagagtatggccaaccgttatttaaggtgaaataa

SEQ ID NO: 1785 - DNA, 837 bp, Staphylococcus aureus
atggatttagcgagtaaatattttaatggcgtcaactggcgatatatcgaycattcttctggattagarcctatgcaatctttcgcattcgatgatacattttgygaaagtgtgggyaaagatatatcagataatgttgtgcgtacttggattcatcaacatactgttattcttggtattcatgattcaagattgccgtttttaaaagatggcattgattatttaacgaatgagattggttataatgccattgttagaaaytctggyggcytaggtgtcgttctagatcaaggtgtattaaatatatcgctgatgttcaaaggacaaacagaaacaacgattgatgaagcgtttactgtgatgtayctcttaattagcaaaatgttcgaaratgagaatkttgatattgatacgatggaaattgaacattcttattgcccaggaaaatttgacttaagtatcgatggtaagaaatttgcaggcatatcgcaacgaagagttagaggcggtattgctgtacaaatttatctttgtgttgaaggctctggttcagaacgtgcattgatgatgcaaacattttatgaacatgctttaaaaggtgaagtgactaaatttaaataycctgaaattgaaccatcttgtatggcctcaytagagacattrcttaacaaaacgattactgttcaagatgtaatgtttttactattatatgcaatcaaagatcttggcggtgtattaaatatgacgccmattactcaagaagaatggcaaagatacgatacgtattttgataaaatgattgaaagaaacaagaaaatgatagaycaaatgcaatag

SEQ ID NO: 1786 - DNA, 1021 bp, Staphylococcus aureus
atgaaaaaaagaaaaaaacgtaaagaattagaytataaaacacgtctagctatcgcaaagtatttaaatgatggtttaaacatcattcagatttctaagattttaggtcgtgatgatgcggttctttatagagaagtaaataarcgttctgttgatggtgtttataatcctttattagctgaggaagatgctataaaatcgcgtagtatttcagatgaacaagttgctaaacgtagacgtttgaatgatgaaacaaaagcatatattgaagaaaaactttcattaaaatggtctcctagacagatagcaagtcaaattgaaaaagatacagggcattatataagttatcctactatatatagatatattcgcaatggattggtaaaagttgatgttaagcgtgatatgagacaagcaggcaaraaatataataagtcttctgaaaagcgtggcaaattagacgtagggkctcgtgttataaagtatcggctcaaaaagtattaataaccgtgaagaatttggacattatgaaattgatactgtttggagtgttagaccatcaacatattgcttgttaactattattgaaagaaaaacaagatatttatatgctagtagattaaatacacgtaaatccaatgtagtttgtaatgagattataaatattatgaaaccattattaccmaaaagyataactatggatagaggtaaggagttygctctatttraacaaatagaagatgaattgaattgtagtatttattttagtgatttgggttgtccatatcaacgtggttccattgaaaatgyaaatggacttttaagacagtattatcctaaaggtacggattttgcaaatataacacaaaagtcattagatgaagctgttaaacaaattaatrcacgrcctcgaatgatatttgactataaatcgagtgaggaaatgytaaagtaccatgtaagcacacaaaattgtgaacctatattaaatgactgtgtgaggcacgaacccgtcaattaa

SEQ ID NO: 1787 - DNA, 3153 bp, Staphylococcus aureus
atgagtcaattgctaaatgatacgttatcggcttggttgttaattgaatctttaagtccaggagaagtaaattttacagcggaagatatactctcagctgaamattttaaaaatggtgcaaagcaagcrcaacttcaaagttttgatgaatattttgaaatatggaatkmtgaacgctttattatatcagaagaaaaatcagagaytggsgaamtyatwtttaaattttayagacaytgyttccgstataatgaaattaatttgaaaattcaggatatttttgatgattattcwgakattcataatccaaatgggacacactgttatggttacacatttaayayagataaacacggymaagtgatagttgattctatacatattccgatgattatgagtgcattraaagaaattgaaaagaayaaaaatgcyaatatagaagaaaaatttaatgattctgttgaaaaatttkttcaaaaagtaaaagaaattttagcrgatgaaccaattaatgaatttaaattgaagaagatggacawagcttatgatgagtayttttctgtattaaattcaaagaaagatggattatttgsacattatgtagcaatagaatatgtgaaagatagtgatttaccacagccrgaatttaayagyttcttcataagtgatattgagaaagcaagaaaatctcccaaycaaactttaattgattacattgarggtgtagaagaaagtmagcgcatagaagtrgatgaaaataaagaaatgttygacaaatttttacatccttcacgtttgcctgatggacgmtggccatcacagactgagtttagattgtcwttaatgcaacaacttgctgtaaaccaaattacgagtggtaatgaaagrataagttcagttaatgggccaccaggkacaggtaagactactttattaaaagatatatttgckcatctagtagttgaaagaggtaaagagttagcyaaactaaataatcctaaagatgcatttgtcaaaacaaaaaytcatgaaacrgatgataaataygtmtayttactwaaggaatctattgcyaaatataagatggtagtcgcatctagtaataatggagctgttgaaaatatatctaaagatttaccgaaaattgaagaaattataagaaatcccgaaaaatgtaaattccctaaatatgaacagaattatgcaaatttagcacatgaattaaaagattttgctgaaatagctgaagatttgattggtgaaagtgcctggggcttattttctggagtwtttggtaaaagtactaatattaaccaagtattgagtcatatgttaaaacaagatgcgaatgatattggctttgctaaattactacaaaatgagaataatcgtatgagttataacgagttaatgagtgaatggcaatcacatcaacgtgcatttttagaagagttgaggcatgttgaaatgttaaaagaagaatctattagagcmtatgatgtttataaaaattgtgagtcttwctctaagrttgaacakgwwmtwaatagyraaaaaayrartrttrargaamagktrwatcatttagawawtsaaayrtywygwgacaataaagaaatwgaagatttggatratcgaattaattatawtrywaagcaamtmgaaactttaaatgagttaattaaatccatcaragawagyaacaaaggktttrttaacaarctgaargcgatrtttaattcagaagaagatgaaagmtataaarawcataatrmagagaagcaacaattattarsacaacagwtagagttagagaaatgtaaaaaaawyaaamatgaagaccttgttagcaaactaaaagaaaaagagaaattaattaaacaattaactaaagtacagttgcaattagacgagttaaattcacagttacaagagttagaagcatatcgtattgagtcaaaaattacaattccagaaaaagatttttggagtgacaacaattatgatgagcgccaagttactaatytgtggacgagtgacgaacttcaatacagacgtgccatgctctttttaagagcaatgatattgcataaattattattgattgctaataatacaactatttattatgcgattaatgattttaaarrtagaaggaaattaattgatgcaaatccagataaagtacacaacgcatggaatgtgatgcatttaatatttccagtagttagtacgacgtttgcaagctttaaatctatgtatgggggcataccaaaagatttcatagactacttatttattgatgaagcaggacaagcaatacctcaagcagctgtgggagcattatwtmgwtcraaaaaagttgtagcygtaggtgatccgattcaaatwgaacckgttgtkactttagaaagycatttaattgataayattcgtaaaaattatmatgttccggaatatctagtttctaaagaagcttctgtgcagtctgtygcwgacaacgcyaatcaatatggyttttggaaatctgatgctactgatagtaatcaaaaaacstggataggcatacctttatgggtgcacagacgatgtttaaaaccyatgttcacgatagctaaycaaatygcttataataataaaatggtgytrccwagtaatattacaaamgtaggtaaracmggttggtatgacgttaaaggaaackcagtwcaaaaacaatttgtgaaagagcatggygaaaaagtaktggrattaytagctratgattggwttgaagcrattaaggaaggtaaaaatgarccgagytcatttgtaatatcrccwttttcagcagtacarmaacagrttaaacgtatrttaaagcaacaactaccgactagaattgatattgaacgtacaaaaattaatcaatgggtcgataaatccattggtactgttcatacttttcaaggtaaagaggctcaraaggtgtattttgtaataggtactgataatacycaagatggtgctgtgaactggtcatgcgaaaaaccaaacttgttaaaygttgcagtgacaagrgctaaraaagagttttatgtaattggygacatgcaaagaatacagwygaaaccattttatgagacsatttttaaagaaagaaatgtaaaatra

SEQ ID NO: 1788 - DNA, 1242 bp, Staphylococcus aureus
atgaaacatcaagaaacgacatcacaacaayataacttttcaattattaaacatggcgatatcagtacacctcaaggcttcacggcyggtggtatgcacatcggtttacgcgctaacaaaaaagactttggstggatttactcatcgtctttrgcaagtkcagctgccgtatatactttaaaycartttaaagctgcaccacttattgtcactgaagacactttacaaaagtctaaaggraaattacaagcacttgttgttaattcagctaatgcaaattcttgyacmggtcarcaaggyatmgatgatgcacracaaacwcaaacatgggttgctcaacaacttcaaataccatctgagcatgttgctgttgcttcaactggkgtyattggwgaatatttgccwatggataaaattaaractggkacmgaacatattaakgatrctaattttgcaacgccaggtgcgtttaacgaggcaattttaacaactgatacmtgtacaaarcatatcgctgtatcactaaawatygatggtaaaaccrttacaattggtggyagyrcyaaaggwtcaggtatgattcayccaaatatggctaccatgcttgcttttataacaaccgatgcatcrattgaatcgaatacacttcatcaattattaaaatcttcgactgaccatacatttaatatgattactgttgatggcgatacaagtacaaatgacatggtattagtcatggcaaatcamcaagttgaacaccaaatacttartcaagaccatccacaatgggaaacatttgttgatgcmttcaattttgtctgtacatttttagctaaagctatagccagagatggcgaaggcgcaacaaagttaatcagygtcaatgtktcaggcgctaaatcaatatcagaygcaagaaaaatcggtaaaactatcgtaagttcaaatctagtaaaatcagctatttttggcgaagatgccaattttggtcgaatcattacagctattggctayagcggatgtgaaattgatcctaamtgcacatatgttcaactgaaccaaatacctgtcgtkgataaaggtatggctgtactatttgatgagcaagctatgtcgaayacattaactcatgaamatgtcacaattgacgttcarcttggtttrggtaacgctgcagcgactgcatacggttgtgatttatcctatgattatgtgcgtatyaacgcatcatatcgaacataa

SEQ ID NO: 1789 - DNA, 921 bp, Staphylococcus aureus
atgacaagaaaaggatatggggaatcgacaggtaagattattttaataggagaacatgctgttacatttggagagcctgctattgcagtaccgtttaacgcaggtaaaatcaaagttttaatagaagccttagagagcgggaactattcgtctattaaaagcgatgtttacgatggtatgttatatgatgcgcctgaccatcttaagtctttggtgaaccgttttgtagaattaaataatattacagagccgctagcagtaacgatccaaacgaatttaccaccatcacgtggrttaggatcgagtgcagctgtcgcggttgcttttgttcgtgcragttatgattttttagggaaatcattaacgaaagaagaactcattgaaaaggctaattgggcagagcaaattgcacatggtaaaccaagtggtattgatacgcaaacgattgtatcaggcaaaccagtttggttccaaaaaggtcawgctgaaacrttgaaaacgytaagtttagacggctatatggttgttatwgatactggtgtgaaaggttcaacaagacaagcrgtagaagatgttcataaactttgtgaggaycctcagtacatgtcacatgtaaaacatatcggtaagttagttttacgtgcgagtgatgtgattgaacatcataamtttgaagccytagcggatatttttaatgaatgtcatgcggatttaaaggcgttgacagttagtcatgataaaatagaacaattaatgaaaattggtaaagaaaatggtgcgattgctggaaaacttactggygctggtcgtggtggaagtatgttattgcttgccaaagatttaccaacagcgaaaaatattgtraaagctgtagaaaaagctggtgcagcacatacwtggattgagaatttaggaggttaa

SEQ ID NO: 1790 - DNA, 342 bp, Staphylococcus aureus
atgaggcgatggtttgtattaattttaggattagttatattattatctgcatgtggtcagaaatatgataaagagattgatgcagttttaaattctgaaagaaaaagtatgagtgagtcttcttttaagaagcctgaaaaaagtaatagtgattttaaagtatatgaagatggtaaatttataactatttcttttgtttatgataaagatggtacagtgtggacaagtttatataaaaagaatgagacaacagataaatatgtaaaagttgaagatatgaatgaaaaagaatatcaaagtaatcataaaccagtttatgaagaaaataatatgaaaaaataa

SEQ ID NO: 1791 - DNA, 984 bp, Staphylococcus aureus
ttgattaaaagtggcaaagcacgtgcacatacgaatattgcacttatwaaatattggggtaaaaaagatgaagsactaatcattccaatgaataatagcatatctgttacattagaaaaattttacactgaaacgaaagtcacttttaacgaccagttaacacaggatcaattttggttgaatggtgaaaaggttagtggcaaagaattagagaaaatttcaaaatatatggatattgtcagaaatagagctggcatcgattggtatgcwgaaattgaaagcgacaattttgtaccaacagcagcaggrttggcttcatcrgcaagcgcatatgcagctttagcagcagcttgtaatcaagcrctagacwtgcagctgtcagataaggatttatcgagattggcgcgaatyggttcgggttctgcgtcgcgtagtatttatggtggatttgcagaatgggaaaaagggtatartgatgagacgtcatatgccgttccacttgaatcgaatcattttgaagatgaccttgccatgatatttgttgtgattaatcaacattctaaaaaggtacctagtcgatatggtatgtcrttgacacgaaacacatcaagrttttatcaatattggttagatcatattgatgaagatttagctgaagcaaaagcagcgattcaagacaaagattttaaacgccttggtgaagtaattgaagaaaatggtttrcgtatgcatgccacgaatctrggatcaacaccgccgttcacwtatcttgtgcaagaaagttatgatgtmatggcgctygttcacgaatgccgagaagcgggrtatccgtgttattttacratggatgcgggwcctaatgtgaaaatacttgtagaaaagaaaaacaagcaacagattatagataaattattaacacagtttgataataaccaaattattgatagtgacattattgccacaggaattgaaataattgagtaa

SEQ ID NO: 1792 - DNA, 591 bp, Staphylococcus aureus
atgaagcaaaaaattattatgtttactcttgtaacagtaatattattttgtgctgttttaattggttatcagattcctaaacaacaagttaaaatgaaacaaaatcaaattgaagatttrcaggaagaacaacgtatattaagagataaaaatggagagttaaataaattagtaaagagacaatcaaaaacagttatttctgatgaagaaaarcaaatacgtgaagtttcttcaaattttgttaaacagatgtttgaaatgaaaaaagattcttcttttaaatcaaaagcaccacaaataaagcctttagttacaaaggattattacgatacattatttaaggattctaaagataaatatgatttatatgatgatataacggttaatgatattcatgtttattttgatacttatgaycctaaaaaagatagttataaagtttttgttcagttcgacgaacgtattgaaacagatggagatgataaaattgaacatcgtcaaacatctgcacaattggatttagttcgtacagctgaaggttggcgtattgataatttaaaacgtttyaatttaaaacctctaggacgttag

SEQ ID NO: 1793 - DNA, 1077 bp, Staphylococcus aureus
atgattcaggtcaaagcacccggaaaactttatattgctggagaatatgctgtaacagaaccaggatataaatctgtacttattgcgttagatcgttttgtaactgctactattgaagaagcagaccaatataaaggtaccattcattcaaaagcattacatcataacccagttacatttagtagagatgaagatagtattgtcatttcagatccacatgcagcaaaacaattaaattatgtggtcacagctattgaaatatttgaacartaygcraaaagytgcgatatagcgatgaagcattttcatctgactattgatagtaatttagatgattcaaatggtcataaatatggattaggttcaagtgcagcagtacttgtrtcagttataaaagtattaaatgaattttatgatatgaagttatctaatttatacatttataaactagcagtgattgcaaatatgaagttacaaagtttaagttcatgcggagatattgctgtgagtgtatatagtggatggytagcgtatagtacttttgatcatgaatgggttaagcatcaaattgaagatactacggttgaagaagttttaatcaaaaactggcctggattgcacatcgaaccattrcaagcacctgaaaatatggaagtacttatcggttggactggctcaccggcgtcatcaccacactttgttagcgaagtgaaacgtttgaaatcagatccttcattttacggtgacttcttagaagattcacatcrttgtgttgaaaarcttattcatgcttttaaaacaaataacattaaaggtgtgcaaaagatggtgcgtcagaatcgtacaattattcaacgtatggataaagaagctacagttgatatagaaactgaaaagctaaaatatttgtgtgatattgctgaaaagtatcacggygcatctaaaacatcaggcgctggtggtggagactgtggtattacaattatcaataaagatgtagataaagaaaaaatttatgatgaatggacaaaacatggtattaaaccattaaaatttaatatttatcatgggcaataa

SEQ ID NO: 1794 - DNA, 1047 bp, Staphylococcus aureus
atggtaaataaaaaagatattgctaaaaaagtaataggtaaaacgccaataggtgttaaattgaaattagcgaaagtcatcatcattttgtgtgtggtggctttttttacatttccagtaattgtaatgtttttgttagcgcctgattyaaataaagrtaaagatgatgctggttgtactgttagtggcggtaatgtttcggcaaatggtattgataagtttaaygaaaatgctaaaggtggaaaattagagggtaaaggaaaagaaatacagaaaattgcagaaaaaaataaagtacctgtgaatatttttatggcyattattgcgagtgaatcacaatggggtaaaggagaaaatgcgacaagacaaaataatcctttgtctgttatgggttcaaaatcgattcatgattcaacatatccaactattgaagayggtcttaatgcgggagctaaaaatttgtatgatgtttatatttctaaaggtttagatactcctaaaaaaataggtcccaaatatgcgcctgttggtgcgtcaaatgaccctaataatatgaatgcccgttggataccaacagttgaaaaaattatgaaagatttaggcggttcagaagctaaaacgtcatgtagtaatggtaaaggaaagtctataaagtttaatggtaaattgccacattggtcaaatgatgaccctggaaaaggtaatttatacactgctggtcaatgtacttggtatgcatacggtatgcgtcaaaaaatgggtaaacctgtatcracttattggcatgatgcacataaatggaatgatagrgctaargctgagggttataaagttgataaaaatccggaacctggtgcattatttattgctgaacaaggtgcaggcggtcatgatgggcattatggtcatgtggctgttgttattggtgtaagtgatggtggtaaaacatttagaataacagaaatgaattgggaaggtgcttttaaagttaatgaacgtacattgaaaatgactgayggatatagttttattcatgataaggagtga

SEQ ID NO: 1795 - DNA, 342 bp, Staphylococcus aureus
atgaaaaatacattccttatttgtgatgaatgtcaggcagtcaatataagaacgttacaaaagaagttggaaaaattagatcccgatgctgaaatcgtgataggttgtcaatcttattgtggacctggacgccgaaaaacattcrcttttgttaataaccgcccactggctgcgcttactgaagaagaattaatcgaaaaagtttctcaacaattaaagaaaccacgtgatcctgaagaagaagagcgtttaagaaaacgacatgaagaacgtaaacgtcgtaaagaagaacaagatagaaagcttaaagaaaaattagaaaagcgaaaagcacaacaataa

SEQ ID NO: 1796 - DNA, 1848 bp, Staphylococcus aureus
atgaagcataaaagtgtgtatcttttatgctttttaattttgcctattctgcttttaacatctgtgagtgcttacgctgtttctaatccagttggagagccctcacatgcagttaagccmaaaattgaaaagtatgatttatcacattatcgttcaatatatagtgaaaaaggcgactggaatccgtttggtcaagaagaaatttcacgacaaattaataatgtgtcagattttttcttttctatgactaagattttagcaggtgttacagattatgcgattgaaaatttatttcaactagatgttattaatgattttgcggataaaatcggcgattttgttggcgatatatatcaaaagttattgagtaatttggcaataacattatttattattgtttgytttaacgcatttattatttttagtgtacaaggtaatgcaagagaagcattaaarcgrgcgtttttaattatgtgtttrattggttttggtgttggtatacttgcgaatgcaggtaatattatacgtggtacaaacaatattggtaaggayttraataatataattatgaatagtacatcttctattgatggkaayattgattatattcatgagaattcaggtatgaatcatatacgtaatcaattatttgatatgacgatatatagaacatatttagtaatgaattatggaactgtagacgaaaaagagataaaagcaaaaggtaaagaccgtattgataacattttaaaacwwgattwtkmwaaaaaaksasaarawgagattgatrawattgtwaaaratgaggttgaraaraaarataataaatatatgacgcaaggttatgtatttcaaaagttggctatttcagtkattggctttattattacwstttttatgtcratwgtatttttatcaatwagttttgcgaagttgattttttctacatttgctttatttttattcttatttttagtattcagttggatagtgagttttataccaggatttgaattatctgttttctctgcgtttgcaaaaacgttaggctatattattttaagtgcctgtatgacattcttatttgtgatagttggtttgtgtatcaagcttgcaaatagttttattgawccggatagtcaaaatgcttattttttaaattcaatatttataattgtaatattgtttgtaatgtataaaaaacgggctcaaattatcaattttgtaagtcgtggtaatattagtttttctcctagtgcaattggtgctggtgtgatgaatcgaacacaagaacgttttaataagattcgtcatgaacaagcgcaaaataagaaagctaaacgagaaaatcaaagagatgaacccgccccaccacttcaaaatgataatgatttaagaagaagacagcagkataaaccaatgcctttatttataaataaagawaatcaaaaaaatggtaataagcgaagagaacaacaagagtcaatgaatggtaaygatgtaaaatctgcttctgttgaatcraatgcaaatrattattctaaacaaccacaaaaagcatcacagcaagarcatcaagtacgagaaacaagacagcgaaaagatatacaaaggtcgccacaagtggttaatcagccattaaataatgagaatcattcaataaatcgtaaagaacagaagtcagttcaaactgcttatgatactgatgttcaaaaacgacaaatacaaaatgcgacacagaatcaacaaagtagacaatctggaaatcgtaatcaacctattacacgtaattctcagtcaaaagaycgtctaaaagagcaaaaggatatcaataagcatggtaaataa

SEQ ID NO: 1797 - DNA, 1359 bp, Staphylococcus aureus
atggcaatgaatgaaattgctttatttaaaggcgtacgtatacagccttatcagaagtatattgattttatgtttgcargtgtattagcatttatttttttggtatatcgtatatacattttgtttattgattataaatcagttaataaaaaattggatatatkgacgttgtttgcatattttaaaccgcatttattgtatttattaattggtacagcaattatatttgttatatgtaagcttatcgctcagcttttaattcgttttaaaacaaaagatttagctgaaatgattgaaacacaaggytttcataatcgtacagtaatcaagaaaacaaccgagtatatccctattgattataaacaaactgaatatgactattatccaacgatgttttataaacgtggtaaaaaaacttttgttattcatattaaaaaagacggttcgaggtttcaagataattatttagagttagaaacgattattgaaccaatgtttaattctgaattagtagaaaaaaagcatattggtcgttatttgagatatgaatttatgccacttaaatataaaaagcgtattgttatgaatggcgaacaagaatcaaatacaattttttatgatacaaaaattgctattacgcatcaaattacttgggattttgtgaaagcacctcatggattggttacaggtataaccggaggtggtaaaacatattttttattttatgtgattcgtgagttattccgtagacattcagaagtacgtttattagayccaaaagtttcagatttragctttatgaagcgcgttattggtgatgataaagttgcagatactaaaggtcaaatattaaaacaattgagagaagctaataatgaaatggaagagcgttttagattaatgaatgatagttcggattataaaatcggraatgatttccgtaattttgatatgcgcccctatttcattatttttgatgaggtaacggcttttacttcaactttagataaaaaagaattacaagaaatgaatgattatttaattaatattattatgaaaggtcgtcaagctggtgtatttatgtttttaacagcacaaagaccagatgcagatgtgattaaaggtaatgtgcgtgaycaattagggttacgtgtgtctttaggtaatttgtcaaatgatggttatcgtatgacctttggtcaaactgataaagaatttcaaacgattcatgatagtgayatcggycgaggttatatwwctatacttggacaatataatgaaccaattttatttgatgcacctttaatggaacaatatgattttgtggaagatgtgaaacaaatattaaataaggagtga

SEQ ID NO: 1798 - DNA, 1410 bp, Staphylococcus aureus
atgagtattgacatgtatttagacagatctcgaaaccaagcttcaagtgtggggaatttgagtcaaacaatgaattcaaattatgatgcgttggaaaaagcaattactcaatttatyaatgatgatgygcttaaagggaaagcgtatacgtcagctaagcaattttttagtacggtgttaattccattatcaacaagtatgaaaacattgagtgatttaacgaagcaagcttgcgataattttgtgtcacgttatacgagtgaggttgatagcatatctttaaaagaatcagagcttgaagaagatatcagatcattaagtcaacaaattacgcgatatgaaaatttgaataacaatttgaaaaagcatgcttccgataatcagcaagccatttcatcgaaccaacaaataatacraacattaggtcaacaaaaacatgaattagaagagaagctacgcaaattgcgtgagtttaatcaaaaatcaccagaaatatttaaagaagttgaagaatttcaaaaaattgtccaacaaggacttacccaagcgcaraatttttggaacttttcaacaaatcaatttaatattccttcaggtaaagaacttgattgggccaaagcaagtcatgaaaaatatttgaaagttgctatggggaaaattgaacataaagcagagaaagaaactttaaataaagcagactttgctgttataaaggcatatgccaaagaacatccagaagacgatatcccgaaaagtatattgaaatatataaatgacaataaagacagtattaaaagagatataggattagatattacgtcaacacttttagagcaagrcggtataaatgcaagtaaattcggtgtatttatcaatacagcaggtggagtgaaaggcccagcaggtccaaattcatttgtggaagtcaaacgtacatcaggtaatgtgtttatagaaaatggtagtaaatttgcaaaaggcggaaaatacctaggtaaaggtgttgctggtgtaggatttggtataggtatgtatgatgaccttgcaaatgatgataaaacatttggagaggcgttgtcgcataatggtatgacgcttgcagctggatctgcagggacagcagttggagctggattagcgacttttgttttaggaagtaatccagtaggatgggtgattttagcaggtttggctatgagtacagtatttgcattaggaacagatttaatttatcaaaataatatttttggattaaaagataaagtagactgggtagggcataaaatcgataatagtatagatgttgttaaaaaaactacagaaaaatccatggatagtgttgggaatgctgttagtgaagctaaaaatattattagcaatcatataaatccaatgaaatgggcgtggtga

SEQ ID NO: 1799 - DNA, 2496 bp, Staphylococcus aureus
atgaatttaaaagcaccgtatgcaggtttaagagataatttgttattaacgaaaactggcgaagtttgggcgtattatcgtgttcgttctgagtctatwtcaacagcaaattatgatgcaaaagaagaatcaaaaaagcgtatgcgttattttttagagtcgattaaaggttatcaagattttcattttgaaatgtatgaccaygatttagatttgcgaaataaatttaaagaaattagtaaagattttgatgatgaagcttttaatgtagctgaatattattcaaaagaaactattgacgtattagaacaagaattacaaatgattacgcataattcttttgttatgggtgttaaaatacgtgaattagctgacgatgcagttacacttaaagagattttaaaaagtacattatcagatacggctgagcgtattgtttcgaattttggttttgatgtgaatttagacgataaaattttagataagtataaaacatttgaacgagatttggctgatagttttctaggtattggaggcgarcgtttaactgagaatgarytggcttatattattmgraagccwtttatwtcaaatgcaacacatgacgtacaggaagaatcttcaagamgagctattacagatatttataatgcagtaattgaccctactcgyttgagtgttttagaagttgaaaatgataaygaraaattttayacaacaacagttgttgttgatgattttccgttagatatggaatatacacatttatttgagaaagctcaaaatatgccttttccggttgaatgycatgtaaaagcaaaaatyattaataatgaraaagttaagaaaaaatttgaccgtgcgaaaataaatcataaacaacaagcaaaagaaaagcaagatactggcgayagtgcttcggaagatgttcaagataatttgtttgtattgaatcaaatggaacgagaagtgactggctcaggtgtatttattgagtgggtatttatgtttgtaattaaaagtgatgattatagagaytgtaaacgtaaagcaaagcgtttgatgaaacgattaaaggaaactcaaatatatgcagttaatccattagctgaccagttacaattgttttatcartgtttacatggtaatgatttrtttattaataagtattggttacaaagaacwacggcaacaggtatagcagaraatttatttggtgtgtctcaaagtttgggaacaaaaacrggtttttatatagggcgtattgataaatttatwcgttctgtttcacgtgaggaagctgttgcaagttcaagggatataattttrtttagtttattgttggccgcaaaaggtattaarggggctgtcagtgatagtccgcatgttttaattactggtcaaactggtaaaggtaaatcatttttagcaaaattattatggatttatacatcattttttaaaggtcaaatgttgtactgggatccaaaatctgagtttgcagaatggtttgacagagtaacagaaagtaaggaaatgcaagaaaagtatcccctatttattaatcatttaaaaacatttaaatatgtaacattgaattatgaagattcaaccaattatggttgtctagaccctattgtrtttttagatggtattgaagctaatgagatgttgaaatcagtgtttgatgaaattaaatcttttgaaaattatcatcatattgaaacrgcaatttatcaagctatttctgatacggttgaagaacgtgaaaatggtaaaaaagttggttcattaaatgtaattgaaaaattacagaataatgaagatgagcatgtaaaaaatgcaggmgatttattatttgaaaaaacgcaaaacaatattttaaaacttgtttttagtgatggtacgaatccagctttaaatattcaagaaaaagcaactattttacaggttaaaggtttagatatgcctaaagcagatgatgatacatcaagttattcaacaagtgagaaaaatgggattacattaatgttattaattggtaagtttttagagaaattcggttctcgtagagatgttcaaacgactatatttattgatgagggttgggcttttagtgcttcaagacaaggtaaaaaagttggtaagcgtataaaaagaacgggacgttctgagaataattcacttgtatttattacacaatcggtaaaagataaagcagatgatgatggtggtaactttggttgtcattttgcatttgatgaaaaagatgaacgtgaggatattttaaaatctttaggcttagaatattcaaaagaatctcctgaaaatatggaratgttgaaagatttgaagaaaggtcaatgtatattyagtgatttttatggacgtgttggaaaaatggttgtacattgtccatttgaggaaatgactgaagcatttagaacacaagaagattctgcaagctctaaagctgaagaaaaatttgcgatgtar

SEQ ID NO: 1800 - DNA, 1395 bp, Staphylococcus aureus
atgagtattgacatgtatttagacagatctcgaaaccaagcttcaagtgtggggaatttgagtcaaacaatgaattcaaattatgatgcgttggaaaaagcaattactcaatttatcaatgatgatgcgcttaaagggaaagcgtatacgtcagctaagcaattttttagtacggtgttaattccattatcaacaagtatgaaaacattgagtgatttaacgaagcaagcttgcgataattttgtgtcacgttatacgagtgaggttgatagcatatctttaaaagaatcagagcttgaagaagatatcagatcattaagtcaacaaattacgcgatatgaaaatttaactaacaatttgaaaaagcatgcttccgataatcagcaagccatttcatcgaaccaacaaataatacaaacattaggtcaacaaaaacatgaattagaagagaaactacgtaaattacgtgagtttaatcaaaaatcaccagaaatatttaaagaagttgaagaatttcaaaaaattgtccaacaaggacttacccaagcgcagaatttttggaacttttcaacaaatcaatttaatataccttcaggtaaagaacttgattgggctaaagcaagtcatgaaaaatatttgaaagttgctatggggaaaattgaacataaagcagagaaagaaactttaaataaagcagactttgctgttataaaggcatatgccaaagaacatccagaagacgatatcccgaaaagtataatgaaatatataaatgacaataaagatagtattaaacgagatataggattagatattacgtcaacacttttagagcaaggcggtataaatgcaagtaaattcggtgtatttatcaatacagcaggtggagtgaaaggcccagccggtccaaattcatttgtggaagtcaaacgtacatcaggtaatgtgtttatagaaaatggtagtaaatttgcaaaaggcggaaaatatctagggaaaggtgttgcaggtgtaggatttggtataggtatgtatgatgatcttgcaaatgataataaaacatttggagaggcattgtcgcataatggtatgacgcttgcagctggatctgttgcagcatttggtgtagcggctttagtaagtaatccagtcggttgggctgtggtaggtattttaacagcaggtattattggatctactgtttctgattatctttatcaaaataattattttggcataaaagataaagtggactgggcaggacataaaatagacgagggtattgatgctgtaaacaaaactgcagaaaaagctgtagatagtgttggtaatgccattggtgatgccacaaaaagtattagtaatcatattaatcctatgaaatggagttggtaa

SEQ ID NO: 1801 - DNA, 1401 bp, Staphylococcus aureus
atgccgatgagtattgacatgtatttagacagatctcgaaaccaagcttcaagtgtgggtaatttgagtcaaacaatgaattcaaattatgatgcgttggaaaaagcaattactcaatttatcaatgatgatgcgcttaaaggtaaagcgtatacgtcagctaagcaattttttagtacggtgttaattccattatcaacaagtatgaaaacattgagtgatttaacgaagcaagcttgcgataattttgtgtcacgttatacgagtgaggttgatagcatatctttaaaagaatcagagcttgaagaagatatcagatcattaagtcaacaaattacgcgatatgaaaatttgaataacaatttgaaaaagcatgcttccgataatcagcaagccatttcatcgaaccaacaaataatacgaacattaggtcaacaaaaacatgaattagaagagaagctacgcaaattgcgtgagtttaatcaaaaatcaccagaaatatttaaagaagttgaagaatttcaaaaaattgtacaacaaggacttacccaagcgcaaaatttttggaacttttcaacaaatcaatttaatataccttcaggtaaagaacttgattgggctaaagcaagtcatgaaaaatatttgaaagttgctatggggaaaattgaacaaaaagcagagaaagaaactttaaataaagcagactttgctgttataaaggcatatgctaaagaacatccagaagacgatatcccgaaaagtataatgaaatatataaatgacaataaagatagtattaaacgagatataggattagatattacgtcaacacttttagagcaaggcggtataaatgcaagtaaattcggtgtatttattaatacagcaggtggagtgaaaggcccagccggtccaaattcatttgtggaagtcaaacgtacatcaggtaatgtgtttatagaaaatggtagtaaatttgcaaaaggcggaaaatacctaggcaaaggtgttgcaggtgtaggatttggtataggtatgtatgatgatatggcaaacgatgataaaacagttggagaggcattgtcgcataatgctttaactacaggaataggtattggcgcaggtgcgggtatgactgctactatcgcgttatttgcaagtaatccagtaggatgggctgttataggtggctttgtgtttggttcggtttcgacaatgcttgtagattgggcttatcaaaataataaggctggtataaaagataaagcagactgggtaggacataaactagacgatggtatcgatgttgttaaaaaatctacagaaaaagccgtagatagtgttggtgaagctacaaaaagtatttctaatcatttaaaccctatgaaatggagctggtaa

SEQ ID NO: 1802 - DNA, 624 bp, Staphylococcus aureus
ttgctttttaatrttaaggttattaataaaaatccgagatataaagtcgttcaatataatgatgagtatttgttaattgatttagtaagyacttggcttgtatacttttttccttttattaattggttcattcccaaaaggtatgcaaaacttagtgagaaggaacttgaaaatttaaatgttgataaacaaaataaaaataatattttctggccagttactggtagttcgtttttatttgtagttattttacggaaatatgtacatacgtttgaagttcaattagataataagattttaatatctttatgttttataggatttataggtattgcagcattttacatttacttaaataaaaagcttaaactaaagatatatgatgataatctagataatgaaaatarggttatattagtgcctacttttaaagatggaagttttatagttttcacatatctattattaggaggttgttctatattatttttaatatggctaatgactataaaacctcaaaatctactggtatttattatgtggattattattacaatttttttctttctaataagcatgggctcaattagtaataaaaaggtttatgccaaacttaaaaagcaa

SEQ ID NO: 1803 - DNA, 384 bp, Staphylococcus aureus
ttggataaaaaagcttataatttaaarcgracttttgaacaaccgatagtkatgtatgaatttacagataartttcgtattaataagggttttcgtttagatttttgggctacatttttgattgtrtggtttatattatttttgttattttggtatttattacagcctgtmattatgtckattggtggacttatgtttatttactttacggttgymccttattatataacgaaatatattgttaagttaaarcaagatggwaagaaattatttttcttcttatgggattttgtaatatttgtttttaatgtkcagttaagaaaagttaaattaagttatgatgaagaagtagaatatcatgataaaaaaataacatttaaatag

SEQ ID NO: 1804 - DNA, 639 bp, Staphylococcus aureus
gtggagatattgctttrcgarkytarwrttrtwaacaaaaatcccagatatagaattattaaatataaaaacgactatctgatgattgatttagtaagcacmtggttagttttgttctttccgtttattaattggttaatmccaaaaaaatatgtccaaatcagcagagaagaktttgataatttaaatattgtyaaaccagttaaaaataaagctttatggccagytataggtagcatacttttatttggcactatgtttagagataaaatatatatacctgattctcatttagaaaaaaattgcgttattatcatttgttcggttttattattaagtattctagtgttttatatatatttaaatcagaaagtaaagttatctatctataatratcggagtagcaatggaaaaattatgatttttccatcattcaagaatctttgctttgtactattttcttattttttctgtggtggattatcaatcatgttcttagatgttttgattagtttatctatccaaaatattatagtatttattgcttgggttattatgacaatgctatttttctttataaatatgtcttcaataatagacaaaaagattcatgttatatatttaaggtcatataaatat

SEQ ID NO: 1805 - DNA, 261 bp, Staphylococcus aureus
atgagtggtttatttaattttttwgttttaggtgctgaccgtccatcacttggtggagttggtgactggataagtaatgaagtrggtacgggtattggtttagtagtattggttgttggtattgtaaaatgggctagtggtaaatatgggcatatggttatattatttgttgttggtggctttttattcttagtttctaaaggtcctgaacaggtatttaatgcgattgcaggtgtttggaaaatgatttttggcggttga

SEQ ID NO: 1806 - DNA, 615 bp, Staphylococcus aureus
ttgctttgtgaaaccgaaattatcaataaaaatccgaaatacagagttattaagtatgatgatgagtatttaatggtcgatgtaataagmacttggcttgtatacttttttccatttattaattggttcattccaaaaaggtgcgccaaaattagtagagaagagtatgaaaaactgaacactgttaagccagttaaaaataaaaatttttggcctgttgtaggaggaacaatcctactaggtgctacttccagaaagtacatacacttacttaatattcaattagaaaaaagatcggttatatttatatgcttcgttgtatttctatgtattttaatcttttttgtgcttctgaatcgaaaattaaaattgaaagttttcgataataaaaaagaagaacaaaaaataattttagtaccaacattaaaaaatgctgttcttatattatatggctatttgttgattggaggcatgtcaatattagctttaagcatgttgctgacattagaaaaccagaatttaataacttttatagcttggggtatggggttaatgttgtttttcttgatgaatataacactcattgtcaataaaacagtcaaagttataaaaagg

SEQ ID NO: 1807 - DNA, 1056 bp, Staphylococcus aureus
atgaaaataataagcaagtacattttaacacgattttctaaaaacggaaagcattttgatattcctaaagaacaacgccgagtaattccaaaatttaaaaatcgtcgtaagatgattgtaatttgtttttactcattattagctattttgttaattcttttattagcttcttttattaaagctacaagagcaaataatgayagtaaagaagcagttaataaaacgaatatgatycaaaaaaagtatgaagataatgcgaatacagttcagtatagtcctaaattaaagttatatgctgataartttattgatacgtatatgaatatytckaaagaytcaaaagaattrgaatctagagaaaaagarttrttgaaatattttccatcagattataaaaarcctgawgaaaaaaywtcagatacwgaacgwaaattraatagtaargaattttataatattaaacgtaaagataaacaaacrattatacagtatattgttaattatgatgtgaatattactgaaaaraaagaagttaaagtwaagaagaaaaagaaaartgawaaagataaagatgagtatgaaacaaaaacagaagaaaagcaacgtaaagtaaatcaaaayattytaatwaatatacctattaagagtgaraataataagtatgttgttgttgaatatccttattttackccaatycctgatagtcaattraataaagctaaratggttgaggataayttgaaagayaataaacgkgaagayaatccgaaagcaaaagcwtttattgaagatttctttaataaatatkcttctagtaagtctgatgatatggcytatttaatggataaycctgagggmttagaaggaactagagaagtttctcarataagagaaattagrttatatccaaaaggcgatgattatgttgctaaagttgaaattttgatgaaagataaagattctcctttggagaatttggarcattacacattagatataacraaaaaagatggtaaatattacgttaaaaatatgactaattctattggaggttaa

SEQ ID NO: 1808 - DNA, 627 bp, Staphylococcus aureus
gtgctttgcgaatctagagtcattaatcaaaaccctaaatatagaattattaaatacaataatgaatatttcatggttgatttagtaagtacttggattgcttattttttgcccatgattaattggtttattcccaaaaagtacgcgaaaattagtagagaagaatttgaaagtttaaatattgtcaaacccgctaaaaataatactttctggcctgttgcaggatttgcagtgttattaacaaccttaacaagaaaatatatctatttgcttaacatccatttagaaaaagaaatagttatattaacatgctgtatgatacttctaggtgttttcgcattgtttatatatataaatacaaaattgaagttacatatttttgataaaaataaaagtaataacgaaaagatcatattaatacctacatttaaaaatatttgtttatccttatttgcttatatattatttggtggattgtcaacaatggctctgagtatgttagtaacttcatcccctcaaaatataatagaatttcttgctttaattggcatgactgcatgcttctttctactgaatatgtcatcggttctagataaaaaaattcatgttattttaaaaacaaataag

SEQ ID NO: 1809 - DNA, 1092 bp, Staphylococcus aureus
atgactttaaaaaaccagtgtaccccccttactaataggggggtagagcgtacaaataaaagtgccgtggaggcagttgttgactgggttcaggtcactttccatataacccctatttcagcagtaattgaggacgttatcggtttgcctataacgttgttcaaaaaacgaaatagtggcatttayttttataatcgcggttatgaattttcaaacattaaattgtattattcaagtgatgatgaatcaatgggcattcacttacagttaactggtacaggttgtagagagtttgaacatcatttacarcagttgaataaaacttggcaagatttttttgayaaatgtttatcagttaatgcaaattttacaagaattgatattgcaattgatgattataaaacatatttaaaagtgcctttattaattaaaaaggctgaaaaagctgagtgtgtttcacgttttagakctggaagcgcaataaacggttttaatttgtcagacggaagaagtaaaggcgctactttttatattggttctaaacaaagcaatttatattgtcgtttttatgaaaagaattatgaacaagcgtttaaacgtcattgtgatgtcgaagacattgggytatggaatcgttatgaaatacaaatgcgaaaggcatatgcagttaattgtgcgaaagttttragtagaacagataatataagygaaattgtaaagtctatattgcataataatttgcgttttatctcycctcctaaagatggaaatgataaaaatcgtaagcggtggccattatatagaccttgggcgttatttattaaagatactgaaaaattgaatttaactactagaccaacattaaagtccattgaggataatcttgattggttatgtaaacaagttgctactactttagatacagtgttaactgccgaaagtatggcgcaatctgaggggttgcttacagatactgattttttagataaaattttagcgcattcacaatttaatgatgagcatacgaatagaattaatcattatttggaggctttaaaacaaaaaaagcacttatcaaaagataagtgttaa

SEQ ID NO: 1810 - DNA, 483 bp, Staphylococcus aureus
atgragaaatttaacaactggatattaaatgcaataagtggatctcaaacagacaagaatgaaacaactgaagaattaaaaggggcaaaatttatyattttatatgcatattcaatgctcgttttgcttgcgttagtaatttctaacatattcattcacattttggagcctaaactatcaatcaccactcaaatcatcatcgttttgattttaattgaakcactaattggactgcgtttcttgaaagmgtacgatgttaagcgtggcaaagataaagaaaataagaaaaatagtaaggatttcgttaaactaaaatcaattttagtagcaattttatttacatcattggcgctgacagcaggyactgtagctgatatatacggtttcactgacttaggaaatactagaagtgatttaatcgtttggagcataggtggtattatatttggcctcgtatgttacacaatggaagataaaarataa

SEQ ID NO: 1811 - DNA, 1032 bp, Staphylococcus aureus
atgattaaagtaggtatcgttggcggtagcggttatggcgcaattgaattaattcgattrttacaaacacatcctcatgtaacgattgcacacatctactcacattcaaaagtagatgarccgttgaaattaacatttccacatttacaacatattatgcaacatttcgaagcacttacagtggayaataatgactgtgatgtaattttctttgckacaccagcacccgtragtaaaacatgtatccctccyttagtagaaaaaggwattcatgttatygatttatctggygcattyagaattaaraaycgtgaaatatatgaagcatattacaaagaaactgctgcagcacaagatgatttgaatcatgctatttacagcatttcagaatggcaatckttwgataacaatggaacgaarctcatttctaaycctggctgtttccctacagcaacrttattagcattacatccacttattagcgaaaaaatwgtagatttgtcatctattattattgatgctaagaccggcgtgtcaggtgctggtcgttcattatcacaacgtgttcatttttcagaaatgaatgaaaatctaagygcttatgcaatcggaaaccataaacacaaaccggaaatcgagcaatatttatctatcattgcgggtcaagatgtatcagtcatatttacaccacatctcgtaccaatgrcacgaggtattttatcaacaatwtatgtcaaattwtcatctgaatatacgactgaatcattacataaattaatgacctcttattatgctaatcagccatttgtcagaattagagatattgggacttttccaaccacaaaagaagtactcggtagtaactactgcgatatcggyatctatgtagatgaaacaacrcaaacagcaattttagtatcagtgattgataaccttgtcaaaggsgcaagtggkcaagccattcaaaayttaaatatattatatgattttgaagtdacgactggcctaaawcaatcaccagtttatccataa

SEQ ID NO: 1812 - DNA, 621 bp, Staphylococcus aureus
wtgctrtgcgaatctaaaatcatcaataaaaacccmaaatatagaattattaaatataatgatgagtacttaatgatcgatataataagcacttggattagtttrttttttccttttattaattggttcatccccaaaagatacgtcaaaattagtagagaagagtttgaaaatttaaatattgtkaaacctgctaaaaagaatgttttttggccagttgcwrgtatctctactttattcgcagttacattaagaaagtatacrcwtttacttgacactcaacttgataraaaattagttattgcyatatgttgyaycacatttatagggattttaayattttatgtacgcctaattaaaaaatcatctttaaatatttataatactaaaaataaaaggtcraaaatyatcttaataccaacactaaaaaatttttgtttmacattgttyrgatatgyttttttwattttwtggacagtgattttctcatatgctctattatcaatgagttatcaaaacataatagtatattttgcttggattacagcaataatrggtttttttctagtgaatatagctttaattatagataaaaacattcatgtcatacttaaaaattaa

SEQ ID NO: 1813 - DNA, 300 bp, Staphylococcus aureus
atggattattatacagcagatagattatatcgctacacaaatagttcaaatttgagtgaacctattttaaactatgttgctagtcgtataaattggggcgataaagtttcattaatgactttagctaaagaaatacagtctaaatttaatgatagttacgttaaagaaaatacggtaaaaggtcggcctaaaatttacgctgacctttgtctattgtgtatgagcttgagtgaagcaggacatggcagaatgctacaagttaatttggaagattgtatwtatattggcgatattgatgtt

SEQ ID NO: 1814 - DNA, 642 bp, Staphylococcus aureus
gtggagacattgctttgcgaatctaaagttattaataaaaaycctaaatatcgaataatcaaatacgawagtgaatayttaatgattgatttrgcaagtaattggattgtyttcttctttccatttattaactggctcataccgaaaacatatgtcaaaatcactaagaatgattatgaaaaattaaatattgtcaaaccagttaaaaataaatcgataggatggacyatattcgcgggtattgtgttacttggtggtactgtaagaagaaatacttatttatttgattttcaattagaaraactaattgtttggagcagctgtttyattggktttttagrgrttatatttttttattgttatctaaataagaaattaacattaaatrtttataakgaaartaaaaataatgaacttaaattaagattattaccctcctttaaaaatatktgtttcacaattttttattacctmtttactggtttcatgtcttatggggcattttacttgttggtrtttgaaaatgtrcaaaatttaatcttatatrtttcttggcttttcatgactatgctatttatgttwatgaatatgcaytcaattatagataaaaaagtacatatattyttaaagtctaataaatag

SEQ ID NO: 1815 - DNA, 321 bp, Staphylococcus aureus
atgaaaccagtattggatattaaaaaaactttaggacaattaaactttttaggtgtagatgaaaaatataaatatgaaaatggagagcgtactgataaaactgtttatgcatataaattagcgagtcaagarcaaggcgaacaaatcactgttaaaacgcctaataaagtrgaattagactatttacaagaatgcgaattagttgaaccagacgttaaaatgtatgttcaaatgtcaggcgattttggaactatcgcatatagctggaatgcagaagatattaaagtagttggttctaatagtgcacttaaacaaaaataa

SEQ ID NO: 1816 - DNA, 627 bp, Staphylococcus aureus
gtgctttgtgaatctagacaaatttataaaaatcctaaatatcgagttattagatataataatgaatatttcatggtcgatttagtaagtacttggattacttattttttcsctatgattaattggtttttgcccaaaaaatacgcaaaaattagcgaaaatgaatttgaaaggttaaatatagtcgagcctgttaaaaataatgttttttggccggttgcaggaagttcagttctatttggaattatattgagaaagtacggtaacttctttaatgttcagtttgaaaaacaactagcaatcactgtattttttatcatgttaatagggatgttaattttttatttttatctaaataaaaaattaacattaaaaatttttaataccaacgtggttaataagaatagagttgtattaataccgactttcaaacaaggattgttaatagtttttgcgtacttttttttaggaagcgcttcaatatttactttaaccattcttttgacgacagagtcacaaaatataataatatttttaacttgggttattatcwcgatgtttttctttttagtgaatatggcttcgataggtaataaaaatgttcatgttattttaagaataaacgag

SEQ ID NO: 1817 - DNA, 282 bp, Staphylococcus aureus
atgactgagtttacacctttttttgatggttcaaatcaattaaattatcktaaatttgtaattttaagatttcatggtgtttctaaaagaaaaatttgtaaaatgtataattttgcatattttcgtatattagaagtttgtgaaatggcaaaaaagaatgattatcgatttacttataaggattataaatttttaaaacaatatggtgtgtctwatacawttatttgtaagatgtatcatatttcaattgaagacttagaattttttgaggtgatgaaccga

SEQ ID NO: 1818 - DNA, 627 bp, Staphylococcus aureus
atgttgctttgcgatgtcagagtcatttataaaaatccgaaatacaaagtcattcaacataacggtgaatacttattagtcgatttagtaagcacttggttcgtgtacttttttcctttcattaattggttcattccaaaaaagtacgcgataattagcgaagaagaatttgaaaatttaaatgttgttaaaccaaataaaaataatgttttctggtcagttataggaagttcggttttgtttggagttactttaaggaaatacatacatgtttttgatgttcaattagataagctagttgtaatgatattgtgtgctctcgctttaatttgtgttatagttttttattttaacttaaatagaaagcttaagttaaaagtgtttgatacaaatattgaaaaaaataagagagttatattaataccaacgtttaaacttggctgttttttagttttcggatatattttcgctggaagtttttcaatattttcattaattgcccttatgacaatcgaacctcaaaatataataatatttatttattggattatgatgacaatgcttttctttttgttaaatatgacttcgataggtaatgaaaaagttcgcgttataatgaaaaataat

SEQ ID NO: 1819 - DNA, 558 bp, Staphylococcus aureus
atgatttcggttaatgattttaaaacaggtttaacaatttctgttgataacgctatttggaaagttatagacttccaacatgtaaagcctggtaaaggttcagcattcgttcgttcaaaattacgtaatttaagaactggtgcaattcaagagaaaacgtttagagctggtgaaaaagttgaaccagcaatgattgaaaatcgtcgcatgcaatatttatatgctgacggagataatcatgtatttatggataatgaaagctttgaacaaacagaactttcaagtgattacttaaaagaagaattgaattacttaaaagaaggtatggaagtacaaattcaaacatacgaaggtgaaactatcggtgttgaattacctaaaactgttgaattaacagtaactgaaacagaacctggtattaaaggtgatactgcaacyggtgcyactaaatcggcaactgttgaaacwggttatacattaaatgtacctttatttgtaaacgaaggtgacgttttaattatcaacactggtgatggaagctacatttcaagaggataa

SEQ ID NO: 1820 - DNA, 648 bp, Staphylococcus aureus
gtggagacattgctttgtgaaactgaaaatattaataagaatcccaaatatagaattatcaaatacaaagatgaatatttgatgattgatttagtaagtacatggttagcactctttttcccaatgattaattggctgattccaaaaaagtacgtcaaaatcagcgaaaaagattttgaaactttaaacattgtgaagacagctaaaatcaattctttttggccagtggcaggaagtacggtcttatttggtgttatgttaagaaggtattcccatttatttatcgttaaatatgaatatagtatagtaattttaatttgttgcatcataatactaggtatttttctgttttttttatatttaaatcaaaagttaaagttacaaatctataatgaaaacaaaaataaaagcaataagataatcatatttcccactttaaagagtctttgtttatcaatagttttatatatttatttaggtggtggttcattctttactatttatatgttattgacgattgaagttcaaaatataatattatttataactttgtttgtaatatttttgtttttcttatttttaaatatgtgctcactatatgacaataaagttcatgtattatttaaatcaaatggaattgaaaagttt

SEQ ID NO: 1821 - DNA, 1062 bp, Staphylococcus aureus
atgagcagaataacacaagtgcatcgtattttagaacaaaaacatttagatgcgattatcattctttcggattacaatagaagatatttatcaggttttactggtaccagtggagcacttatcatatctaaagataaacaatatttgataacagactttagatatattgatcaagcaactaagcargcgccaaattatgaaattattaatcgtaaatctactatyattggtgagattaaagaattgctacaccaagaraattttgaaaatrtaggytttgaggggcaycatgtragttatgatacataccttgaattaaataaaagccgtatatcattaataagcatttctaatactgtagataaaattagagacgtmaaagatgytgasgaaattgcwttrattcaaaaagcagcwratatygttgatgaaacatatgaatayatwytaackgttgyaaaagcwggyatgactgaaaaagaattaaaggcaatattagaaagyaaaatgctagaattaggagcagatggaccatcattygatacgattgtagcatctggtcatagaggtgcattamcacatggtgttgcaagtgayaraattattgaaaaaggcgacatgatwacattrgatwtwggygcktattwyaayggmtattgttcagatatkactagaacatttgctatwggagaaccagatcstaarctgaaagaaatatatcmaatagtacttgaatctcwaatgawagcaattamtgagattagacctggcatgactggtgcagaagctgatgccatttcaagaaactatttagagtcaaaagggtatggaaaagaatttggacattcactaggacatggtattggtttagaaatccatgaagggccaatgctggctcgtacgatacaagataaacttcaagttaacaactgtgttacagtagaacctggtgtttatatagaaggtttgggcggtataagaatagaagatgatattttaattacagaaaatggttgtcaagtctttactaaatgcacaaaagaccttatagttttaacataa

SEQ ID NO: 1822 - DNA, 636 bp, Staphylococcus aureus
ttgctatgtgaatctaaagttatcaacaaaaatcctaagtatagagttattaaatatggtgatgaatatttaatgattgatttagtaagtacctggttaactttatttcttcctatgattaattggttaattccaaaaaaatatgtcaaaatcagtaaaaaagaatttgacgatttaaacattgtcaaacctgttaaaaataaagctttttggccagttgcaggtagtactattttgttcggagttacgtttagaaaatatattccttcacttaatattcaattagagaaaaacatggtgattgtaatatgttgtgcaatatttctgggtgttttaatactttttttatttctgaatcgtaagctaagrttggaaatttataataataactctagtaaagggaaaataattttatttccttcattaaaaaacttttgyttyacaatattttattattttttatttggcggtctttcaataatggctctaagtatgttattaactttaaatcctcaaaatataataggctttattggttggttggtaatgactgcaggtttctttctgttaaacatgtcatcgattattgacaaaaaaatttatgtattatctaaaactaacacggtggaaaaatga

SEQ ID NO: 1823 - DNA, 831 bp, Staphylococcus aureus
atgactgaaacttggaattttattaatacaggaagtaaagacccatattataatatggcaatggatgaagcgttattaaattttgtctctagaggtgaaattgatccagttatacgtttttacacatggaatcctgcaacattatcaataggktatttccaaaggctacaaaaagaaattgatattgataaggttaaagagaaaggttttggtctcgtaaggcgtcaaactggtggccgtggggtgctwcatgataaagagytaacttacagtgtgatwgtgcctgaatcgcatccsaatatgccttctacwgttacagaagcgtacagagtgatttcacaaggattattagaaggatttaaaaacttaggatttratacttattttgcggtacctaaaacgcctgaagagcgtcaaaaattaaaacaacctcgaagttcagtgtgttttgatgcaccaagttggtatgagctagttgttgaaggccgtaagattgctgggagtgctcaaacgagacaaaagggcgtaatcctccaacacggttcgattttacaagatattgatattgaygaaytgtttgatatgtttatttataaaaatgaaagattaaaattaaaaatgaaagaggcattcgttgaaaaagcagttgccatcaatgatatttcagatraacacattactattagtcaaatggaagaagctttcgagaaaggttttaagaaaggtttaaatatagaattaaagccacttgaattaacagaagytcaattggcagaagtggaagaattaactgaaaaatatcgttcagatgaatggatgtttagaaagtag

SEQ ID NO: 1824 - DNA, 624 bp, Staphylococcus aureus
atgttgctatgcgaatctaaaatcatcaataaaaacccaaaatatagaattattaaatataatgatgaatacttaatggtcgatataataagcacttggattagtttattttttccttttattaattggttcatcccaaaagaatacgtcaaaattagtagagaagagtttgaaaacttaaatattgttaaacctgctaaaaagaatgttttttggccagttgcaggtagctctgctttgctgggagttgcattaagaaaatatacacatttacttgacrttcaacttgataaaaaattagttattgccatatgttgcatcacatttatagggattttaatattttatgtacgcctaattaaaaaatcatctttaaatatttataatactaaaaataaaaggtcaaaaatttttttaatacctacactaaaaaatgtttgtttcacattatttggatatattttatttggcggattgactatgctattcctagatgcactattatcaatgagttaycaaaacataatagtatattttgyttggattgcagttatratgggtttttttctagtkaatatagctttaattatagataaaaacattcatgtcatacttaaaaaycaa

SEQ ID NO: 1825 - DNA, 1473 bp, Staphylococcus aureus
atgactagtaaatcaagtccattaatttttgaaagatctcgtgaaggcagatatgcatattcattaccaawaagtgatattaaaacaaattctgttgagtcattgttagatgataaatttattcgtaaaaacaaagcggagtttcctgaagttgctgaactagacttagtacgtcattatactgaactttcaaataaaaatttcggtgtagayaacggattttatccattrggttcatgtacgatgaagtataaycctaaaattaatgaaaaggttgctagaataccaggattyagtgaatcacatccattacaagatgaagaycaagttcaaggttcattagaaattatttatagtttrcaagaagaattaaaagaaattactggtatggatgaggtracattacaaccagctgctggygcacatggtgaatggactgcattgatgatatttaaagcttaycatgagaataatggtgaaggtcatcgtgatgaagtcattgtgccagattctgcgcatggtacgaatccagcctcagcttcatttgcaggatttaaatcagttactgtaaaatcaaacgaacgtggcgaagttratattgatgacttgaaacgtgttgtaaatgaaaatacagcagctattatgttaactaatccaaayactttaggtattttcgaaaaaaayattatggaaatccgtgaaatcgtccataatgctggkggtctattatattatgatggtgcgaatttaaacgctattatggacaaagttcgcccaggagatatgggatttgatgctgttcatttaaacttgcataaaacatttactggtccacatggtggyggcggtcctggttcaggtccagtcggtgtagtaaaagaactagcaagttacttaccaaagccaatggttattaaagatggcgacaaatttaaatatgataatgacattaaaaattctatcggacgtgtaaaaccattttatggtaactttggtatttacttaagagcttatacgtatattcgaactatgggagcaactggmcttaaagaggtttcbgaagcagcggttcttaatgcgaattatattaaagcacgtttatctraacactttgaaataccttataaacaatattgtaaacaygagtttgtgttaagtggtgtkcgtcaaaaagaatttggtgtacgtactttagacatggctaagcgattattagatttcggtgtacatccaccaacaatmtacttcccattaaatgttgaagaaggtatgatgattgaaccgactgagacagagtctaaagaaacacttgattattttatcgatacattaattagtattgctgaagaagctaaaaatgatcctgataaagtgytagaagcaccayatacaactgtgattgatcgattagacgaagctacagctgctcgtaaaccaatattaaagtttgaaaatcttaaacaggaaaaataa

SEQ ID NO: 1826 - DNA, 939 bp, Staphylococcus aureus
atgaagcaatttgtaaacttaggtaaatctgatgttgaagtgtttccaatcgcacttgggacgaacgcagtaggtgggcataatttatatccgaacttagatgaagaacaaggaaaagatgttgttcgtcaagccattaatcatggtattaatttattagatacggcatatatttatgggccagaacgatcagaagaattggttggagaagttgttaargaatatccgcgagagcaaattaaaattgctacgaaagggtctcatgaatttgatgaaaatcaagaagtacatcagaacaatcaaccggaatatttaaaacaacaagttgagaatagtttgaaacgtctacaaactgattatatcgatttatattatattcattttccdgatracaacactccgaaagatcaagcagttgcagcattacaagagcttaaggaacaagggaagattaaagcmrttggtgtatcaaatttcacattagatcaacttaaagaagcaaataaagatggttacgttgatgttgtacagttagaatataatttattgcaycgygaaaatgaggcagtattrcaatattgtgttgatcaccwaatcacatttattccwtatttcccwttagcatccggtattttagctggaaaatatgatgagaacactaaatttagtgaccatcgtactacacgtcgtgattttawaccwggtgtwtttgaagaraatgtgcgtcgcgtaaaagctttggaaagcmtagctgcagcacatcaaacttcaattgcgaacattgtattagcattttatttaacgagaccagctatcgatgtgattattcctggtgcaaaacgtgcagaacaagtcrttgaaaatattaaagctgcagatatcgttttatcagatgatgagattcaatatatcgatgaaytgtttccrattgaagactaa

SEQ ID NO: 1827 - DNA, 1347 bp, Staphylococcus aureus
gtgagtcatcgttatatacctttaactgaaaaagacaagcaagaaatgttacaaacaattggtgcaaaatctataggagaattattcggtgatgtaccaagtgacattttattaaatagagatttaaatattgctgaargcgaagcggaaacaacgttacttagaagattaaatcgcattgcaagcaagaatatcactaaagaaacgcatacatcatttttgggtgctggtgtttatgatcattacgcgccatcagttgtggatgctatgatttcaagatcagaattttacacagcatatacgccatatcaaccggaaatttctcaaggtgaattacaagccatttttgagttccaaactttaatttgtgaattaacagatatggatgtagcaaattcttctatgtatgatgggatgactagctttgctgaagcatgtatyttagcatttagtcaaacaaagaaaaataaaattgtagtctcaaaaggtttrcattatcaagcattacaagtacttcatacttatgctaagacgcgtaaggaattcgaagtagtggaaatcgatttagatggcactgttacagatttgaaaaaattagaagcagcagtggatgatgawacagcagctgttgcagtwcaatatccaaacttytayggttcaattgaagatcttraaaagattcawagctttattgaagataaaaaagcattatttatcgtatatgcaaatccattagcattgggattacttacacctccaggttcatttggtgcagatattgttgtaggtgatactcagccattyggaattcctgctcaattcggtgggccacattgtggatattttgcaacgacgaaaaagttaatgcgtaaagtrccaggtagattagtcggtcaaacacaagatgatgaaggtaatcgtggctttgtattaacattacaagcacgtgaacaacatattcgacgygataaagcgacatctaatatttgttctaaccaagcattaaatgcyytagcgtcatcaattgcaatgtcagcacttggtaaacaaggtatctatgatattgcagttcaaaatatagaacatgctaactatgctaaacarcaatttattaaaaaaggttttgaagtattagatggtacatctttcaatgagtttgtagtcaaatttgacaaaccaattcaacaagttaacgaggaattagtgaagtacaatattatcggtggttttgatttaggtgttgtttcagacgactttaaaaatcacatgttaatagctgtaactgaattaagaacaaaagatgaaatcgatacatttgtagaaaaggctggtgagttaaatgactag

SEQ ID NO: 1828 - DNA, 537 bp, Staphylococcus aureus
atgattactgttttgtttggtgggagtagaccaaacggtaatactgcacaattaacaaaattcgctttgcaagatttagagtatcaatggattgacgtgacacaacatcagtttaaaccgatacgtgacgtgagacatacagcagagactattacttcatatgacgatgactatttgccgattctagataaaatattggctagtgatacrattatttttgcatcaccagtgtattggtatagcatttcagcaccattgaaagcatttatcgaacattggtcagaaacattacaagataaacgatatcctaattttaaggcacaaatggccgaaaaggattttagagttattttagttggtggagattgtccaaaaataaaagcgaagccagcaattacgcaaatgaaatatagtttagactttttaggtgccactttaaatggttatattattggaactgctgaaaagcctggtgacatcatgaaagacaactatgccttagcacgtgcaactgagtggaatagtatattgcaataa

SEQ ID NO: 1829 - DNA, 1092 bp, Staphylococcus aureus
atgtcaagtgatttaaaacaaacacctttatatcaaaattatgttgatagaggtgcaaaaattgtggaattcggaggatgggcgatgcctgttcaattttcaagtattaaagaggagcataatgctgttcgatacgaaattggcctgtttgatgttagtcatatgggtgaaattgaagtracaggtaaagatgctagtcagtttgtgcaatatttattatcaaatgatactgataatttaactacttcaaaagcattatatactgctttatgtaatgaagaaggcggtattattgatgatttagtaatatataaattagctgacgacaattatttattagttgttaatgctgctaatactgaaaaagattttaattggattttaaaacacaaagagaaatttgatgttgaagtacaaaatgtatcaaaccaatatggtcaattagcaatacaaggaccaaaagctagagatttaattaatcaattagttgatgaagatgtaactgaaatgaaaatgtttgaatttaaacagggtgtcaaattatttggagcrawcgtcattttatctcagtcaggttacacaggtgaagatgggtttgaaatttattgtaatatcgatgatactgaaaaaatttgggatggtttattagagtataatgttatgccatgtgggttaggcgctcgtgatacattaagattagaggctggattgccattacatggacaagatttaactgaatcaattacaccatatgaaggtggtatcgcttttgcaagtaaaccattaattgatgctgattttattggtaaatctgtattaaaagatcaaaargaaaatggtgcaccaagaagaacagtgggattagaattacttgaaaaaggaattgcaagaactggttatgaagttatggatttagatggaaatattattggagaagtaacttcaggaacacagtctccatcatcaggaaaatcaattgcacttgcaatgataaaaagagatgagtttgaaatgggtagagagttgcttgttcaagttcgtaagcgtcaattaaaagcgaaaattgttaagaaaaatcaaattgataaataa

SEQ ID NO: 1830 - DNA, 477 bp, Staphylococcus aureus
atgttcaaggtaagacaagcaactgaaaaagatgttgttcaaattagagatgtcgcaactaaagcttggtttaatacatacttaaatatatacgctgcgacaacagttaatcacttgttagaagcttcatataatgaacatcatttaaagaaaagacttcaagaacaattattcttagtcgttgaagaaggtaatgacatcgttggctttgctaactttatttacggtgaagaattatatttatcagctcattatgttaaaccagaatcgcaacatacaggttatggtacagcattgttaaatgaaggattatcacgttttgaagataaatttgaaggtgtttacttagaagtagataataaaaatgaagaagcagtagcttactataaagagcaaggttttacaatcttacgctcttatsagccagaaatgtatggcgaaaagttagacttagcacttatgtacaaagcattttaa

SEQ ID NO: 1831 - DNA, 525 bp, Staphylococcus aureus
atgaatcatgataaatcaccaataattttaattggtttcatgggtaccggtaaatctacgattggtaaatacgttgcagatgagcaaaatttatcatttattgatatagattcatatatcgaagaraagtataagttaacaataccagaaatatttwgtaaacatggtgaacaatatttcaggaatttagagttcacatgtttgcaagaatgtattaacactgcagatataattgctactggtggtggtattattgaragtgaagaggyatttaattttttgaaaaatcaaaaaaacattatttggttagattgtaatattgatattatatatagtcgaatcaatgatgacccacatcgacctaatgcaaataataagacaatcaagcagttaaatgacttgtattgctcgcggawtttaagatataatgaaatcgcattcaagaaatttgatagtcatttgctatcaatttcagaaatatattatgaattgctaaatttaataaaagcgagtgatcagtattag

SEQ ID NO: 1832 - DNA, 987 bp, Staphylococcus aureus
atgaaaaagtgtattaagactttgtttttaagtatcattttagtagtgatgrgtggttggtatcattcagcacatgcgtyagattcgttgagtaaaagtccagaaaattggatgagtaaacttgatgawrgmaaacatttaactgagattaatatrccrggytcacatgatagtggctcattcactttaamkgayccrgtaaaatcrgtttgggcaaagactcaagryaaagattaccttacycaaatgaagtcrggagtcaggttttttgatattagaggtagagcaagtgctgataatatgatttcagttcatcacggcatggtttatytgcatcatgaaytaggaaaatttytmgatgatgctaaatattayttgagtgcytatccaaacgaaacaattgtgatgtctatgaaaaaggactacgatagcgattctaaagttacgaagacatttgaagaratttttagagaatattattataataacccgcaatatcagaatcttttttacacaggaagtaaygcgaaycctactttaaaagaracraaaggtaaaattgtcctattcaatagaatgggkggtacrtacataaaragtggttatggtgctgacacgtcwggyattcaatgggcagayaaygcgacatttgaaacgaaaattaataatggtagcttaaatttamaagtacaagatgagtataaagattactatgataaaaaagttgaagctgttaaaaatttattggctaaagcwaaaacggatagtaacaaagacaatgtatatktgaatttcttragtgtagcgtctggaggyagcgcatttaatagtacttataactatgcatcacatataaatcctgaaattgcaaaaacgattaaagmaaaygggaaagctagaackggttggctgattgttgactatgcaggrtatmcgtggcctggatatgatgatatcgtaagygaaattatagatagtaataaataa

SEQ ID NO: 1833 - DNA, 1185 bp, Staphylococcus aureus
atgaattcaatcattgaattaactgattattatagctctaataattatgcaccactkaagcttgtmattwctraaggkaaaggkgkcaaagtttgggatactgatggcaaacaatatatagattgcatttcgggtttttcagttgcaaaccaaggccattgtcatccaacaattgttaaagcgatgacagaacaagcttcaaagttgtctatcatttcacgtgtcctttatagtgacaatctcgggaaatgggaagaaaaaatttgtcatcttgctaagaaagacaaagtactcycccttaactctggtactgaagctgttgaagcagccattaaaattgctagaaaatggggctctgamgttaaaggcatyactgacggacaagttgaaatcatcgctatgaataacaattttcacggtcgtacacttggctcattatcactatctaaccacgacgcatataaakcaggatttcaccccctacttcaaggyactamaacwgtagattttggagayattgarcaattaacacaagctatttcaccraatacagcagcaattattttrgaaccaattcaaggtgaaggtggcgttaatataccaccgaaaggatatatycaagctgtgcgtcaactatgtgataaacatcaaatattawtgattgcagatgaaattcaagttggtcttggtagaactgggaaatggtttgckatggaatgggarcaagtygttccagacatttatattttaggtaaggcattgggtggcggcttataccctgtatctgctgtrcttgcaaataatgatgtcatgcgwgttctaacaccaggtacacatggytcaacatttggtggtaaccctttagccattgcaatatcgacggcagcgcttgatgtacttaaagatgaacaactggttgaacgatcagaacgcttaggttcatttttattaaaagcgttgctacaacttaaacatcctagtattaaagaaattagaggtcgtggtttatttatwggcatmgarcttaacacagatgcygcacctttygtkgawcaactgattmaacgtggmatyttatgcaaagacacgcatcgtactatcattcgattgtcwccacctctagtyattgataaagaggaaatcmatcaaattgttgcagcttttcaagacgtttttaaaaattaa

SEQ ID NO: 1834 - DNA, 1296 bp, Staphylococcus aureus
atgactaacgcatatgtagatttaaaattagtagaagaaaaagtttttaaagayccgatacatcgatatattcatgttgaagatcaattgatatgggatttaattaaaactaaggaattycaaaggttacgtcgaattagacaaytaggaacactgtacctatcttttcacacagcagaacatagtcgctttggacattctttaggtgtgtatgaaatagttagacgattaattgatgagtcatttattggtcatgatgcatgggacaataaagatagaccgttggcattatgtgctgcattattacatgatttaggacatggtccattttcacatagttttgaaaaaatatttaatacagaccatgaagcatacacwcaagcgattattactggagatactgaggtgaatgctgtattacgtaaagtrkcgcctgagtttccaagagaagttgcggaagtaattaataaaacgcatcataataaattggtcatttcgatgatttcktcacaaatcgatgcggatagaatggattatttacaacgtgatgcgtatttcacaggtgtrtcatatggtgcttttgatatggarcgtattttaagattaatgcgaccttctaaagatgaagtactaatyaaagaaagtggtatgcatgcagttgaaaactttattatgagtcgttatcaaatgtattggcaratttayttccacccagttagtcgtggtggagaagtgctgcttaataattgtttgaaacgcgcaaaacagctttataatgaaggctatgaatttaagttgcatccacatgattttattccattttttgaagagacagttacgattgaacaatatgttgaactcgatgaagcggtagttacgtattatttggaaaaatggacaaaagaagatgatgcyattttaagtgatttagcaagtcgatttattaatcgagacttatttaaatatattccatttgatggctcaattattacaatatcagaactgcaagaactgtttgaagcaggtggtattaatccagattattattttgtgagtgaagcattttckgatttgccatatgactatgatcgacckgggtcaaatcgcaaaccgattcatttattaagacaagatggtamgattagagaaataagcaatcaatcwttagtcattcatagtattacaggcattaatcgccaagactataaattatattatcctagagaaatggttgcaaagattaaagataagacaattagagaagctattgaaaatttgattaatgagcttaattaa

SEQ ID NO: 1835 - DNA, 498 bp, Staphylococcus aureus
atgatattaagcaaagtgaccaacaaatttgtgctatttcaaaaaataccacttcttatcaaaagacatgtatacagtattaatgtcaaagctttttcgctyattgaaatgttagtagcgatgatggttataagtataaytttactaattgttccagacttaattagacttaryaaaacttttctaattgaaagtagggawttaacaactgtagatttcgaatttttctcaagagatattctagakgattttaaaggwgtagataraaacgatattgaaattaggcaacascgtatcattttacataaaggtgaagaaatgatcgaatacaaattaatwaataataaaattattaaagttgtaaatgacagaggaaatataacaatgattaataatgttacagcatttactgcaaatatctactataaatcyattattaaaataacgataacagttaaagtcggtacaaatstgcagactaaaacwatttatgtataa

SEQ ID NO: 1836 - DNA, 522 bp, Staphylococcus aureus
atggaggttatatcattgtctgagaaaaaaggctttaattttaatatcataaaaaatgaccctctagatggtcataaaggtacaaatattggttcaattagcttagacaatattgcaccagtttttatcgatgttgctaacaaagaagcatttattgatattggaggcatgcatgctcgygccaaagttgaaaaaggygtgaaatggattactgataaagctgctgttgaaggcgatgaagctaaagaatattggttgtgttgggtaacaacagaacgtaatgaacaaggaccatattaygctggtttaacagcgtgctatttattagtgaataaagcaattcgtcgtggttataaaagtatgcctgaacatgttaatatgatggataaatcaatgaaacatcatattatcatwgatcaaattggtgacgagaataaagctattttaaaagactttttaatgaaccatgatgaaggtatgtggaagcwttcttctgatgcwttacatcaagcatttaattaa

SEQ ID NO: 1837 - DNA, 447 bp, Staphylococcus aureus
atggagaagcagttgcaaattagaaarcagtcagcatttactatgattgagatgcttgtggtaatgatgttaatcagtatatttytacttttgacawtgacatctaaaggattaagcaatcttagagtaatagatgatgaggcaaatatcatttctyttattactgaattgaattatattaagtcgcaagctatagcaaatcaaggatatatcaatgttagattttatgaaaacagtgacactattaaagtaatagagaataataaaatacgatttctaaaaytaaaagtaggcaaaataattaatgttgcaaaagttgatattattgcctttgataaaaaagggaatatcaataaatttggtagcataacaattkayaataacaattcaatttatagaataatattccatattgaaaaaggaagaattcgttatgaaaagctataa

SEQ ID NO: 1838 - DNA, 1011 bp, Staphylococcus aureus
atgagagcagcagttgtaacgaaagatcacaaagtaagtattgaggacaaaaagttaagagctttaaaacctggtgaagcrttggtacaaacggaatattgtggygtttgtcataccgatttacatgttaagaatgctgattttggtgatgttacaggcgttactttaggtcatgaaggtattggtaaagtcatcgaagttgcrgaagatgtagaatcattaaaaattggagaccgtgtgtctatcgcttggatgttcgaaagctgtggaagatgtgaatattgtacaacaggtcgtgaaacactttgccgtagtgtgaaaaatgctggttatacagtagatggtgcaatggctgaacaagttattgttactgcagactatgctgtgaaagtacctgaaaaattagatccagcagcagcgtcttctattacatgcgcaggtgtgacaacttataaagctgtaaaagtaagtaatgtwaaacctggwcaatggttaggtgtttttggtataggtggtttaggtaacctagctttacaatatgctaaaaacgttatgggggctaaaattgttgccttcgacatyaatgatgataaattagcattcgcraaagaattaggtgcwgatgctattattaattctaaagatgttgatccagttgcagaagttatgaaattaactgataacaaaggattagatgcaacagtggtaacttcagttgctaagacgccatttaaccaagcggttgatgttgtaaaagctggtgcaagagttgttgcygttggtttacctgttgataaaatgaacttagatatcccaagattagtgctwgayggtattgaagtagtaggttcacttgttggtacaagacaagacttacgtgaagcgtttgaatttgctgctgaaaataaagtaacacctaaagttcaattaagaaaattagaagaaatcaatgatatttttgaagaaatggaaaakggtactataactggtagaatggttattaaattttaa

SEQ ID NO: 1839 - DNA, 312 bp, Staphylococcus aureus
atgtttaaatttcttaagaaaactcaagcgtttacattgatagagatgctattagtgttattaatcatcagtttattattaattttaatcattccaaatattgctaaacaaactgctcacatacaatcaacaggttgtaatgcacaggtaaaaatggttaatagtcaaattgaagcgtatgcattgaaacataatagaaatccatcgtctattgaagacttaattgcagatggttttataaaagaagmrcaaaagacatgtaaatcaggagagacaatmacaattagtaatggagaagcagttgcaaattag

SEQ ID NO: 1840 - DNA, 1071 bp, Staphylococcus aureus
gtgaaactacaatgsataaatacatttaaactacattctaagaagcgacaattaagtaaggcccaacaaatcgayttactttcaaatttatgtaatttgttgaaatatggtttcactctgtatcaaagttttcaatttttaaatcttcaaatgacatataaaaataagcaattaggtaccaccattctaagtgaaatttcaaatggtgcaccatgcaatmaratattatcactgataggttatagcgatactatcgtcmtgcaagtatatttggcagaaagatttggcaatatyatagacgttctagaagaaaccgtaaattatatgaaagtgaatagaaagtcagaacaacgattgttaaagacactgcaataccccttaatactagtttctatytttattgctatgattattatattaaacctcacagtaattccacagtttcaacaattatatacttctatgaatattcaactatcttcttttcaaaaaacattgtcttttttcattaccagcttacctactataattgtagtaatgctcataatagtatctatgttggctattattatgaaattaatttataacaatttaaatatgctcaataagataaactttgtgatgaaactaccgctaatatcaggctatttccaattatttaaaacttattttgtaactaatgaattagtgttgttttataaaaatggtattacacttcaatcaatagtagacgtttatattaaccatagtagtgatccatttagacagtttctaggtaaatacttattaacttattcagaaatgggatatggtttgcctcaaattttagaaaaactaaaatgctttaagcctcaattaattaagtttgtgctacaaggtgaaaagagagggaagctagaagtagaactaaagttatattcrcaaatattagtaaaacaaatagaagataaagcgataaaacagactcagtttttacagcctattttatttttgattttaggtttatttattgtcgcaatttatttagtaattatgttaccratgtttcaaatgatgcaaagtataaaataa

SEQ ID NO: 1841 - DNA, 429 bp, Staphylococcus aureus
gtgagtagtaaattggataaaaaagtaagtattcawacaaagcaagtgttgaaacagcacaacgaaaaagaaaaatttgaatttactactgaaggaacttggcaacaaaggcaatctaactttattcggtatgtagaacaaattgaggatgcaacagttaatgttacaataaaagtggatgatgatagcgttaagttgattcgtaaaggcgacattaatatgaatttgcattttgttgaaggacaaacgacaacaactttttacgatatatcggctggacgaattccactagawgttaaaacattacgcattttacatttcgtaagtggagacggtggcaagytaaagattcattatgaattatatcaagataatgaaaaaatgggttcttatcaatatgaaattaactataaggagataggcgaatga

SEQ ID NO: 1842 - DNA, 975 bp, Staphylococcus aureus
ttgaagattctatttcaagaaataattaataaagcgatagaaatgaaagcgagtgatgtacattttattccagttaaaaatgaagtaagtattaaatttagaattaatgataacttggagcagtatgaacaaattgggaatagcatttatcaaaagttattagtttatatgaagtttcaagctgggcttgatgtttctacacagcaagtcgcacagagcggtcgatatagttaccwtttcaataaaatatattttttgagaatatcaactttaccattgtcacttggccaagaaagttgtgttatcagaattgtacctcaattttttcaacmacaraaatcaacttataaattcaatgattttaaacacctcatgaataagaaacaaggattactattgtttagtggrccaactggttcaggaaagagtacattaatgtatcaaatggtctcatacgcgaataaagccttgaatttaaatgtaatttctatagaggatcctgtagagatgcaaattcctggtatcgtscaaattaatgtgaatgataaagctggcatwaactatgtaaattcgtttaaagctattttaagatgtgatcctgatgttattttaataggtgaaatcagagataaagatgttgccaagtgtgttatacaggctagtttaagtggtcaccttgttctgactacattgcatgcaactgattgtaaaggtgctattttaaggctattagaaatgggcatttctgtacaagaattgatacaggcaactaacttaattataaaccaacgacttgtaactactattaagcaacagcgacaattagtatgygaaattctatctcagcaacaactccgatatttcttttcccataatcattcattaccatcatcatttaagaacttagaagataaacttgatgatatgacaaaagcaggtgtcatttgtgaaactacaatgsataaatacatttaa

SEQ ID NO: 1843 - DNA, 1662 bp, Staphylococcus aureus
atgaatattattgatcaagtgaaacaaacattagtagaagaaattgcagcaagtattaacaaagcaggattagcagatgagattcctgatattaaaattgaagttcctaaagatacaaaaaatggagattatgctactaatattgcgatggtactgactaagattgcaaagcgtaatcctcgtgaaattgctcaagcgattgttgataacttagatactgaaaaagcacatgtaaaacaaattgacattgctggtccaggattcattaatttttacttagataatcagtatttaacagcaattattcctgaagcaattgaaaaaggtgatcaatttggacatgtaaatgaatcaaaaggtcaaaatgtattgcttgagtatgtttcrgctaaccctacaggagatttacatattggtcatgctagaaatgcagcagttggtgatgctttagctaatattttaactgcagctggctataatgtaacacgtgaatattatattaatgatgctggtaatcaaattactaacttagcgcgttcgattgaaacacrtttctttgaagctttaggtgacaatagttattcaatgccagaagatggctataatggmaaagatattattgaaataggtaaagatttagcagagaaacaccctgaaattaaagattattctgaagaagcacgtttgaaagaatttagaaaattaggcgtagaatacgaaatggctaaaytgaaaaatgatttagcagagttcaatacgcattttgataattggtttagtgaaacatctttatatgaaaaakgmgaaattcttgaagttttagcwaaaatgaaagaattaggttatacgtatgaagctgatggcgctacatggttacgtacaactgattttaaagacgacaaagacagagtmttaattaaaaatgacggtacatatacgtatttcttaccagatattgcgtaccacttcgataaagtwaaacgtggtaatgacattttaatcgatttatttggtgctgatcatcatggttatattaaycgtttgaaagcatctcttgaaacgtttggtgtagatagtaatcgtttagaaattcaaatcatgcaaatggttcgtttaatggaaaatggtaaagaagtgaagatgagtaaacgtactggtaatgcgattacattaagagaaattatggaygaagttggcgttgacgctgcacgttatttcttaactatgcgtagtcctgatagtcactttgattttgatatggaattagcgaaagagcaatctcaagacaatccagtttactatgctcaatatgcacatgcgcgtatttgttcaattttaaaacaagcgaaagagcaaggwattgargtrrctgctgcgaatgattttacaacrattacwaatgaaaaagcgatygaattgttgaaaaaagtagctgayttygarcctacaattgaaagtgctgcwgarcatagatcrgcacatagaattactaaytatattcaagayttrgctkctcatttccataaattctayaatgctgaaaaagtgttaacagatgatattgaaaaaacaaaagcacatgttgctatgattgaagcggtcagaattacattgaaaaatgcattggcaatggtcggtgtaagcgcacctgaatcaatgtaa

SEQ ID NO: 1844 - DNA, 624 bp, Staphylococcus aureus
atgaggatttcaagcttaactttaggcttagttgatactaatacgtatttcatcgaaaatgacaaagctgttattctgattgacccttcaggtgaaagtgraaaaattattaaaaaattaaaccaaataaataaaccrttaaaagctattttattaacacatgcacactttgatcatatcggagcagtcgatgatatagttgatcgattcgatgtcccggtttatatgcatgaagcagagtttgattttctaaaagatcccgttaaaaatggrgcagataaatttaagcaatatggattaccaattattacaagtaaggtaactcctgaaaagttaaacgaaggtagcacagaaatagaaggatttaagtttaatgtgttacacacacctggacattcaccaggaagtttaacatatgtgttygatgaattcgcagttgttggagatacattatttaataatggaatcggacgtacagatttatataaaggtgaytatgaaacgctagttgattctattcaagataaaatatttgaattagaaggcgatttacctttattccctggacatggtccatatacgacggttgatgatgaacaattaaatccatttttacacggttaa

SEQ ID NO: 1845 - DNA, 186 bp, Staphylococcus aureus
atgagtactaaaaatacacctaatgaaaatatcattgctgttttttgtgatgcaagtgtgattaagaataaaaacaagccaaagaatagtaaaaagattaggaagaaccataaattatctacatatttagaaaacgccaaattttttccattactagatgcctgcacaacaatcaaaatcacataa

SEQ ID NO: 1846 - DNA, 636 bp, Staphylococcus aureus
atgttaggaactgatgaattrtataaaktkttatatrrrcatmtsggaccdcaawwttggtggcctgctgataatgacattgaamtgatgttaggtgcaattttagttcaaaatactagatggcgaaatgcagaaattgcattgaatcarrttaaagaacayacgcattttaatccmaatcatatattagaactacctattgaaacgttacaatcattgatacrtycaagtggcttttataaaagtaaawcactgacgattaaaacattattaacatggttagcacgacatcatttcaattatcaagagattaatgagcgatataaaggtgrattaagaaaagaattattatctttgaaaggtattggaagtgaaacagcagatgtcttacttgtttatatattcggacgtattgaatttattccagatagctatacaagaaaaatatatrataaattaggatatgaaaacactaaaarttatgatcaattaaaaaaagtagtcacattaccaaatcattttacaaatcaagatgctaatgaatttcatgctctgttagatgtatttggtaaacattactttagagayaaagatataaagaattrtgattttttagaaccttactttaaaaagtaa

SEQ ID NO: 1847 - DNA, 330 bp, Staphylococcus aureus
atggctattgttgatgtggttgttattccagttggaacggaaggtccgagtgttagtaaatatatwgcagatattcagaaaaaacttcaagaatataaagcratgggtaaaattgattttcaattaacaccaatgaatactctaattgaaggtgaattaagcgatgtattagaagttgtgcaagtgatacatgaattaccttttgataaaggtttaagtagagtttgtacaaatatccgtattgatgaccgacgagacaaatctagaaaaatgaatgataaactaacatcagtacaaaaacatttagaaaatagtggtgaaaacctatga

SEQ ID NO: 1848 - DNA, 888 bp, Staphylococcus aureus
gtgaagaaatcgttaattgcttttattttgatttttatgcttgtyctgagtggctgtggtatgaaagataatgataaacaaggtagcraygataatggctcgtctaaatcgccgtaccatagaattgtttcgttaatgcctagtaatactgaaattttatatgaattaggattaggtaaatacatagttggtgtttcaacggttgatgattatccaaaagatgtgaaaragggtaagaaacaatttgatgctttgaatctaaataaagaggaacttttaaaggmaaagccagatctaattcttgcgcatgagtcgcaaaaggcaactgctaataaagtattgtcatcattagagaaacaaggcatcaaagtagtgtatgttaaagatgcacaatcaattgatgaaacwtacaacacatttaagcaaattgggaaattaacgcatcatgawaagcaggctgaacaacttgttgaggaaactaargataatatcgataaagtcatagattcaattcctgctcatcataaaaaatcaaaagtatttattgaggtttcatcaaagcctgaaatatatacagcaggraagcatacatttttyaatgatatgttagaaaaattagaagcccaaaatgtktatagtgacattaatggttggaaccctgtaacgaaggaaagtattattaaaaagaacccagatatattaatttcgacggaagctaagacaagatcagattatatggatatcatcaaaaaaagrggtggattcaataaaattaatgctgtcaagaatacacgtattgaagttgtaaatggtgatgaagtatcaagaccvggtccacgtattgatgaaggattaaaagaattaagagatgcaatttatagaaaataa

SEQ ID NO: 1849 - DNA, 987 bp, Staphylococcus aureus
atgacaaaaattattttagcagctgatgtaggcgggacgacttgtaaattaggtattttcacacctgaattagaacaattacataaatggtctattcacactgatacatctgatagtacaggwtatacacttttgaaaggaatttatgattcgtttgttgaaaaagtaaatgaaaataattataatttttcaaatgtacttggcgtaggtattggtgtwccaggtcctgttgactttgaaaaaggtacagtaaatggagcagtaaacttatattggccagaaaaagttaatgtacgtgagatttttgaacaattcgttgattgtccagtgtatgtagataatgatgctaacatagctgctttaggggagaaacacaaaggtgctggtgaaggtgccgatgatgttgttgccatcacacttggtacaggwctaggtggaggaattatttcaaatggtgaaatcgtacatggtcataatggctctggcgcagaaataggtcattttagagcagacttcgatcaacgatttaaatgtaattgtggtcgttctggatgtattgaaacagttgcttcagcgacaggygttgttaacttartyaacttctactatccgaagttgacgtttagatcttctatattagaattgattaaagaaaataaggttacagcaaaagctgtttttgatgcggcwaaagctggtgaccaattctgtattttcatwactgaaaaggttgcaaactatattggatatttatgtagtattattagtgttacaagtaatccgaaatatatcgttctaggtggaggaatgtctactgcaggacctattttaattgaaaatattaaaacagaatatcataatttaacatttgcacctgctcaatttgaaactgaaattgtacaagcgaaattaggtaatgatgcaggtattacaggagcagcaggattaatcaagacctatgtattagataaagagggggtaaaataa

SEQ ID NO: 1850 - DNA, 204 bp, Staphylococcus aureus
atgagtcgaaaaataaataacttttatgatgtacaacagttattgaaaagttacggatttctaatatattttaaaaatscagaagatatgtacgaaatgattcaacaggagatttcatcattgtatcaatatgaactgttatctaaggaagaatatttgaaatgtacgttgataattaatcagagaaggaatgaacagaaatga

SEQ ID NO: 1851 - DNA, 954 bp, Staphylococcus aureus
sctatgacatttaataaagtattattgagctggatagtcatattgattataacaactagcatatatctattttggcagttgggsgatatcaatgatgtatttaaccagtctattttaatcaatgttagattaccgagattattagaagcattgttgacaggtatgatattaacwgttgcaggycttatatttcaaacagttttaaataatgcattggcagatagctttacattaggattggcaagcggygctacatttggttcaggattagcattatttttaggwttaacaacgttatggattcctgtattttcaataacatttagtttrataacattaataactgtattagtcattacgtcggtattgagccaaggctatccagttagaatcttaatattaagtggtttaatgattggtgcrytattcaattcacttctatattttttgattttattaaaacctcgcaaattaaatacaattgccaattatytgtttggtggytttggtgatgcagaatactcaaatgtatcyataatagcaatcacatttatcattgcaytgtttggtatatttatcattcttaatcaactaaagttattgcaattaggagaactaaaaagtcagtcactaggcttaaatgttcaawtrattacatatatcgcgttatgtatagcttctatgataacggcgataaatgtcgcatatgttggcatmattggattcattggtatggtrataccrcaactcattagaaaatggcagtggaaacaatcattaggaagacaattggctttraatattgtaaytggaggacaaataatggttatggcagattttattggtagccatataytgtcaccmgtmcaaataccggcaagyattatyattgcattaattggtataccagtgttattttacatgctaatatctcagtcgaaacggttacactag

SEQ ID NO: 1852 - DNA, 720 bp, Staphylococcus aureus
atggatttgaatcaaattaaagcagttgtatttgatttagaaggtacgttgttggacagagttaaatctcgagagaaatttatcgaagagcaatatgaacgatttcatgactacttaattcatgttcaactggcagattttaaaaaagcatttattgagctagatgacgatgaagataatgataaacctgatttatataaagaaatcattaaacgtttccatgtagataggttaacttggaaagacttatttaaygattttgaaatgcatttttatcgttatgtatttccttattacgatactttgtatacactagaaaagctatcgcaaaaaggctttcaaattggtgttatcgcaaatggtaaatctaagattaaacaatttcgattacattcacttggtttgatgcatgttattaattatttatcaacatcagaaacagttggttttcgtaaaccacatcctaaaatttttgaagatatgattgatcaactaggggtattacctgagcaaattatgtatgtyggygatgatgcrttraatgatgtagctccagcacgagctatgggcatggttagtgtatggtataaacaagaagatgcwgaaattgaaccactcgaagaagaagttgattttacaattacaacagtggaagaattattaaccattttaccaataaaaawtgataataaaggagaaaattatggatctatttactag

SEQ ID NO: 1853 - DNA, 1464 bp, Staphylococcus aureus
atgaacatagacaaacaattttggaaaacaatatattattggattaggtacttgaattttgatattgtcagtagggaaaaagatgaccaagaaatttggttagcccataaaagaaaaaaacaagtagtcatttttaaacaacatatcaagtctacccaagaaatacgttttgacaaagcgaaagtgcttgaacacaaagatgaaatagcaaattttatttctttcgaaccacaaagttttgaattttattattttacagaatcggaattttcagaagaacaattaaatgaagtttcgmcaattagaattaaattcaatgttataagacacacaaaagatttgataaagcatatgccgaatatatttttggctagacttatttcagaagataatgataaaaagacatatatgttctataaacgcaaagtattaaccgataactttttagataaatatatgcagaaattttcaccggcaacatacacaataatatttgtaaatgtcttaatatggttatgtatgattttatatttaaataatttttcggatgtaaaattattagatgttggcgggttagtgcattttaatgtcgtacatggtgartggtatcgaattgttacatcgatgtttttacattttagttttgaacatatacttatgaatatgctttcattatttatttttggtaaaatagtcgaagcaattattggttcatggmggatgttaactgtatactttattgcagggytgtttggaaactttgtatcactatcatttaatacgactacaatttcagttggggctagtggtgctatattyggtctgatyggatcaatttttgcgatgatgtatgtttcaaaaacatttaacaaaaaaatgttaggacagttattaattgcattagtgatattagttggtgtttctctgtttatgtcaaatataaatattgtggcgcatattggaggmttcattggtggtttattaataactttaattggctattactatwaagtgaatcgtaatattttttggattttactaatyggtatgcttgttatatttattgcacttcaaattagaatttttacaattaaagaagataatatttataataaattgatcaaagatgatatgactagtggtaattatgataatgctcaaaatattgygaagcagacaataaataaaaattatgccgatgatcaaacatattatttaagtggtatgattatggctactatcaattctaagtcygaaggtatgacagaatgggagcgaggacttagaatgtttcctaaatcaggtttattaaattttgagttagcgatagcaaatcgttcattaaatgatgatgaaaaagcattaaaatatgtgcgtaaagcattaaatgcagaccctaaaaatrcagattatattaacttagaaaaagagttgactaaatcaaatgagtcgaaaaataaataa

SEQ ID NO: 1854 - DNA, 2670 bp, Staphylococcus aureus
atggctgaattacctcaatcaagaataaatgaacgaaatattaccagtgaaatgcgtgaatcatttttagattatgcgatgagygttatcgttgctcgtgcattgccagatgttcgtgacggtttaaaaccagtacatcgtcgtatactatatggattaaatgaacaaggtatgacaccggataaatcatataaaaaatcagcacgtatcgttggtgacgtaatgggtaaatatcaccctcatggtgactyatctatytatgaagcaatggtacgtatggctcaagatttcagttatcgttatccgctkgttgatggccaaggtaactttggttcaatggatggagatggcgcagcagcaatgcgttatactgaagcrcgtatgactaaaatcacacttgaactgttacgtgatattaataaagatacaatagattttatcgataactatgatggtaatgaaagagagccgtcagtcttacctgctcgattccctaayttrttagccaatggwgcatcaggtatmgcggtaggtatggcaacgaatattccaccacataacttaacagaattratcaatggtgtacttagcttaagtaagaaycctgatatttcaattgctgagttaatggargatattgaaggtcctgatttcccwactgctggacttattttaggtaagagtggtattagacgygcatatgaaacaggtcgtggttcaattcaaatgcgttctcgtgcagttattgaagaacgtggaggcggacgtcaacgtattgttgtcactgaaattcctttccaagtgaataaggctcgtatgattgaaaaaattgcagarctygttcgtgacaagaaaattgacggtatyactgatttacgtgatgaaacaagtttacgtactggtgtgcgtgtcgttattgatgtgcgtaaggatgcmaatgctagtgtcattttaaataacttatacaaacaaacrccwcttcaaacatcatttggtgtgaatatgattgcwctwgtraatggtagaccgaagctkattaatttaaaagaagcgttrgtacattatttagagcatcaaaagacagttgttagaagacgtacgcaatayaacttacgtaaagctaaagatcgtgcccayattttagaaggrttacgtatygcrytwgaycatatcgatgaaattatttcaacgattcgtgartcagawacagataaagtygcaatgraaagyttgcaacaacgcttcaaactttctgaaaaacaagctcaagctattttagacatgcgtttaagacgtctaacaggtttagagagaracaaaattgaagctgaatataatgagttattaaattatattagtgaattagaarcmatcttagctgatgaagaagtrttaytacarttagttagagatgaattracwgaaattmgagatcgyttcggtgatgakcgtcgtacwgaaatycaattaggtggatttgaarayttagargaygargayytmattccagaagaacaaatwgtaattacwytragccataataactayattaaacgtttgccggtatctacatatcgtgctcaaaaccgtggtggtcgtggtgttcaaggtatgaayacattggaagaagattttgtcagtcaattggtaactttaagtacacatgaccatgtattgttctttactaacaaaggtcgtgtatacaaactwaaaggttaygaagtgcctgagttatcaagacagtctaaaggtattcctgtagtgaatgctattgaacttgraaatgatgaartcattagtacaatgattgctgttaaagaccttgaaagtgaagayaacttcttagtgtttgcaactaaacgtggtgtygttaaacgttcagcattaagtaacttctcaagaataaatagaaatggtaagattgcgatttcgttcagagaagatgatgagttaattgcagttcgyttaacaagtggtcaagaagatatcttgattggtacatcacatgcatcattaattcgattccctgaatcaacattacgtcctttaggccgtacagcaacrggtgtgaaaggtattacacttcgtgaaggygaygaagttgtagggcttgatgtwgctcaygmaaayagtgtwgatgaagtwttagtwgttactgaaaatggttatggtaaacgtacgccagttaatgactatcgyttatcaaaycgtggtggtaaaggtattaaracwgcwacgattactgarcgtaatggtaatgttgtwtgtatyacwacwgtwactggtgaagaagatttaatgattgttackaatgcmggtgtcattattcgactagatgttgcagatatttctcaaaatggtcgtgcagcacaaggtgttcgcttaattcgcttaggygatgatcaatttgtttcaacggttgctaaagtaaaagargatgcagahgawgwaacgaatgaagatgarcaatctacttcaactgtatctgaagatggtacwgarcaacaacgtgaagcggttgtaaatgatgaaacaccaggaaatgcaattcatactgaagtgattgawtcagaagwaamtgatgamgatggacgtattgaagtaagacaagatttcatggaycgtgttgaagaagayatacaacaatcatyagatgawgawkaagaataa

SEQ ID NO: 1855 - DNA, 1356 bp, Staphylococcus aureus
atgaagaagaaactaacatttaaagaaaacatgtttatwggttctatgttatttggtttattctttggtgccggcaaycttatcttcccaatacacttgggtcaagctgctggttctaacgtttttatcgctaacttaggatttttaattacagcaattggcttaccatttctaggtatcattgctattggyatttcaaagacatctggtttatttgaaattgcatcgcgtgttaataaaacatatgcttayattttcacgattgccttatatctagttatcggaccatttttcgccttacctagactggcaackacatcatttgaaattgcattttcgccatttttatcaccaaagcaaatcactttatatttatttattttyagcttcgtcttctttgtgattgcatggttttttgcgagaaagccatcaagaattttagaatatatcggtaaatttttaaatccggtattcttagtattattagcaattattttattatttgcttttatccatccattaggtggcatatctgatgcacctattagtaaacaatatcaatcamaygccttatttaacggctttttagatggatacaataccttagatgcgctagcgtcattggcatttggtatyatcattgttgcaacgattaaaaagttaggtatcgaaaatccaactgatatcgctaaagaaacaattaagtctggtactatcagtatcattatgatggggatyatttataccctactagcaatcatgggtacattaagtattggtmatttcaaacttagtgaaaatggtggtattgccttagcgcaaattackcaatactacttaggtaactacggtatcgtcytgttrtcactyatcgttatggttgcttgtttaaaaacagcyatcggtttrattacggcattttcagaaacattygaacaccttttccctaaaatgaattacctagcgattgcaacagttgtragctttatytcrttcttattcgcgaatgttggyttaactaarattattatgtactcagtcccagtgttaatgttcttatatccattagcaattgccytgattgtactaacattatttagyagcaaattccatcattcaaaamttatttatcaatgtaccattttctttacaatgattgctgcattagtagatggattaaaagctagtccagagttcatttcaagcacatcattctcacaaactttgattaatttcagccaaaaatatttaccattatcagacattggtatgggctgggttgttctcagtttgattggtttcattatcggcttcattatttataaaattaagcatcgtaaaattccayaagcataa

SEQ ID NO: 1856 - DNA, 801 bp, Staphylococcus aureus
atggatctatttactagaaaagatggaacatcgatwcattacagtacattaggtgaaggctatcctatcgtattgattcatactgtacttgataattattctgtgtttaataaattagcagcasaattagcaaaatcatttcaagttgtgttaattgatttacgtggacatggctattctgataaacctcgtcacattgaaataaaagatttttctgawgayattgttgaattacttaaatatytatayattgaagaagttgcatttgtatgccatgaaatgggtggaatcattggtgcggatatttcagtacgttatcctgaatttacatcatcacttaygttggtaaatccaacatctattgaaggtgaattaccggaagaacgtttatttagaaaatatgcccatattattcgaaactgggatcctgaaaaacaagataaatttttaaataagcgtaagtattatcgtccgagaaaaatgaatcgattcctyaaacatgtcgtagatacaaatgaaatatcaactaaagaagaaattcaagcagttaaagaggtattcaaaaacgctgatatttctcaaacttatagaaatgtcgtagtaccgacaaaaattattgcaggagaattcggtgaaagaacaacaagattrgaagctaaagaagtagctgatttaatccaaaatgcggactttgaagtatatcaagaatcaagtgcattcccatttgttgaagagcaagaaagattcgtygaagatayagctkcatttatcaacaaacatcacgatgaaaagcatgtttaa

SEQ ID NO: 1857 - DNA, 594 bp, Staphylococcus aureus
atgacatgtattgttattaacgatataatagaattgaataaagtgggtgataatgtgactaaaaatgagattagaaaatayattttacataaaatgaagamttttaataaagctgaaaagcgaaaagcagacacatggttaagaaatcaattttttgcaactgaagaatacaaagaagcaaacgcaattgcgctagttctttcttttaatcatgaagtagatactttttctattattgaacaagccttaatggatcataaacgtatttttgtrccgaaaatggattatttaaatcatcaaatgacttttaaagaratatttaatctmaaagatattgatgtmgataakaaggggatttactatccaacttcaaaaggtgaaacaacgaataacctagatttaattgttgttcctggtgttggatttcaagacgatggatatagaattgggtatggtggtggctattaygacaggtttttagctaattatcagacaaagacaataagcttattatacgattttcaaataacatcatttgaaccggaatcattcgatcaaccagtcgataaattgattatatatcaakcagcatag

SEQ ID NO: 1858 - DNA, 135 bp, Staphylococcus aureus
gtgaatcgtttttttaaagtaaagagaatttcatatattactggtacaactacaagtgttaataaagttgatgaaattaaaccaccaataactgtagcrgctaatcctttcgaaataagaatcgagctatcttga

SEQ ID NO: 1859 - DNA, 507 bp, Staphylococcus aureus
atgaaaaagctactaacggcaagtataattgcatgttctgttgtaatgggagtaggcwtagygaacactagtgccgaagcagcaagtggcaactctattgatactgttaaacaattaattaagggtgaycagtcattagaaaatgtgaaaattggcgaatctattaaagatgttttaactaagtacaaaaatccdatgtattcttacaatgaagatggaactgaacattattacgaattccatactaaaaaaggtatgttattagtaactactgatggtaagaaaaacaatggtaaagtaactcatatttcaatgatgtataatgatgctaatggtccaacatatcaagctgttaaaaattatgttggcaaagcagtaacacatacggaatatagcaaagttgctggtaattttggatatattgaaaaaggcaaaacgacttatcaatttgcctcagcaccaaaagataaaaacataaaattatatcgtattgatttggaaaaataa

SEQ ID NO: 1860 - DNA, 150 bp, Staphylococcus aureus
atgcgcgtaaacgtaactttagcttgtacggaatgtggtgacagaaactacattacaactaagaacaaaagaaataatccagaacgtgttgaaatgaagaaattctgttcacgtgaaaacaaacaaactttacaccgtgaaacaaaataa

SEQ ID NO: 1861 - DNA, 717 bp, Staphylococcus aureus
atgcgtattaacgataaaattttactagaaaatatagaagattactttaatcataaaggtttatcaccgcatttgattgatgatattaaagagaaagtaattactgatataaaaaattctgaaaagaaagatcaagattatattgaatataaaagaaaatctccagcacaaatcatattaatgattcaaaggaatttrtttgctttacaaatgaatccagttattttctttattataaayttcattctcatatcctatttatatgataaacagtatgttcagtttcaagctattactggaatgagtctattttattgtttagtgatttttccaatgactattgttgtatacctaagggtgtcwcaaaagaattacttgcgtagtaataaaatagaaatgrttatgggtacaattatcgctatcatatccytgttattaattatattacaagcatttaatattacttggggcgttataccaattacaaattttggacatcaatttttctttttcattggtattattttagtaattgccggcatattttataagcgacttgagttttcgggaatcggsttattattttgtcaaaaaaccgtmgatgcaatgattcataatccacaatcagcccagaytttttcattaattatatggatattattagtagttctagttatatatttcacaattagattatcttcacgtacaagattataa

SEQ ID NO: 1862 - DNA, 2076 bp, Staphylococcus aureus
ttgttaaaaagactaaaagaaaaatcaaatgatgaaatcgttcaaaatacaattaacaagagaattaactttatatttggtgtgattgtatttatttttgcagtactagtactacgtttaggttatttacaaatcgcacaaggctcacattataaacaaattataaaaaatgatgaaaacattacagtgaatgagtctgtgccaagaggtcgtattttagacagaaatgggaaagttttagttgataatgcttctaaaatggctattacatatactaggggtcgaaaaacaacacaatcggaaatgttggatacggctgaaaagttatcaaagctaatcaagatggatactaagaarattacagaacgtgataaraaagatttctggattcagttgcatcctaaaaaagcaaaagcaatgatgacaaaagaacaagctatgttagcagatggaagtattaaacaagatcaatatgataaacaactgttatcgaaaatcrgaaaatcacaattagatgaattgtcttctaaagatttacaagttttagcyatttttcgagagatgaatgcaggaacagttttagatccacaaatgataaaaaatgaagatgtcagtgaaaaagagtatgcagcagtttctcagcaactttccaaattaccaggtgttaacacgtctatggattgggatagaaaatayccatatggcgayactttaagaggtatattcggagatgtatcgacacctgctgaaggtattccmaaagaattgacagaacattacttatccaaaggatattcacgcaatgatcgtgttggaaaatcttacctagaatatcaatatgaagatgtattgcgtggtaagaagaaagaaatgaaatacacaacggacaaatctggtaaagttacatcttcagaagtgttaaatcctggygctcgcggtcaagatttgaaattracgatcgatatagatcttcaaaaagaagtagaagcattattagataaacaaattaagaagcttcgcagycaaggtgcmaaagatatggataatgcwatgatggttgtacaaaatcctaaaaatggagacattcttgcgcttgccggaaagcagattaataagagtggtaaaatgactgattatgacattggtacgtttacttctcaatttgcrgttggatcttctgtaaaaggtggaacattattagcyggttatcagaataaagctatcaaagttggagaaacaatggtcgatgaaccattacatttccaaggtggtttgacaaaacgatcatacttyaataaaaacgggcatgtawctattaatgataagcaagctttgatgcattcatcaaacgtatatatgtttaaaacagcattaaaattagcgggagacccttattattctggtatggctttaccwtcagayataagttcacctgcccaaaagctwagaagaggattraatcaagtaggcttaggtgtgaaaacaggkatagatttaccaaatgaaacaaraggtcaaatcgaaccattaacaaataatccaggtaattatctagatttatcaattggtcaatatgatacctatacaccattacaattatcacaatatgtttcaactatagcgaatgatggttatagaatacarccacacattggattaacgattcatgaatcaactaataaagatgakgttggtccactcaagaagaaaattaatggcactgtcttgaacaaggttaataatactgaaaargaaatcaaacaaattcaagaaggattcaaaatggcatttaatgataaagatggtactggatatgttagttttaaagatacagtagtrcctactgctggtaaaackggtaccgcwgaagtgttccaaaacggagagccaagagttaactctacttatataggatacgygccaattgatgatccaaaattagcgttttcaattgtatatacaaatcagcctgtaccaccaccatggttaacaggtggagacttaggtagagatgtaattaactactactttaagcagttaggtaaagaygataaaaataaagacaaagacaaataa

SEQ ID NO: 1863 - DNA, 789 bp, Staphylococcus aureus
atgaataaagtcacaattaatcctcaaatccaattaacttatcaaattgaaggtaaaggggatcctataatattacttcatggattggatggtaatttagctggatttgaagatttgcaacatcaactagcatcatcatataaagtamttacytacgatttaagaggtcatggcaagtcttctaaaagtgaatcatacgatttaaacgatcacgttgaggatttaaaaattytaatggagaagttaaatattcatgaggcacatattctaggacatgatttaggtggggtagttgctaagttatttacagataaatatgcttatcgtgtaaaatcattaactaccattgcatcgaagaaagatgacttaatacacagctttactcaattgttaatwcaatatcaagatgatatagcgggttttaataagtctgaagcgtatattcttttattttctaaattgtttagaaatcaagagaagacgatgaaatggtatcaaaaacaaagaatatatagcattaagtctgaggatgatagtgcggtggcaattcgttcattaattttgcataaagatgaacctatgtatttaaaaaaacgtacatgtgtacctactttgttaattaatggggaacatgatcctttgattaaagataagaatcattttaaattrgaagcgcattttttaaatgtwacgaaaaaaatcttcgaacattcaggacatgcaccgcatattgaagaaccagaagcatttmtrarttattatytaaawtttttaaaaagcgtatcataa

SEQ ID NO: 1864 - DNA, 600 bp, Staphylococcus aureus
atggcttttgaattaccaaaattaccatacgcatttgatgcattagaaccacattttgacaaagaaactatggaaattcaycatgacagacatcataacacktatgttacgaaattaaatgctgcagtagaaggtacagatttagaatctaaatctattgaagaaattgttgctaatttagacagtgtaccagctaacatccaaactgctgtacgtaataatggcggtggacatttaaaccattcattattctgggagttactttcaccaaactcagaagaaaaaggtactgtagtagaaaaaattaaagaacaatggggttctttagaagaatttaaaaaagaatttgctgacaaagcagctgcacgctttggttcaggttgggcttggttagtcgtaaacaatggccagttagaaattgtgactacaccaaaccaagataatccattaactgagggtaaaacacctattttaggtttagacgtatgggaacacgcttattacctaaaatatcaaaacaaacgccctgactacattggcgcattttggaatgtagttaactgggaaaaagttgacgaattatataatgcaacaaaataa

SEQ ID NO: 1865 - DNA, 561 bp, Staphylococcus aureus
atgaataaagtagaagcgattaaatttaatgatgatattgttaaaatgtatgaagcgctcaagataaaatctgaacgtgactatttattctttaagttagctatacatagtggattgaaagtatcagaattattaacaattacagtctctcaagttaagagactaattgaaaagtgtacgttatcagaaatgtgtaaagcacattttcattcgttgattaaaattaggttaccagaaacattatcgaaagaactacttcaatatatagaggacaggagtctttcgaatgaagacgttctttttcaatcactacgaacaaatcaagtattatctagacagcaagcatatcgaataattcaccaagcatcaattgaagctggtatagataatgtaggactaacgacattgcgtaagacatttgcatatcatgcttatcaaaaaggtatacytataccagtcattcaaaagtatttagggcatcaatctgctattgaaacactaaattttatcggtttagaaaatgagtgtgaacatagtatttatatttcattacaattatag

SEQ ID NO: 1866 - DNA, 411 bp, Staphylococcus aureus
atgaatacaaatgatgctattaaaattttaaaagagaacggtttaaaatatacagataaacgtaaagatatgttagatatttttgtcgaagaagataagtatataaacgcaaagtatatacarcaagttatggatgaaaattatcctggaatttcattcgacacaatatatagaaacctgcacttatttaaagatttaggrattattgaaaatacagaacttgatggtgaaatgaagtttagaatygcttgtacmaaycatcatcatcatcattttatctgtgaaaagtgtggagatacaaaggtaatagattattgtccaatagatcagataaarttatcactacctggtgttaatattcacaaacacaaacttgaagtttatggtgtatgtgagtcttgccaagattaa

SEQ ID NO: 1867 - DNA, 873 bp, Staphylococcus aureus
gtgtcacaattgatagatgcattattgaattttgattttatgaggtactctttaattagtggtatcttgataggttttattgcgcctctaatcggtgcttttatcgttgttagacgactatcacttatagctgatgctctaagycatgtaactttaggtggtatatcyttcggtatgtttttacttactattatgccaacactagtatttattaatccaatgtggtttggaatcttattcgcaatagtaggtgcgctwctaattgaaaaattaagaacgtcatacactgcttaccaagaaattgctattccaattataatgagtgctggtatcgccttgagtgcaatcttcatttcattagctgatgggttcaatcaaraaattgttggattgctatttggctcaataagcgcagtgaatataagtgatttaacaacgattattgtcattgccatcatagttgttctgtttattacattgttttataaagaattatttatattgtcatttgatgaggaatatagtaaagtcattggcattcmtaaatggattcaatttttatttattgttattgtagcgatggttatttctgcctcaatgcgtgttgtagggatactgttagtaagtgckttaatcacgttaccaattgcaataagtatgcgaataacaaaaagttttaagcaattgatattactaagtgtatttttaggtgaattatcmgtaatattaggcttagtcctagctttctatatggacatttctccgggtggtgtaattgtagttctactwgttattttacttatgattacaatggcttatcagaaaatgcgaatgaagtttaaaaagggagctaatatcaatgaatacaaatga

SEQ ID NO: 1868 - DNA, 141 bp, Staphylococcus aureus
atgacagaaataaaatcaataggtactttaattgtagttccaacattttttatcgttttaaatccaattaaaaatgtmacagctgcaattggagcgacaacatggaaaagcgatctccagttwaaatattcaacaagrtaa

SEQ ID NO: 1869 - DNA, 786 bp, Staphylococcus aureus
atgcgaggtgagaatacgatgacaccagtctttgaattgaaaaatgtcaattactactatgatcataaaaaagtgttagaaaatataaacattaaaataaataaaggtgaatttttagcrattgttggaccaaatggtgctggtaaatcaacattattgaagttgattctaggrttattacctttacaaagtggtgagatttttgttgraggtattgattttaaaaataagaaaacatcmattaaattaagctatgtatcacaaaaagcaaatgcctttaattcaggtttcccagcaagtgttaaagaagttgttttaagcggattaacaaagacaaaacgtcttttccaaacatttaatagcaaagataatgaaaaagtgattaaagtactagaaagactgaatataagtgatttaattcataaaaatatagcagaattatcaggtggtcaacaacaacgtgtaatgattgcycgagcattgatttcagaacctgcagtattagtacttgatgaaccracgaatggtattgatgcaaaacatgtaagtgaattttataatactttagatcaattaaaacaagaaggtatcacyattatcttagttactcatgatatyggtgttgtagcagatactgctactgaagtagcatgtttaaataagcatttgcatttccatggtacaactgatgagtttaaatcacttgatgaagttgaaatttcaaaaatttatggacatcctgtacgttttgtcgatcatcagcataatcgagaatgttgtaattaa

SEQ ID NO: 1870 - DNA, 891 bp, Staphylococcus aureus
atgttattaggatcacatgtttcaatgagtggtaaaaagatgttagaaggttctgctatagaagcgyatgaatatggtgaaacaacatttatgatttatactggtgcacctcaaaacacgcgccgtaaaagtattgaagatttaaatataactaaaggtcatgaagtgatggaaaaatatggyttatctaatattgttgttcatgcaccatacatcattaatattgcaaatacaaccaaaccagaaacgtttaatcttggtgtagatttcttgcaacaagaaattgaaagaacgcaagctataggsgctaaagatattgtattacatccaggtgcrcatgttggagctggtgttgatgccggaattaataagattattgaaggattaaatgaagttttaacgaatgacaataatgtacgtattgcgcttgaaacgatggcaggtaaaggtacagagattggtcgctcrtttgaagagttagcacgtattattgatggagttcataataacgaacgtttatcagtatgttttgatacatgtcatacgcatgatgctggatataatgtkaaagaggactttgatggcgtattaaatgaatttgataaaatyattggagtcgacagratyaaagttgttcatgtcaatgattctaaaaatgaccgtggcgctcaaaaagaccgacatgaaaatattggcttcggttacattggttttgatgcattaaattacattgtgcatcatgatagttttaaagatattccgaaaatcttagaaacaccttatgttggtgaagataagaaaaataaaaaaccgccatataaacttgaaattgaaatgttaaaacaacagcawtttgacccagaattaaaaaataaggttatgcaacaataa

SEQ ID NO: 1871 - DNA, 117 bp, Staphylococcus aureus
atgataaatataagtaatgtccataataatacaggccttgatgaaaaacggttcgttaatttaacmagaataggtccacatatcgcaaatgttaaagcgtacattgtcactaattga

SEQ ID NO: 1872 - DNA, 1347 bp, Staphylococcus aureus
atggcaaaacatccattcgaacaatttaatctagaatctagtttaattgacgctgtgaaagaccttaattttgaaaaaccaactgaaattcagaatcgaattattccaagaatactaaagagaacaaatttaattggtcaatctcaaacgggtacagggaaatctcatgcatttttattaccattaatgcagttaattgatagtgaaataaaagaaccacaagcaatcgtagttgcaccaacaagagaacttgcacaacaactatacgatgcagcgaaccatttaagccaatttaaagctggtgtttcagttaaagtttttattggtggtacagatatagagaaagatagacaacgttgtaatgcacaaccwcaattgattataggyacccctactagaattaatgayttagctaaaacgggacatttacatgtgcacttagcatcatatttagttattgatgaagcggatcttatgattgacttaggattaattgaagatgtagattacatygctgcaagattggaagataatgcaaatattgcggtgtttagtgctacaatyccasaacagttacaaccatttttaaataaatatttaagtcatccagaatatgtagctgtcgacagtaaaaaacaaaataaaaagaacatcgaattctwtttaatacctactaaaggtgcagctaaagttgaaaaractttaaatttaattgatatactaaatccatacttatgtattrttttctgtaatagtagagataaygcaaatgatttagcacgttcactaaatgaagctggtattaaagttggtatgattcatggtggyttaacgccacgtgaacgtaaacaacaaatgaaacgtatacgtaatttagaattccaatacgttatwgccagcgatttagcatctcgtggtattgatattgaaggtgttagtcatgtcatcaattttgatgtgccaaatgatattgacttctttacrcatagagtyggmcgaactggycgtgggaattataaaggtgtagcaattacgctttatagtcctgatgaagaacacaatatttcattaatagaagatcgcggttttgtwttcaatactgttgatattaaagatggtgagttaaaagaagttaaagcgcacaatcagcgtcaagcaagaatgcgcaaagatgaccatttaactaatcaagtgaagracaaagttcgaagtaaaattaaaaacaaagttaaaccaggttataagaagaaatttaaacaagaagttgaaaaaatgaaacgtcaagagcgtaarcaatttagtaagcagcaaaatagacaaaaacgtaagcaaaacaaaaaaggttag

SEQ ID NO: 1873 - DNA, 1497 bp, Staphylococcus aureus
atgctaagtaayttrttratwttaccaatgttattaccattcctttgtgccttaatccttgtatttttaaaaaataatgaycgtatttctaaatatttatacttaggtacaatgactatcaccacaattatttcattaatgctattaatttatgttcagcgkcaycgtccaattacrytrgaytttggwggwtggwcwgcrccmtttggwatacagtttttaggagattckttaagtttratyatggttacaaccgcttcgtttgtgattactttaattatggcatayggatttgggcgtggcgaacataaagcaaatcgttatcayttrccwtcrttyatattatttttaagtgttggygtgataggctcttttctaacatcagatttatttaatttataygtcatgtttgaaattatgttactwgcgtcatttgtactcattacacttggacaatctgtagaacaattacgtgcygcaattatttatgttgtcttgaatattattggttcatggctattcttattaggtataggtttactttataaaacagtaggtacattaaacttttcacatattgcaatgcgtttgaatgacatgggagataatcgcactgttacaatgatttcattaatcttcttagtcgcwtttagtgcgaargcagcgctggtcctttttatgtggctacccaaagcmtacgcwgtgttaaatactgagcttgcagcattatttgcagcgttaatgaccaaagtrggsgcytatgcattrattcgmttcttyacwttaytatttgaycaacataatgrtctyatacatccattgctagyaacwatggcwgctataactatggtcatcggcgctatwggtgtcattgcttataaagatattaaaaagattgcagcttaccaagtcataatctcaataggatttatcattttaggtttaggaacaaacacgtttgcaggtattaatggtgcaatattttatttrgtaaatgayattgttgtaaaaacattgctattytttattattggtagtttagtttayattacwggytatcgacaatatcaatatttraatggyttagcwaaaaaagaaccwttmtttggwgttgcgtttattataatgatttttgctattggcggcgtgccyccatttagtggctttccggggaaagtacttattttccaaggtgcattgcaaaatggcaaytatattggactagcgttaatgattattactagtctaattgcwatgtacagyttrtttagratayttttytatatgtattttggagataaagatggsgargaagttmattttaagaaaatcccrcwatatcgwaaargwattttaagtattttagtagttgtggttatcgcaatcggrattgcwgcrcctgtkstgttaaawrtwacwartgatgcaacwgarytkaayacgarygatcaattatatcaaaarcttgtwaatycrcatttgaaaggagaggamtaa

SEQ ID NO: 1874 - DNA, 1101 bp, Staphylococcus aureus
atgaaaatagctgatttaatgacattgttagatcatcatgtgccatttagwactgctgaatcttgggataatgtaggattgttaataggtgatgragatgttgaagttactggtgttttaacagcattagactgtacgttggaagtagtaaatgaagcaatcgaaaaaggttataatactattattagtcatcatcctctaatctttaaaggygtaacatcattaaaagctaatggttatggtttgatyattagaaaactaattcaacatgacattaatttaatagcgatgcatacaaatttagatgtaaatcckyatggtgtcaatatgatgttggcgaaggcgatgggwttgaagaacatttcaataataaataatcaacaagatgtatactataaagttcaaacatatatacctaaggataatgttggaccatttaaagataagcttagtgaaaatggattagcrcaagaaggtaattatgaatattgtttctttgaaagtgaaggaagagggcaattcaaaccagttggtgaagctaatccaacaataggacaaattgataaaattgaakatgtagatgaagttaaaattgaatttatgatagatgcatrtcaaaagtcawgggctgagcaattaattaaacaataccatccatatgaaacaccggtatttgattttattgagataaaacaaacatcyctttatggacttggcgttatggcagaagtggataatcaaatgacattggaagatttcgcagctratattaaatctaaattaaatatcccaagtgtccgttttgttggtgagtctaatcagaaaattaaacgtattgcaattattggtggttcaggtattggatatgaatatcaagctgtycaacaaggcgcagatgtctttgttacaggtgatattaaacatcatgatgccttagatgctaaaattcatggtgtgaayttaattgatattaatcattacagcgaatatgtgatgaaagaaggtttaaaarcgttactaatgaatyggttcaatayagaaaaaataaatwtagatgttgaagcatctacaattaatacagatccatttsaatatatttaa

SEQ ID NO: 1875 - DNA, 771 bp, Staphylococcus aureus
atgataaaacgtgtaaataaattagtgcttggtattagtcttctgtttttagtcattagtatcactgctggttgtggcatgggtaaagaagcggaaataaagaaaagttttgaaaaaacattgagtatgtatccgattaaaaatctagaggatttatacgataaagaaggatatcgtgatgatcaatttgataaaaatgataagggaacatggattgtaaattctcaaatggcaattcaaaataaaggagaagctctaaaaataaaaggcatgcttttgaagatagatagaaatacaagaagtgcaaaaggattttactatactaatgaaataaagacggagaaatacgaagtagctcaggataatcaaaaaaaatatccagttaaaatgattaataataaattcatttctactgaggaagttaaagaagaaaacataaaaaaagaaatcgaaaactttaagttttttgcgcaatatagcaattttaaagatttaatgaattataaagatggagatatatcatataatccagaggtgccgagttattcagctcaatatcaattaactaatgatgattataatgtaaaacaattacgtaaaagatatgacataccaacaaataaagcgccgaagctgttgttgaaaggtacagggaatttaaaaggttcatcagttggatataaaaaaattgaatttacttttttagagaataaaaatgaaaatatttactttactgatagtctacatcttraaccgagcgaggataaataa

SEQ ID NO: 1876 - DNA, 483 bp, Staphylococcus aureus
atgaatcaaatwgttttaaatattatcattgcattcttatgggtwttatttcaagatgaagatcattttaaattctcgactttcttttctggatatctaattggtttaattgtcatttatatattacacaggtttttcagcgatgatttttatgttagaaaaatwtgggtagctattaaatttttaggtgtttatttatatcaattaataacatctagcattagcacgattaattatattctttttaaaacaaaagatatgaaccctggattactttcwtatgaaacaagactaacaagtgaytggkcaataacatttttaacaattttaattattataactccagggtctacagtaatacgaatttctcaagactcwaaaaagttttttattcatagtatcgacgtgtcwgaaaaagaaaaagatagtttgttaagaagtattaagcattatgaagacttaatattggaggtgtcgcgatga

SEQ ID NO: 1877 - DNA, 678 bp, Staphylococcus aureus
atgatttcgttaaataaccgattaacgacggtaagtygwtttttaaaacaaggtacaatcgcggatattggctcagatcatgcttatttgccaatctatgcaatwcaaaaccatttatgcgaatgcggtattgctggagaagttattcaaggcccttttcaagctgctgtraaaaatgtagctgcaaaycawttagtagawagaattgatgtacgtttaggggatggcttaagtgttattcawcctgaggaygtaatcgataatatcacaatwtgtggtatgggcggaccacttatygctaaaattttaaaagatgggcaagataagttaagtcaacatccaaggttgattttacaaagtaatatmcaaactgaaaatttaagacaaacattacaacaattgaattatgaaataattgatgaaataataatggaagaaaaaggccatatttatgaaattgttgtagcagaayattctacrsaattaatagagctatcatctgatgrattgaaattcggaccaaaattgctgaayaacaaaaatgaatattttataaaaaaatggcaaagagagttagaagcactttatcatattaaatcgaaactcaatactgaacaacatcrtcaacgtttagctcaaattaatgacgaaattgctgtaattgaaagggtgttatag

SEQ ID NO: 1878 - DNA, 303 bp, Staphylococcus aureus
atgatacaaacaataacacatattatgattattagttcactcattatttttggaattgcattaatcatctgtttatttagattaatcaagggacctacaacagcagatcgtgtcgttacatttgatacaacaagtgctgtcgtaatgtcaattgtgggtgtgttaagtgtacttatgggcaccgtttctttcttagattcaatcatgctcattgccattatatcttttgtaagttctgtttcaatatcacgctttattggtggggggcatgtgtttaatggaaataacaaaagaaatctttag

SEQ ID NO: 1879 - DNA, 1107 bp, Staphylococcus aureus
atgtctgataacacagttaaaattaaaaaacaaacaattgatccgacattaacattagragatgttaagaagcaattaattgaaaarggtaaaaaagagggtcatttaagtcatgaagaaattgctgaaaaacttcagaatttygatatcgactctgatcaaatggatgatttctttgatcaattaaatgataatgatatttcactagttaatgaaaaagatagttcagatactgacgagaaactgaatccaagtgatcttagtgcccctccaggtgttaaaataaatgacccagttcgtatgtaccttaaagaaattgggcgtgttaacttattaagtgcacaagaagaaatcgaattagccaaacgtattgaacaaggtgatgaagtagcaaaatcaagactwgcagaagcgaacttacgtttagttgtaagtattgctaaaagatacgtaggtcgtggtatgttattccttgatttaatccaagaaggtaatatgggtcttattaaagctgttgaaaaatttgactttaacaaaggatttaagttttcaacatatgcaacatggtggattagacaagcaatcactcgtgcaattgctsaccaagcacgtacrattcgtatccctgtgcatatggtagaaacaattaataaattaattcgtgttcaacgtcaattattacaggacttaggtcgagatccagcaccagaagaaattggtgaagaaatggatttaccagcagaaaaagttcgtgaarttttaaaaattgcgcaagaacctgtttcattagaaacrccaattggtgaagaagatgatagtcatttaggrgactttattgaggatcaggaagcacaaagtccttcagatcatgctgcttatgaattattaaaagagcaattagaagatgtgcttgatacattaactgatagagaagaaaatgtattacgattaagatttggtcttgatgacggcagaacaagaacacttgaagaagttggtaaagttttcggtgttacacgtgaacgtattcgacaaatygaagcaaaagcacttagaaaattaagacatccaagtcgtagtaaacgtttgaaagactttatggattaa

SEQ ID NO: 1880 - DNA, 438 bp, Staphylococcus aureus
atggaaataacaaaagaaatctttagtcttattgctgctgtgatgttgttgttaggtagttttattgctcttattagtgcaataggtatcgtgaaattccaagatgttttcttaagaagtcaygctgcracaaaaagttcractttatccgtgttattaactttaatyggtgtattaatttattttattgtgaatacaggatttttcagtgtgcgtttattactgtcacttgtttttattaatttaacttcaccagtcggcatgcacttagtcgctcgcgctgcttatcgcaacggcgcttatatgtatcgaaaaaatgatgmtcacacacatgcatcaatattattaagttcaaatgaayaaaactctacagaagcattacaattacgtgctraaaaacgagaagagcatcgtaagaaatggtatcaaaacgattga

SEQ ID NO: 1881 - DNA, 1818 bp, Staphylococcus aureus
ttgcgaatagatcaatcgatcattaatgaaataaaagataaaaccgacattttagacttggtaagtgaatatgtaaaactagaaaagagaggacgcaattatataggtttgtgtccttttcatgatgaaaagacaccttcatttacagtttctgaagataaacaaatctgtcattgttttggttgtaaaaaaggtggcaatgtttttcaatttactcaagaaattaaagacatatcatttgttgaagcggttaaagaattaggtgatagagttaatgttgctgtagatattgaggcaacacaatytaactcaaatrttcaaattgcttctgatgatttacaaatgattgaaatgcatgagttaatacaagaattttattattacgctttaacaaagacagtcgaaggcgaacaagcattaacatacttacaagaacgtggttttacagatgcgcttattaaagagcgaggcattggctttgcacccgatagctcacatttttgtcatgattttcttcaaaaaargggttacgatattgaattagcatatgaagccggattattatcacgtaacgaagaaaatttcagttattacgatagatttcgaaatcgtattatgtttcctttgaaaaatgcgcaaggaagaattgttggatattcaggtcgaacatataccggtcaagaaccaaaatacctaaatagtcctgaaacrcctatctttcaaaaaagaaagttgttatayaacttagataaagcrcgtaaatcaattagaaaattagatgaaatygtattactagaaggttttatggatgttataaaatctgatactgctggcttgaaaaacgttgttgcaacaatgggkacacagttgtcagatgaacatattacytttatacgaaagttaacatyaaatataacattaatgtttgatggggattttgcgggtagtgaagcaacacttaaaacaggtcaacatttrttacagcaagggctaaatgtatttgttatacaattgccatcwggcatggatccggatgaatacattggtaagtatggcaacgacgcatttactrcttttgtaaaaaatgacaaaaagtcatttgcacattataaagtragtatattaaaagatgaaattgcacataatgacctttcatatgaacgttatttgaaagaactragtcatgayatttcrcttatgaartcatcrattytgcaacaaaaggctwtaaatgatgttgcrccatttttcaatgttagtcctgagcarttagctaacgaaatacaattcaatcaagcaccagccaattattatccagawgatgagtatggcggttatgatgagtatggcggttatattgaacctgagccaattggtatggcacaatttgacaatttgagccgtcragaaaaagcggagcgagcatttttaaaacatttaatgagagataaagatacatttttaaattattatgaaagtgttgataaggataacttcacaaatcagcattttaaatatgtattcgaagtcttacatgatttttatgcggaaaatgatcaatataatatcagtgatgctgtgcagtatgttaattcaaatgagttgagagaaacactaattagcttagaacaatataatttgaatgrcgaaccatatgaaaatgaaattgatgattatgtcaatgttattaatgaaaaaggacaagaaacaattgagtcattgaatcataaattaagggaagctacaaggattggcgatgtagaattacaaaaatactatttacagcaaattgttgctaagaataaagaacgcatgtag

SEQ ID NO: 1882 - DNA, 1800 bp, Staphylococcus aureus
ttgcgaatagatcaatcgatcattaatgaaataaaagataaaaccgayattttagacttggtaagtgaatatgtaaaattagaaaagagaggacgcaattatataggtttgtgtccttttcatgatgaaaagacaccttcatttacagtttctgaagataaacaaatttgycattgttttggttgtaaaaaaggtggcaatgtttttcaatttactcaagaaattaaagacatatcatttgttgaagcggttaaagaattaggtgatagagttaatgttgctgtagatattgaggcaacacaatctaactcaaatgttcaaattgcttctgatgatttacaaatgattgaaatgcatgagttaatacaagaattttaytattacgctttaacaaagacagtcgaaggcgaacaagcattaacgtacttacaagaacgtggttttacagatgcgcttattaaagagcgaggcattggctttgcacccgatagctcacatttttgtcatgattttcttcaaaaaaagggttacgatattgaattagcatatgaagccggattattatcacgtaacgaagaaaayttcagttattacgatagatttcgaaatcgtattatgtttcctttgaaaaatgcgcaaggaagaattgttggatattcaggtcgaacatataccggtcaagaaccaaaatacytaaatagtcctgaaacacctatctttcaaaaaagaaagttgttatayaacttagataaagcrcgtaaatcaattagaaaattagatgaaatygtattactagaaggttttatggatgttataaaatctgatactgctggcttgaaaaacgttgttgcaacaatgggtacacagttgtcagatgaacatattacytttatacgaaagttaacatcaaatataacattaatgtttgatggggattttgcgggtagtgaagcaacacttaaaacaggtcaamatttgttacagcaagggctaaatgtatttgttatacaattgccatcwggcatggatcckgatgaatacattggtaagtatggcaacgaygcatttactgcttttgtaaaaaatgacaaaaagtcatttgcacattataaagtgagtatattaaaagatgaaattgcacataatgacctttcatatgaacgttatttgaaagaactragtcatgayatttcrcttatgaartcatcgattttgcaacaaaaggctttaaatgatgttgcaccatttttcaatgttagtcctgagcaattagcwaacgaaatacaattcaatcaagcaccagccaattattatccagaagatgagtatggcggttacattgaacctgagccaattggtatggcacaatttgacaatttgagccgtcaagaaaaagcggagcgagcatttttaaaacatttaatgagagataaagatacatttttaaattattatgaaagtgttgataaggataacttcacaaatcagcattttaaatatgtattcgaagtcttacatgatttttatgcggaaaatgatcaatataatatcagtgatgctgtgcagtatgttaattcaaatgagttgagagaaacactaattagcttagaacaatatartttgaatgaygaaccatatgaaaatgaaattgatgattatgtcaatgtwattaatgaaaamggacaagaaacaattgagtcattgaaycataaattaagggaagctacaaggattggcgatgtagaattacaraaatactatttacagcaaattgttgctaagaataaagaacgcatgtag

SEQ ID NO: 1883 - DNA, 2043 bp, Staphylococcus aureus
ttggaaatatttgaaacaattcttatatttatagctgttgtgatactaagttcgtttgtccatactttcatacctaaagtacccctagcatttatacaaattttcttgggcatgttactatttattaccccaatccctgttcaatttaattttgattctgaattrtttatggtaacaatgattgcgcctttgttatttgtagaaggtgttaatgtttctagagtccatttaaggaaatatattaagccagtgatgatgatggcattaggattagtcattactactgtgataggtgtmggtttatttattcattggatttggccagatttacctattggagcagcatttgcaattgctgccattctttgtcctactgatgcagtagcagtgcaagcaatyactaaaggaaaggtcttgccaaaaggagcaatgacaattcttgaaggtgagtcattattgaatgatgctgctggtattatttcatttaaaatagctgttggagtattagttacaggtgctttttcacttgttgatgctgttcagttgtttttaattgcatcaattggtggcgcagtggttggtttacttataggtatggcattagtaaggttccgattaacattgatgcgtcgaggatatgaaaacattaatatgtttacaattattcaattgttaacaccatttgttacgtatttaattgctgaattgtttcacgcatcaggaatcattgcagcagtagttgcaggacttgtacatggtttcgaacgtgacagaattatgcaagtacgtacacaactrcaaatgagttacaatcatacatggaatatactaggttatgttttaaatggctttgttttttcaataytaggatttttagtacctgaagttattattaaaattatcaaaacagaaccgcacaatttaatctttttaataggcatcactattgttgttgctttagctgtctatctatttagatttgtttgggtttatgtcttatatccttatttttatttagccatcagtccattccaaaaaatgatgactaaaaatgatgatgataatccaacgactgagaaaccaccaaagcgaagtttatacgctttaattatgacgttatgtggtgtgcatggaacaatttctttagcaatcgcattaacgttaccktattttttagcaggkcatcatgcttttacgtatagaaaygayttattatttattgcatctggtatggttattattagtttggtagttgcgcaagtattattgccattattaacgaaacctgcacctaaaacagtaattggcaatatgtcgtttaaagttgctagaatttatatattagaacaagttattgattatctaaatcaaaaatctactttcgaaacaagttttaaatatggtaaygtgattaaagaatatcatgataaattagcatttttaaaaactgtagagaaagatgatgaaaactctaaagaattagaacgtctacaaaaaattgcttttaatgtagaaacaaaracwttagagtctttagtagatgaaggacaaataacgaatagtgtacttgaaaactatatgcgttatgctgaaagaacacargtatatagacaagcatcattaataagaagaatgattgtattattacgaggtgctttattaaaacgaagagtacaaacgagagtgaactcsgcatcttcacttagtgttacggataacttaatggaattaaataaaattaataaattagtccattataatgtggttagtcgtttgtctaaggaaacaacaaaagataatacacttgaarttggaatggtttgtgacggttatttaatgcgaattgaaaacttaacaccatcwaatttcttcaactcagcaagtgaagatacgattactaaaattaaattaaatgcattgagagaacaacgtcgcattttacgtgagttgattgatacagatgaagtatcagaaggtacagcgttaaaactaagagaagccatcaattaygatgaaatggttattgtagatagtatgacgtag

SEQ ID NO: 1884 - DNA, 819 bp, Staphylococcus aureus
atggaaaaaattaaaattatcgtagcytcagattctataggtgaaacggcagagttagttgctagggcaggtatttcacaattyaatcctaagcaatgtaaaaatgaattattaagatatccatatattgaatcttttgaagatgttgatgaagtgattcaagttgcwaaagatacaaatgctatcattgtttatacacttattaaacctgaaatgaagcaatatatgagtgagaaagtagcagaattccaattgaagtcygtygatatyatggggccattaatggatttattatcwgcwtcrgttgaagaaaaaccttataatgagccaggtatcgttcatagattagatgatgcatatttcaagaaaattgatgcgatagagtttgcrgttaaataygatgatggtaaagatcctaaaggattacctaaagctgatattgttttacttggtatttcgagaacttcaaagacaccattatcycagtatttagcgcataaragttacaaagttatgaatgtaccgattgtaccagaagtgacaccgccagatggcttatatgatattratccwaagaaatgtatcgcacttaaaataagtgaagaaaaattaaatcgcattagaaaagagcgaytaaaacaattrggactaggtgacacagctcgwtatgcaacagaagcwcgaatycaagaagaattgaattactttgaagaaatcgtaagtgaaattggatgtcctgtcattgatgtttctcaaaaagcaatcgaagaaacagcaaacgatataatccattatattgaacaaaataaatcgaaatga

SEQ ID NO: 1885 - DNA, 180 bp, Staphylococcus aureus
atgatacctgcwgcatcattgagtaaagattcaccttctaaaatcgtcatagaacctttaggtaataattttccgcgtgtaatagcagatactgctactgcatcagtaggacataaaattgctgctattgcaaaagcggctggcattggtaaggcaggccaaatccaatgtataaaatag

SEQ ID NO: 1886 - DNA, 645 bp, Staphylococcus aureus
atgttaactgaagaaaaagaggactatttaaaggcaatccttacgaataatggcgataaaaaytttgtgacaaataaaatcttatctcaatttttaaatattaagcctccatctgtaagtgaaatggtaggacgtctygaaaaagcaggctatgttgaaacaaaaccrtacaaaggtgttagattaacagaggatggtttaacgcatacgcttgatatcattaagagacatcgactattagaattatttttaatagaaatattgaaatataattgggaagaagtacatcaagaagcagaaattttagaacatcgaatttcagatttatttgttgaaaggctggatagcytgttaaatttcccagaaacttgcccgcacggcggtgtgattcctagaaataatgaatataaagagaaatatataacaacgattttgaattatgaacctggtgatatcgttacaatcaaacgtgtgagagataagacygatttgctaatatatttgtctagtaaagatatytctattggtaatgaagtggaaattgtatcgaaagatgaaatgaataaagtaattatcatyaaacgtaatgataatgtaattattgtcagttacgaaaatgcaatgaacatgtttgctgaaaaataa

SEQ ID NO: 1887 - DNA, 540 bp, Staphylococcus aureus
ttgaatttaacaagagcaacgcttagaccagatttagcgatattaacaatgtcaggttttttagaagcgcgtccccgagttggatattattattcaggtaaatcaaaaggyaarttttttaatgaaaaacttcgacaatttgaggttaaggactatatgtctcaacctgttgtgctaagagagaatacaacagtttatgacgctatttgtacaatttttttagaagatgtaagtacattatttattattaatgaagataacgattttgttggtgtgtgttcaagaaaagatttattaagagcttcaatgattggagcagatattcatamagtacctatcagtgtwaatatgacacgtatgcctaatgtcacttatttagaggaaagcgaattagtcatatacgcagcagatagaatgattgaaaaagaaattgattcgattccaattgtaagaaaaaaagataatcaaaagtatgaagtaattggaagaatttccaaaacaacaatagctaagttattagtagcattatataaagaatag

SEQ ID NO: 1888 - DNA, 753 bp, Staphylococcus aureus
ttgttaatgcgccaaaaagggattatcatcaaagcagttgattatggtgaatctgataaaattatcacgattttaaatgagcatggtgcaaaagtaccacttatggcwagrcgtgctaaaaaagttaagacgggtttrcaagcgcaaacgcaattgtttgtttatggtttgtttatttacaatmagtggcgaggtatgggaacgttaaattctgtagatgttattagtcaacattataaattacaaatggacctttwcgtaagcagttatgcskctctggcagctgaaactattgagcgytcaatggatgaaggkgacrttgcaccatataactatcaattattacaatttgttcttgaaaaaatagaatcaggtacatctgcacagttaatgtcagtcgtwgttatgttaaagtgyatgaaacgatttggttttacygcatcatttaatcgctgtgctgtgagtggtaatgacacacaagcagatttaataggttatagttttaagtwtgacggtgckatttcaaggcaagaggcttctaaagatgtacatgcagttatattatcgaataaaacactatatttattagatgtattacaaaaattaccratagataaaatgaattcattgaatatccatcaagaaattattgatgaaatgtcagatatcattttaatgttatatcgtgaatatgcaggtatgttttttaaaagtcagaaactaatcaaccaattaaaaagattggaacaataa

SEQ ID NO: 1889 - DNA, 834 bp, Staphylococcus aureus
ttgaaagtgtggtttaatggaatgtcagcaataggaacagtttttaaagaacatgtaaagaacttttatttaattcaaagactggctcagtttcaagttaaaattatcaatcatagtaactatttaggtgtggcwtgggaattaattaaccctgttatgcaaatwatggtttactggatggtttttggattaggaataagaagtaatgcaccaattcatggtgtaccttttgtttattggttattggttggtatcagtatgtggttcttcatcaaccaaggtattttagaaggtactaaagcaattacacaaaagtttaatcaagtatcgaaaatgaacttcccgttatcgataataccgacatatattgtgacaagtagattttatggacatttaggcttacttttacttgtgataattgcatgtatgtttackggtatttatccatcaatacatatcattcaattattgatatatgtaccgttttgttttttcttaactgcctcggtgacgttattaacatcaacactcggtgtgttagttagagatacacaaatgttaatgcaagcaatattaagaatattattttacttttcaccaattttgtggctaccaaagaaccatggtatcagtggtttaattcatgaaatratgaaatataatccagtttactttattgytgaatcataccgtgcagcaattttatatcacgaatggtatttcatggatcattggaaattaatgttatacaatttcggtattgttgccattttctttgcaattggtgcgtacytacacatgaaatatagagatcaatttgcagacttcttgtaa

SEQ ID NO: 1890 - DNA, 900 bp, Staphylococcus aureus
atgacagaacataaatcaggatttgtttcaattataggtagaccaaatgtaggraagtcaacatttgttaatagagtgatyggccataaaatagcaatcatgtccgataaagctcaaacaactagaaataaaattcaaggtgtwatgacaagagatgaygcgcaaattatattcattgatacgccaggtattcataaacctaaacacaaattaggtgactatatgatgaaagtcgctaaaaatacattatctgaratagatgcaatcatgtttatggktaatgccaatgaggaaattggacgaggygatgaatatattatagaaatgttgaaaaatgttaagacaccagtatttttagtattaaataaaatagatttagtgcatccagatgaattaatgccaaagattgaagaatatcaaagktatatggactttacagagattgtacctatttcagcattagaagggctaaatgtmgatcattttattgatgtwttaaagacgtatttacccgaaggaccwaaatattatccagatgatcaaatttcagaccatcctgaacaatttgtagtgggtgaaatcattcgtgaaaaaatccttcatcttacaagtgaagaaatccctcatgcgattggtgttaatgtggaccgtatggttaaagaaagcgaagatcgtgttcatatcgaagcaactatatatgttgaaagagrttcgcaaaaaggaattgtcattggaaaaggcggtaaaaagttaaaagaagtaggraaacgtgcgagacgtgatatagaaatgcttctaggctctaaagtwtacttrgaattatgggtcaaagttcaaagagactggcgaaacaaagttaactttattcgccaaattggttatgttgaagaccaagattaa

SEQ ID NO: 1891 - DNA, 1104 bp, Staphylococcus aureus
atgaacgttttaataaagaaattttatcatttggtagttcgaatactttctaaaatgattacgcctcaagtgattgataaaccgcatatcgtatttatgatgacttttccagaagatattaagcctatcatcaaagcattaaataattcgtygtatcagaaaackgttttaacaacaccaaaacaagcgccttatttatctgaacttagcgacgatgttratgtgatagaaatgactaatcgaacaytggtaaaacaaattaaggctttgaaaagcgcgcagatgattattatcgataattattacctattrctaggtggatataataagacttctaatcaacacattgttcaaacgtggcatgcaagtggtgcrttaaaaaactttggmttaacagatcatcaagtcgatgtgtctgacaagrcaatggttcagcagtaccgtaaagtttatcaagcgacrgatttttacttagtgggttgtgaacaaatgtcacaatgttttaaacartctttaggtgcaacagaagagcaaatgytgtattttgggcttccgagaattaataaatattacacagctgatagagcaacggttaaggcagagttaaaggataaatatggaattacaaataagttggyattatatgtaccaacatatagagaagataaagcagataatagggctattgataaagcttattttgaaaaatgtttaccaggatatacactgattaataaaytacatccatcaattgaasattcagacattgatgaygtatcttcratcgayacgtctayattaatgytaatgtcagatataattattagcgactatagttcgctgccaatagaagctagcttgttagatattccaactatattttatgtgtatgatgaaggaacatatgatmargtgagaggcctgaatcaattttacaaagcaataccggatagctacaaagtgtatactgaagargatttaataatgacgatacaagaaaaagaacatctattaartccrttatttaaagattggcataagtataatactgataaaagtttacatcagctcacagaatatatagataagatggtgacaaaatga

SEQ ID NO: 1892 - DNA, 405 bp, Staphylococcus aureus
atgagttatcaacctcattattttcaagaagttagaaaagcacaacaagaatcatattcgccatacagtcawtttaaagtaggrgcttatttaaaaacgaaagacggtagaactttttatggtaccaatgtagaaaatgcttcttatccattatcgatatgtgctgaacgagctagtttggtatcggcaatttctcaaggatacagaccaggtgattttgaatcaataactgtaaccgtagatgcagataaaccgtcatcaccttgtggtgcatgtcgtcaagttttraaggaattatgtgatgatgatatgcctgtgtatatgacaaatcataaaggagatatggttatgatgacagtcgcagagttrctaccatttggattttcaggaaaggatttagaataa

SEQ ID NO: 1893 - DNA, 1062 bp, Staphylococcus aureus
atgaggyttacgataatcatacctacatgtaataatgaggcaacaattcgacaattgttaatmtctattgagagtaaagaacactatagaatcctttgtattgatggtggttctactgatcaaacaattcctatgattgaacggttacmaagagaactcaagcatatttcattaatacaattacaaaatgcttcgatagctacgtgtattaataaaggtttgatggakatcaaaatgacagatccacatgatagtgacgcatttatggtcataaawccaacatcaatcgtattgccaggtaaattagataggytaactgcwgcwttcaaaaataatgataatattgatatggtaatagggcagcgagcttacaattaccatggtgaatggaaattgaaaagtgctgatgagtttattaaagayaatcgaatcgttacattaacggaacaaccagatttgttatcaatgatgtcttttgacggaaagttattcagtgctaaatttgctgaattacagtgtgacgwaactttagctaacacwtacaatcacrmaatacttgtcaargcgatgcaaaaagctacrgatatacatttagtttcacagatgattgtcggagataacgatatagatacacatgctacaagtaacratgaagattttaawagatatatcayagaaattatgaaaataagacaacgagtcatggaaatgttactattacctgaacaaaggctattatatagtgatatggttgatcgtattttattcaataattcattaaaatattatatgaaygaacacccagcagtaacgcacacgacaattcaactygtaaaagactatattatgtctatgcagcattctgattatgtatcrcaaaayatgtttgacattataaatacagttgaatttawtggtgagaattgggatagagaaatatacgaattgtggcgacaaacattaattcaagtgggcattaataggccgacwtataaaarattcttgatwcaacttaaagggagaaagtttgcacatcgaacaaaatcaatgttaaaacgataa

SEQ ID NO: 1894 - DNA, 345 bp, Staphylococcus aureus
atgaaaaggtttaaatatgcacttgatgggctgaaaatcttaattcaaaaagactataaatttcttttacatgtgtttgcaatgattgttgctattgtctttggtctcgtactaaatattaatcgkattgagtggatatttatactcattgctattgcattagttctcactgttgaagctttaaacactgctattgaatatgttgtmgatttagtgaccgttgaatatcatgatttagctaaatacgcwaaagatatwgcggcttttagtgtacttatagtttcaatattagcatttattataggtttaatagtatttttaccacattttatagcgttattttag

SEQ ID NO: 1895 - DNA, 399 bp, Staphylococcus aureus
atgaaacgtgtaataacatatggcacatatgacttacttcactatggtcatatcgaattgcttcgtcgtgcaagagagatgggcgattatttaatagtagcattatcaacwgatgaatttaatcaaattaaacataaaaaatcttattatgattatgaacaacgaaaaatgatgcttgaatcaatacgctatgtckmtttagtcattccagaaaagggctggggacaaaaagaagacgatgtcgaaaaatttgatgtagatgtttttgttatgggacatgactgggaaggtgaattcgacttcttaaaggataaatgtgaagtcatttatttaaaacgtacagaaggcatttcgacgactaaaatcaaacaagaattatatggtaaagatgctaaataa

SEQ ID NO: 1896 - DNA, 468 bp, Staphylococcus aureus
atgtttacgatagattttagcgatcacacaggcttagttaaagatgcktggtataaacaaattgaagatttattagaatttgctaaaaaagaagagcatatagaagacgatgctgagctttctgttacatttgtagataaacaagaaatacaagaaattaatcgaacatatagagataaagataaagttacagatgtaatctcatttgctttagaagargatgagccagakattgattttagtggtcttgatataccacgtgttttaggggatataattatctgtacggatgtagcgcaagaacaagcaaacaattacggacattcttttgaacgagaattaggatttttagcattacatggatttttgcatctattaggttatgatcatatgactgaagcggatgaaaaggaaatgtttggtcgacaagatacaatattaaacgcwtatggattaacacgagrctaa

SEQ ID NO: 1897 - DNA, 596 bp, Staphylococcus aureus
gtgatgacgaatttgataaaaatgataaaggtacatggattattggttctgaaatggcaactcaaaataagggggaagctctgaaagttaaaggtatggtcttgtatatgaatagaaataccaaaacaacaaaaggatattattatgtaaatgcaataaagaatgataaagacggaagaccccaagagaatgaaaaaaggtacccagttaaaatggtcgataataaaatcattccaacaaaagaaattaaagataaaaacataaaaaaagaaatcgaaaactttaagttctttgttcaatatggaaactttaaagatttgtcgaagtataaagacggagatatttcatataatccagaggtgccgagttattcggctaaatatcaattaactaatgatgattacaatgtaaagcaattacgtaaaagatatgacataccaacaaataaagcaccgaagttgttgttgaagggtacagggaatttaaaaggttcatcagttggatataaagacattgaatttacgtttgtagagaaaaaagaagagaacatttactttagtgatgggttaatttttaaaccaagtgaggataaataa

SEQ ID NO: 1898 - DNA, 1641 bp, Staphylococcus aureus
atgaaacaacgcattggagcttacttaattgacgctwttcatcgagcaggcgtcgataaaatttttggtgttcctggtgattttaatctcgcttttctagacgatattatcagyaatcccaatgtagattgggtaggaaatacaaatgaattaaacgcaagttacgcagcggacggttatgcccgtcttaatggactcgctgcattagttactacatttggtgttggcgaattaagtgccgtcaacggtatcgcaggttcrtatgctgaacgcatacctgtcattgcgattacaggtgcgccgacacgtgctgttgaacawgscggtaaatatgtacatcactcacttggtgaaggtacatttgacgactaycgaaaaatgtttgcacatataaccgttgcacaaggttatatcacacctgaaaatgcarcaacygaaataccacgyttaattaatacagcaatcgccgaaagacgcccagttcatttacatttaccaatcgatgtcgcaatctctgaaattgagataccgacaccattygaagtracggcarcyaaakatackgatgcatcaacatatatagagttattaryawctaaaytgcatcaakcgaagcagcctatcatcattactggacatgaaatyaacagttttcacctycatcaagaattagaagattttgtaaatcaaacacagataccagtagcacaactttcattaggaaaaggtgcttttaatgaggaaaatccatattatatgggtatttacgaygggaaaattgccgaagataaaatacgagattatgtggacaacagcgatttaattttaaatattggagccaaattaacagattcagcaacagcaggwttttcataccaattcaatatcgatgatgtcgttatgttaaatcatcacaatatcaaaattgaygatgttacaaatgatgaaatatctctaycatcrttrytamaacarttrwccratatwtcatatacgaayarygcawcgttycctgcrtatcatcgtccaacatcacccgattatactgttggcacagaaccattaacacaacaaacttattttaaaatgatgcaaaatttcttaaaaccaaatgatgtcatyattgctgatcaaggtacatcattytttggtgmttatgatttagcattatacaaaarcaatacttttatagggcaaccgttatggggttctatcggctatacattacctgcaacattaggttcacaattagcagacaaagatcgtcgtaacttattattaattggygatggctcattgcaactaactgttcaagctatttcaactatgattagacagcatattaaaccggtattatttgtgattaataatgacggctatacggtagaacgacttattcacggcatgtatgaaccttataatgaaattcacatgtgggattataaagctttaccagctgtatttggtggtaaaaatgttgaaattcatgacgttgaatcatcaaaagatttacaagasryrtttaatrcaattaatggycatcccgatgtgatgcattttgtcgaagtcaaaatgkctgtcgaagaygcaccgaagaaactsatcgatatygctaaagctttttcacaacaaaataaataa

SEQ ID NO: 1899 - DNA, 771 bp, Staphylococcus aureus
gtgatgaaacgtttaaataaattagtgttaggtattagtttcttatttttagtcattagtattactgctggttgtggcatgggtaaagaagcggaaattaagaaaagttttgaaaagacaatgagtatgtatccgattaaaaacctagaggatttatatgacaaagagggctatcgagatgatcaatttgataaaaatgataagggaacatggattgtaaattctcaaatggcaattcaaaataaaggagaacctatgaaatcaaaaggcatggttctgtatatgaatagaaatacaagaacaacaaatggctattattatgttaatgtgattaagggcgaggataaaggtaaacatcaagacaatgaaaaaagataccctgttaaaatggtcgacaataaaataatccttactaaagaaattaaagatgaaaacataaaaatagaaatcgaaaactttaagttttttgttcaatatggaaactttaaagatttggaaaattataaagatggagatatatcatataatccagaggtgccaagttattcagctaaatatcaattaactaatgatgattacaatgtaaagcaattacgtaaaagatatgacataccaacaaataaagcaccgaagttgttgttgaagggtacagggaatttaaaaggttcatcagttggatataaagacattgaatttacgtttgtagagaaaaaagaagagaacatttactttagtgatgggttaatttttaaaccaagtgaggataaataa

SEQ ID NO: 1900 - DNA, 1728 bp, Staphylococcus aureus
atgaaacgagaaaatccattgtttttcttatttaaaaaactatcatggccagtgggtcttatcgttgcagctatcactatttcatcactagggagcttaagtggactattagtgccactgtttactggacgaattgtagataaattttccgtgagycatatcaattggaatctaatcgcattatttggtggtatctttgtyatcaatgctttattaagcggattaggtttatatttattaagtaaaattggtgaaaarattatttatssgatacgctcagttttatgggagcatatcatacaattaaaaatgccattctttgacaaaaatgaaagtggtcaattaatgagtcgattaactgacgatacgaaagtgataaatgaatttatttcacaaaagctacctaacttattaccatcaatcgttacattagttgggtcactaatcatgttatttattttagattggaaaatgacattattaacatttataacgataccgatattygttttaattatgattcctctaggwcgtattatgcaaaagatatcgacaagtacacaatctgaaattgcaaacttyagtggtttgttagggcgtgtcctaactgaaatgcgtcttgttaaaatatcaaatacagagcgwcttgaattagataatgcacataaaaatttgaatgaaatatataaattaggtttaaaacaggctaaaattgcggcagttgtacaaccaatttcaggtatwgttatgttgctaacaattgcaattattttaggttttggtgcattagaaattgcgactggtgcaatcactgcaggtacattaattgcaatgatattttatgttattcarttatckatgcctttaatcaatctttcmacgttagttacagattataaaaaggcagtcggtgcaagtagtagaatatacgaaatcatgcaagaacctrkwsaacmgacagaagctcttgaagattctgaaaatgtattaattgatgacggtgtrttgtcatttgaacatgtagactttaaatatgatgtgaagaaaatattagatgatgtgtcgttccaaatcccacaaggkcaagtgagtgcttttgtaggyccttctggrtctggtaaaagtacgatatttaatctgatagaacgtatgtatgaaattgagtcaggtgatattaaatatggccttgaaagtgtctatratatcccgttatctaagtggcgacgcaaaattggatatgttatgcaatcaaattcgatgatgagtggwacaattagagacaatattttatacggaattaatcgycatgtttcagatgaagaacttattaattatgctaaattagcgaactgtcatgattttatcatgcaatttgatgaaggatatgacacgcttgtaggtgaacgaggattgaaactgtctggcggacaacgtcaacgtattgatattgctagaagttttgttaaaaatcctgatattttgttacttgatgaagcaacagctaatctcgatagtgaaagtgaattgaaaattcaagaagctttagaaacattgatggaaggtagaacaacgattgtcattgcgmatcgtttgtctacaattaaaaaagccggtcaaattatrtkcttagacaaaggacaggtaacaggtaaaggtacgcattcagaactgatggcatcacatgcgaagtataaaaactttgtagtgtctcaaaaattaacagattaa

SEQ ID NO: 1901 - DNA, 948 bp, Staphylococcus aureus
atgcctggaattatacaaatagacgatatgaaycaatctcaagctttaattggaaataatgatgaacatttaaaagcaattgaagagagtttcgatgttgtcatccatgcaagaggacaagaagttgccgttaaaggtacaaaaatagaaaacgtagaaaaagcggaatcagtattaatcaatttgctgaaggttattgatttaggtaataatattacaattaaagatgttgaagcagctattaaaatggcgcataataacacaattcaacatctgttagatttatatgatgaagagataactaaagatgcatttggtaagacgattcgtgcgaaaacgatggggcaacgtatatatgttaatgccatgaaaaataatgatttagtatttggtataggtcctgctggtacaggtaagacattcttagctgtagtttatgcagcaaagcaactccgtaaaggtrctgttaaacgtattgtattaacaagacctgctgttgaagcaggagagtcacttggatttttaccaggagatttgaaagaaaaggtagatccatatttaagacctttatatgatggtstatatactgttsttgggcgtgaacamwcagagcgattkattgamagaggcattatcraaatagcgccacttgcatatatgcgcggwcgaacattagaagatgcwtttgtaattcttgatgaggcgcagaataygacacatgcgcaaatgaaaatgtttttaacaagactaggttttggctcaaaaatggtagttactggtgaccaamctcaaatcgatttacctaaaggtgttaaaagtggacttaaggaagcggtcagtaggttacacaacgttaaaggtataagtatattgaaattagatcagagcgatgtagtmagacatccattggtaagtaaratcattgaacattatgaaggasagaattaa

SEQ ID NO: 1902 - DNA, 699 bp, Staphylococcus aureus
atgagtgtcggtattctaatttttgtcatatcagtgatcatttctatcattactactatgcgcgaaaatagtcataaagatagacaaaatcaaaagccacctcaaaaaacatctaccgataatgaaccaaaaaaaggtggcttttttgaagaaattgagcgaacgtttaaagaaataagtgaagaattaaatgaagaagaaaagaaatcatcgaaacgaaaataygatgatacgttaccacctttattcgatgaacttccaaaggaagagcctaaatcgaaacctgttgtagaacctatggcacctaaaaaacaacmagaaacaaaaccgatgacagagaaaccaatyacagtgcctaaagcagaaccggtggagcagaaacatagaccttctagacaagataattctgacgaaattagacgtcaattagaaaaatcacttagagatgatattaaaacgattcgtactgacattgatagagaaaaagaaaagcaaattgctaaaatggaaaaacgtgctagagatattattgaggataaatacttatctgaacgtacaaaacgtttgaaattaaagcagytgcttaattctcaaaatgtcgaaaaagatttgactaaatcagcgttccaatttgataaagatgaagtaatcaatggtatgatatggtcagaaattttagctaaaccaaaacaattataa

SEQ ID NO: 1903 - DNA, 90 bp, Staphylococcus aureus
ttgttttgttattataaacaacacaaaggagataacttctctattgaagaagttaaaaacattatagcagacaatgaaatgaaagtaaat

SEQ ID NO: 1904 - DNA, 990 bp, Staphylococcus aureus
atgtttagtttaagttttatcgtaatagcagttattatartagttgcattacttattttattctcatttgtaccsattggtttrtggatttcagcgttagcagctggcgttcatgttggtataggtacattggttggtatgcgtttacgtcgtgtatctccaagaaaagttatagcgccattaattaaagcgcayaaagcaggactagcattaacaacaaaccaattagaatcgcattatctagcaggaggaaatgttgacagagttgttgaygctaatattgctgcacaacgtgctgacattgaycttcctttcgaacgtgcwgctgcwattgacctwgcaggacgtgacgtattagaagcggttcaaatgtctgttaatcctaaagtcattgaaacwccatttatcgcaggtgtagcaatgaayggtattgaagtgaaagccaaagctcgtatcacagttagagctaatattgctcgacttgttggtggtgcwggtgaagaaacaatcatcgcacgtgttggtgaaggtatcgtttcaacaattggttctagtaagcatcatacagaagtacttgaaaacccagataatatttctaaaacagtwttaagcaaaggtttagattcaggtactgcatttgaaattttatcaattgatattgctgacgttgatattagtaaaaatattggtgcagacttacaaactgaacaagcattagcagacaaaaatattgcacaagcaaaagctgaagaacgtagagctatggctgtagcaactgagcaagaaatgaaagcgcgtgtacaagaaatgcatgctaaagtagttgaagccgaatctgaagtaccattagctatggctgaagcattacgttcaggtaatatcagtgttaaagattattataatttgaaaaatatcgaagctgatacaggcatgagaaatgcaattaataaacgaactgatcaaagtgatgatgagtcacctgaacattaa

SEQ ID NO: 1905 - DNA, 834 bp, Staphylococcus aureus
gtgaataaaacggttaaagatttaatactagttgtcttaggttcatttatctttgctgcaggtgtaaatgcatttattatttctggtaacttaggtgaaggyggggttacaggtttagcaattattttatattatgcgtttcatatttcaccagccatcactaacttcttggtcaacgcagyattgattgccataggttataaatttttgagtaagagaagtatgtacttaactattcttgtaacaattcttatttcaatatttytgagtttaacagaatcatggcaagtagaaactggaaacagcattgtgaatgccatttttggtggtgtaagcgttggactaggaatcggagtaattatccttgcaggcggtacaacagcaggtacaacaattttggcgagaattgcaacgaaatacctcgatgtaagcacgccatatgctttgcttttcttygatatgatcgttgttgcaatttcacttacagttattccacttgataaagtattagtaacagtaatatcactttatataggaacaaaagtgatggaatatgtcatagaaggtttaaacactaaaaaagctatgacgattatttcaactaatcccgacaaacttgccaaagcaatagacgagcaaattggaagaggtttaaccattttaaacggacatggctattatacrcgtgaagaaaaagatgtcttatacgttgttatttctaaaacacaagtwtcaaaagcaaagcgattaattaaacaaatcgataaagatgcattcctcgtaattcatgatgtaagagatgtctatggtaatggytttcttgcagatgaataa

SEQ ID NO: 1906 - DNA, 708 bp, Staphylococcus aureus
gtgagttataataattttttacaaatgacaactatcttggaatcaacggctggagatacttgggttgaacaagttagyaatataattgttcaacctatttttacgttaatattaacctgtttgacattcttaggatttgtatatcaactttactctaaaaaaatcaatgcagctggtattatcgccacattatcattacttattttatttttgggatttctaatccaaggaaatgtcaatatgcattctatcttaatattctcaattggcgttatattagttgtaattgaattatttgtagttggtgcagtaattggtattattggcatgatactgataactataarcataacaacgctcggtgataatttgctatttatgcttgcgaatgttatcgttgccttgattttaacgattgtagaatgggtgatattagtgaagattttcaacagaaagattccgtttttggataargttatcttaaaagattcaactaattctgagtcaggttacaattctcatgataaccgctcgcacctcgtaggaaagactgctcaaacagttacagatcttcgacctgcagggattattttttgtgaaaatgaacgtattgatgctgtttcagatggcaactttattttrcgcaataaaacggtraaaatccttgaagttgaaggaacaagagtagttgtgagggaagtagattaa

SEQ ID NO: 1907 - DNA, 798 bp, Staphylococcus aureus
atgaatcgtttgcatggacaacaagttaaaattggttacggggataacacgattataaataaattagatgttgaaataccagatggcaaagtgacgtcaatcattggtcctaacggctgcgggaaatctactttgctaaaggcattgtcacgtttattggcagttaaagaaggcgaagtatttttagatggtgaaaatattcatacacaatctacgaaagagattgcaaaaaaaatagcyattttacctcaatcacctgaagtagcagatggcttaactgttggrgaattagtttcatatggtcgttttccacatcaaaaaggatttggtagattaactgctgaggataagaaagaaattgattgggcaatggaagttacaggaactgatacattccgacaccgytcaatcaatgatttaagtggtggtcaaagacaacgtgtttggattgcaatggcattagcacaaagaactgatattatctttttagacgaaccaacmacatatttagatatctgtcatcaattagaaatactagaattagttcagaagctaaatcaggaacaaggttgtacaattgtcatggttcttcatgatatcaaccaagcgattcgtttctcagatcatcttattgcgatgaaagaaggsgatatcatcgctacaggttcaacagaagacgtattaacacaggaaatwttagaaaaagttttyaatattgatgttgttttaagtaaagatcctaaaactggaaaacctttaytggtaacttatgacttatgtcgcagagcttattcttaa

SEQ ID NO: 1908 - DNA, 177 bp, Staphylococcus aureus
atgtctaaaacagtagtacgtaaaaatgaatcacttgaagatgcgttacgtagatttaaacgttcagtttctaaaagtggaacaatccaagaagtacgtaaacgtgaattttacgaaaaaccaagcgtaaaacgtaaaaagaaatcagaagctgcacgtaaacgtaaattcaaataa

SEQ ID NO: 1909 - DNA, 1005 bp, Staphylococcus aureus
atgacaaatagagagaayycaacgccattgaagtttttakcctatattataggtttaagtatgatactactaatcacactwtttatttctacattaataggtgacgccaaaattcaagcctctacaattatagaggctatttttaattataatcctagcaatcaacagcaaaacatcatcaatgagattaggattccsagaaatatagcagcagtaattgtrggtatrgcgcttgcagtttctggtgcgattatacaaggtgttacycgtaatrgtcttgctgatccggcgctcataggtttaaattcaggtgcttcatttgctttagcattaacatatgcagttttaccaaacacttcatttttaatattgatgtttgctggatttttaggtgctattctaggaggtgctattgtattaatgataggccgatctagacgtgatggatttaatccgatgcgtattattttagcgggtgcagcagtaagtgctatgttarcagcgctaagtcaaggtattgcattagcttttagrytaaatcaaacagtaacattttggactgctggaggcgtttcaggcacaacatggtcacaccttaagtgggcaattccattaattrgtattgcgttawtcattatattaacaattagtaaacaacttaccattttaaatcttggtgaatcattagctaaaggtttaggtcaaaatgtaacaatgatcagaggcatatgtttaattattgctatgattctagcaggtatwgcagttgctatcgctggacaagttgcatttgtaggwttgatggtrcctcatatagcaagrtttttaattggaactgattatgctaaaattctaccattaacagccttgttaggtgggatactcgtgcttgttgcygatrtgatagcacgatatttaggagaagcgcctgttggtgcaatcatttcatttatcggtgttccttactttttatatttagttaaaaaaggaggacgctcaatatga

SEQ ID NO: 1910 - DNA, 1347 bp, Staphylococcus aureus
atgtcaacagttgcgtttcacacattaggttgtaaagtaaaccattatgaaactgaagcaatctggcaattatttaaagaagcaaactatgagcgcgttgactttgaagcgaatgctgatgtatttgttattaatacttgtacagtaacgaatacrggtgataaaaaaagtcgtcaaatwattagacgtgcaataagacaaaatcctgatgctgtaatctgtgtaacaggttgttatgcgcaaacttcatcagctgaaattatggaaattcctggtgtcgatgtagtagttggtacacaagatagacataaactattaggttacattgaygaattccgtaaagaacgccaaccaattaatggtgttggaaatatcatgaaaaatcgtaaatatgaagaattagatgtyccwtattttacagatagaacacgtgcgtcattaaaaattcaagaaggttgtaacaacttytgcacattctgtattattccatgggctcgtggcttaatgcgttcaagagatccggaaaaagtagttgaacaagcgacgcaactagtgaattcaggatataaggaaattgtattgacgggaattcatacaggtggatatggtcaagatttaaaagattataacttggcccaattattacgtgatcttgaaacgattaatggattagaacgaattcgaatttcttcaattgaagcaagtcaacttacagatgaagtrattgacgttttagaacgttcaacaaaagttgtgcgtcatttgcatattccrttacaatctggttcagatacagtattaaaacgtatgagacgtaagtatacaatggatagrttttcrgaacgattaacaaaattgcataaagctttaccagacttggcagttacgagtgatgtaattgttggtttcccaggtgaaactgaagmwgagttccaagaaacatatgattttatcgtaaagcataagttctctgaactgcatgttttcccttattctcctagaattggcacgccagctgcaagaatggatgaccaaattgatgaagaaattaaaaatgaacgsgtgcataagttaattacgctwagcaatcaactyggaaagttatatgygtctaaatttgatcaagatgtgcttgaagtaattcctgaggarcagggtgacacagaaggyacattagttggatatgcagataattatatgaaagtacaatttgaaggtgacgaatcactcataggtcaaattgtaaaagttaaaattacgcaagcaaattatccattaaatgaagggcaagcaattaaagttgttgatttcgcaacaaataaatctgatagagaagttttagtttaa

SEQ ID NO: 1911 - DNA, 1017 bp, Staphylococcus aureus
atgattagttcaaataataaacgcagacaatkgatwgcactggctgtttttagcattctactatttctaggttgtacttggagtattacctcaggtgaatacaacatacctgtwgaaagatttttcaaaactttaattggacaaggtgatgccattgatgarttaatcttattagatttcagrttacctcggatgatgattactattttggcwggygcagcgcttagtattagtggtgcaatagtgcaaagtgtcacraaaaatccaatagctgaaccmggtatattaggtattaacgcaggtggcggatttgcaatcgcattatttattgcaattggtaaaattaatgctgacaactttgtttatgtactgccgttaataagtatactaggtggtatcrccrctgcattgattatttttattttcagttttaataaaaatgaaggtgttacacctgcgagtatggtattaataggtgtaggtttacaaacagcattatatggtggctcaattacaattatgtcaaaatttgatgataagcaatctgatttcatcgctgcttggtttgcaggtaatatttggggtgacgaatggccatttgtcattgcatttttaccgtgggtgttgattattattccttacttactatttaaatcgaatacactaaatattattcatacgggtgataatattgcacgaggtctaggtgtaaggttaagcagagaacgtttaatattattctttatcgcagtgatgttatcatctgctgctgtagcagtagcaggttcratttcgtttatcggattaatgggyccgcatattgccaaacgtatcgttggaccacgtcaccagttgtttttaccaattgccattttagtaggggcatgtttacttgttatagctgatacaattggcaaaattrtattacaaccaggtggggttccagcaggtatwgtcgtagcaattattggygcaccgtatttcttatatttaatgtacaaaacgaaaaatgtatag

SEQ ID NO: 1912 - DNA, 753 bp, Staphylococcus aureus
gtgcaacgttatttcatagaccaaaacgctgatgtaagtcagcgtttttttattacaaaaaaagaagatattcatcatataacaaatgtaatgagatatgatgttggtagtaaaattattttaacttttaatgatcaaacagtttatttatgtgaaattgctgayataacaagtgataaaattgmagttgatttaaaagaaaaacaaaatattaatacagaattgccagttgatgttacgatttgcagtggactaatyaaagctgacaaatatgagtggttgctacaaaaagctactgaattgggtgcttcatcrtttatagctgtkagcatggaacgytcaattgttaaattaaacgaggcraaagttgycaaaaagatagarcgttggcaaaaaataattaaagaagctgctgaacaaagctatcgtttagtgattccatctattcaattcgagtcgaatttaaaattaatttgtgatactattgataattatgactatattcttattgcayatgaagaggaagcaaaagatggtgagttaagcaatttcaagcaaactttacaacaattcaakgctcaggataaagtgttgatgatttttggtcctgagggtggtttgtcagaaaatgaaatttcattatttagtaatactagtacagttgttggtcttggrccgagaattttacgggcagaaactgcgccattgtatgcgttaagtgcaataagttatgaaaaagaattaatggggtga

SEQ ID NO: 1913 - DNA, 969 bp, Staphylococcus aureus
atgatgaaaaagttaatyaataaraaagaaacatttttaactgatatgmtwgarggmwtgttaattgcgcayccagagttagatctgattgctaatacagttatwgtaaaaaaagctaaraaagaacawggtgtagcaatagtctctggaggtggaagcggacatgaacctgcgcatgcyggwtttgtwgcwgaaggtatgctagatgcagcggtttgtggcgaagtatttacatcacctayaccwgataaaatattagaagctattaaagcagtagatactggtgatggtgtattactagttgtraaaaactatgcaggtgacgtgatgaatttygaaatggcacaagagcttgcagaaatggaaggtataaatgttsaaacwgttattgttcgtgacgacattgctgtgacaaaygaagtacaacgtcgtggtgttgcaggaacagtgtttgttcataagcttgccggttatcttgctgaaaaaggtyattcattaacagagatwaaatcgcgtgtagaagcgttgttacctgaaattaaaagtattggtatggcaattgagccaccgcttgttccaactactggaaaatatggctttgatattgaagacgacaaaatggaaatcggtattggtatacatggtgaaaaaggtattcatagrgaagaagtaaaggatattgatcatattgttggaacattrttagacgaattgtataaagaagtwactgccaatgawgtcataktaatggtaaatggtatgggtggtacgccgttatctgaattaaatatcgtaactaaatatattcaacaaaatttrgctgcaagaacggttaatgttgctaaatggtttgttggtgattatatgacatctttagacatgcaaggtttttctataactatcgtgcctaataaaccagaatatytggaagcatttttagcaccaacaacaagtcaatactttaaataa

SEQ ID NO: 1914 - DNA, 939 bp, Staphylococcus aureus
atgaactggacagagctttcaattattattaatcatgaagcagtagaattggctaccaatatacttgaaaatcatggatcaaatggtgtcgtgatagaagattcakatgrtttaattaaycaaccagaagataaatacggtgaaatttacgctttgaaaaaagaggattatccagataagggagtaagattgaaagcctattttaatgarwtgacttatgatgataagttgcgacagcraattaaagatgagttattaaayttagatgaacttgatcaacataacrttcaattcagtgagcaaatyattgcagaracggattgggaaaatgaatggaaaaactatttccatccattccgagcgtcgaagaagttcacaatagtycctagttgggaaacatatgctaaagaagcggatgaagagctttgcattgagctcgayccaggtatggcttttggaacagghgatcatccgactacaagtatgtgtttgaaggcaatagaaacatatgtattgccacagcattcagtaattgatgttggtactggctcaggtatattaagtattgcaagtyatctaatcggtgtaaaacgtattaaagcgttggatattgatgaaatggcagtgagtgtagctaaagaaaacttcagaagaaatcattgtgaaacgttaattgaagctgttccaggtaacttattgaaagacgaaacagaaaaatttgatattgtaatagcaaatattttagcgcatattattgatgaaatgattgawgatgcttataatactctaaatgaaggcggttattttattacttctggtattataaaagagaagtatgaaggtatacagtcacatatggagcgtgtaggttttaaaattatttcagaacaacatgacaayggttgggtttgtcttgttggccagaaagtgagtgaataa

SEQ ID NO: 1915 - DNA, 585 bp, Staphylococcus aureus
atgaaagtgaatgatatgaaagcrcgtttattaaatttagaagaaacktttaaaaaacatgaatctgaattaactgaattagatcgagcaattggtgatggtgaccayggggttaacatggttcgtgggtttagtagtcttaaagacaaacttgatgatagctcaatgcartcattgttcaaatcdactggtatggcattgatgtcaaatgttggsggtgcatcaggaccactgtatggctttagctttgttaaaatgtctgcagtcrccaaagatgatatggataatcaagatttyattamactaattcaggcatttgccgaagcggttgaatcacgtggkaaagttactttaaatgaaaagacaatgtatgatgtagtagcrcgagcagcagagaagcttraaaatggtgaaactttaacattyaatgatttacagcaattagcagataatacaaaagatatggtagcaacgaaaggtagagctgcatattttggagaagaatcaaaaggttatatwgatccaggtgctcaaagyatggtttatattttaaacgctttgattggagatgaagataatgcctaa

SEQ ID NO: 1916 - DNA, 1140 bp, Staphylococcus aureus
gtggccaaaagagaytattatgaagttttaggcattagtaargatgcttcaaaagatgaaatcaaaaaagcgtatcgaaagctttcgaaaaaatatcatccagatattamcaaagaagaaggtgcagatgaaaagtttaaagaaatttctgaagcctatgaagttttaagtgatgataataaacgcgcaagctatgatcaatttggacatgayggkccacaaggttttggtggacaaggattcaatggctctgactttggcggttttagtggcttcggtggcggcggttttgaagatatctttagctctttcttcggtggcggcagmcaaagagatccaaatgcaccgcaaaaaggtgatgatcttcagtayacaatgacattracatttgaagaagcggtatttggtacaacaaaagaaatttcaatccgtaaagatgtaacatgcgaaacatgtcatggtgatggtgcaaagcctggaacaagtaaaaagacttgtagttactgtaatggcgctggtcatgtagctgtagaacaaaayacaattttaggtagagttcgyactgaacaagtttgtcctaaatgtaatggaagtggtcaagaatttgaagaagcttgtccaacatgtcacggaaaaggtactgaaaataaaacrgttaaattagaagtgaaagtacctgaaggtgtcgacaatgaacaacaaattagattagctggtgaaggctctccaggcgtgaatggaggacctgctggtgatttatacgtagtatttagagttaaaccatctgaaacatttaaacgtgatggtgatgatatttattacaaattaaatgttagcttcccacaagcagctttaggcgatgaaataaaaataccaacattaaataatgaagttatgttaacaatcccwgctggtacacaaacaggtaagcaattccgcttaaaagaaaagggtataaaaaatgttcatggctatggatacggagatttatatgttgatattaaagtagtaacrcctactaaattaacagatagacaaaaagaactaatgaaagaatttgcccaattaaatggtgaagaaattaatgawcaaccttcgaattttaaagatagagcaaaaagattctttaagggagaataa

SEQ ID NO: 1917 - DNA, 363 bp, Staphylococcus aureus
atgcctaaaattatacttgttagccacagtaaagaaattgcaartggtacaaaatctttgttaaagcaaatggcwggtgacgttgatattataccaatcgggggattaccagatggttcaattggaacttcatttgatatcatccaagaagytttgactaaattagakgatgatgcattgtgtttttacgatattggatcttcagaaatgaatktagatatggcwattgaaatgtatgatggtaatcatcrtgtgttaaaagttgatgcrccaattgttgaaggyagttttatcgcagcagtaaagctrtcaatyggcggttcaattgatgatgcattagcagaaatcaaacaatcattttag

SEQ ID NO: 1918 - DNA, 1833 bp, Staphylococcus aureus
atgagtaaaattattggyatagacttaggtacaacaaattcatgtgtaacagtattagaaggcgatgagccaaaagtaattcaaaaccctgaaggttcacgtacaacaccatctgttgtagctttcaaaaatggagaaactcaagttggtgaagtagcwaaacgtcaagctattacaaacccmaacactgttcaatctattaaacgtcatatgggkactgattataargtagatattgaaggtaaatcatacacaccacaagaaatctcagctatgattttacaaaayttaaaaaatacagctgaaagctatttaggtgagaaagytgacaaagctgtaattacagwacctgcatacttwaacgaygctgaacgtcaagcractaaagatgctggtaaaattgctggtttasaarwtgagcgtatcattaatgaaccaacagctgyagcattagcatatggyttagayaaaactgayaaagaygaaaaagtwcytgtktwtgacttaggtggcgrtacatttgacgtatctatmctagaatkaggtgacggtgtattcgaagtactatcaacagccggtgacaacaaacttggcggtgatgattttgaccaagtaattattgactacctagttgcagaattcaaaaaagaaaatggcgtagacttatctcaagataaaatggcattacaacgtttgaaagatgctgctgaaaaagctaaaaaagacttatcaggtgtatcacaaactcaaatctcattaccatttatctcagctggtgaaaacggtccattacacttagaagtaaacttaactcgttctaaatttgargaattatcagattcattaattagaagaacaatggaacctacacgccaagcaatgaaagacgctggcttaacaaactcagatatcgatgaagttatcttagttggtggatcaactcgtattccagcrgtacaagaagctgtcaaaaaagaaatcggtaaagarcctaacaaaggwgtaaacccggacgargtrgtggcwatgggagctgcaatccaaggtggcgttatcacaggtgacgttaaagacgtagtattattagacgtaacaccactatctttaggtattgaaattttaggtggacgtatgaatacgttaattgaacgtaacactacgattcctacatctaaatctcaaatctattcaacagcagtagataatcaaccatcagtagatgtacacgtattacaaggtgaacgtccaatggctgcggataataaaacacttggtagattccaattgactgatattccaccagctgaacgtggtaaacctcaaattgaagtaacgtttgatatcgataaaaacggtattgtaaatgtaactgcaaaagacttaggtacaaataaagaacaaagaattacaattcaatcaagttcttcattatcagacgaagaaatcgaccgtatggtaaaagatgctgaagttaacgctgaagcagataaaaaacgtcgtgaagaagtagacttaagaaacgaagctgacagyctagtattccaagttgaaaaaactttaactgatttaggcgaaaatatyggtgaagaagataaaaaatctgctgaagagaaaaaagacgctcttaaaactgctttagaaggtcaagatatagaagatattaaatctaaaaaagaagaacttgaaaaagtgattcaagaattatcagcmaaagtatatgagcaagcggctcaacagcaacaacaagcacaaggtgcwaatgctggtcaaaacaaygatagtactgtagaagatgctgaatttaamgaagtaaaagacgacgacaaaaaataa

SEQ ID NO: 1919 - DNA, 2046 bp, Staphylococcus aureus
gtgaggaagaaacttttcggtcaattgcaacgtattggtaargcrctaatgttacctgttgcrattttaccagcagckggtctgttattagctatcggtacagctatrcaaggygaakcattacaacactacttgccktttatacaaaatggtggcgtwcaaamtgtcgctaaattaatgacagstgcyggtrgtatyatttttgawaacttrcctatgattttcgcattaggtgtcgcaatcggattagctggcggtgatggygtagcagctatcgcagcattcgtcggttacataatcatgaacaaaacaatgggygactttttacaagtwacacctaaraayrttrstgatccagcgagtggttacgctagcattttaggtatyccaacattacaaacaggtgtgttcggcggtattatwatcggggccctggcagcttggtgttataacaagttctataacattaacttaccatcttatttaggtttcttcgctggtaagcgtttcgtacctattatgatggctacaacatcatttattttagcattyccaatggcattaatytggccaacratycaawcaggattaaatgcattcagtacaggattattagaytcaaatactggtgttgccgtattcttatttggtttcatcaagcgtttattaattccattcggtctacatcacattttccacgcaccgttctggttcgagtttggttcatggaaaaatgcagcwggtgaaattattcacggtgaccaacgtatctttatcgaacaaattcgtgaaggygcacatttracagctggtaaattcatgcaaggtgaattccctgttatgatgttcggtttacctgcagcagctttagcaatttatcacacagctaaacctgaaaayaagaaagtagtagcmggtttaatgggttctgctgctttaacatcattcttaactggtattacagaaccwttagaattctcattcttattygtagcaccattattattctttattcacgcagtacttgatggtttatcattcttaacattgtacttattrgatsttcayytaggttatacwttctcaggtggtttcatcgactacktyttactyggyrtactacctaataagacacaatggtggttagtyattcctgtaggtcttgtatacgcagtyatttactacttcgtattccgattcytaattgtaaaattaaaatacaaaacaccaggtcgtgaagataarcaatcacaagckgytactgcttcagcaactgaattaccatatgcagtattagaagctatgggtggcaaagcaaacattaaacatttagacgcttgtatcacacgtctacgtgttgaagttaacgacaaatctaaagttgatgttcctggtttgaaagatttaggcgcatctggtgtattagaagtcggcaataatatgcaagcaatttttggtccwaaatctgaccaaatcaaacatgaaatgcaacagattatgaatggtcaagtagtagaaaaycctactactatggaagacgataaagacgaaacygttgttgttgcagaagataaatctgcaacaagcgaattgagccatatcgtkcatgcaccattaactggtgaagtaacaccwttatcagaagtgcctgatcaagtgttcagcgaaaaaatgatgggtgacggtatcgctatyaaaccttcacaaggtgaagttcgtgcaccattcaacggtaaartacaaatgattttcccaacaaaacatgcaattggtcttgtatcagatagtggtttagaaytattaatccacatcggtttagacactgttaaattaaacggagaaggctttactttacatgttgaggaaggtcaagaagttaaacaaggtgatttattaatcaactttgatttagactacatccgcaatcatgcaaagagtgatattacgcctattatcgtkacacaaggaaacattacaaaccttgattttaaacaaggtgaacatggcaacatttcatttggcgatcaattatttgaagctaaataa

SEQ ID NO: 1920 - DNA, 498 bp, Staphylococcus aureus
atgcaacaccttataaaaaaacatgtattgaatggcgagyttgatttaktacgacaattgatgtccgaaacagattttatggaattwgaasaagcatatatttcaagtgcgcatgaagtagaaagtatgatgttttatacatgtattttagatatgattaagtacgaagaatcatctgaaatgcatgacttagcatttttattgcttgtgtatccactaagtgaatatgaaggtgctttggattctgcttattatcatgcagacgcttccataaaactwactgacggcaaagaagttaaaagtttgttacaaatgttattattgcatgcgataccaacacctgttatttcagataagaaggcttttgatatcgccaagcaaattttaaaattagatcctaataataatgttgctcgtaacgtcttaaaagacacygccaaacgtatggacaacgttgttgttgatataaatgaattacaccaacgtaatgcacgttaa

SEQ ID NO: 1921 - DNA, 627 bp, Staphylococcus aureus
atgacaaataaagacgaatcagttraaaaaaacactgaatcaacagttgaagaaacaaacrtcaaacaaaatattgatgattcagttgaacaagctgaagaaagtaaaggtcatttacaagatgaagcaatagaagaaacgtctgacgagaatgttattgaagaaatagatccaaaagatcaaaaaattaatgaacttcaacaattagcagatgaaaacgaagagaaatatttaaggctctacgctgagtttgaaaattataagcgtagaattcaaaaagaaaatgaaataaayaaaacatatcaagcacaacgtgtgttaacagatattttaccagcaatagacaatatagaacgtgcacttcaaattgaaggtgatgatgagacttttaaatctcttcaaaaaggtgtacaaatggtgcatgaaagtttgattaacgcactaaaagataatggtcttgaagttattaaaactgaaggtgaagcatttgatccaaatattcaccaagctgtagttcaagatgataaccctgattttgaatctggcgaaatcactcaagaactacaaaaaggatacaagcttaaagatagagtattaagaccatcaatggtcaaagtaaaccaataa

SEQ ID NO: 1922 - DNA, 1068 bp, Staphylococcus aureus
atgatgatgaataaagaagcaacaaaaattggatttgcctacgtcggcattgtagtgggcgcaggattttcaacwggacaagaagttatgcaatttttcactaaatatggcttgtgggcttatttaggtgtyattatatctggttttattttagcttttattgggcgccaagtagcaaaaattggtactgcctttgaagcgacaaaycatgaatcaacattacaatacgtattcggtgaaaagtttagtaaagtctttgattatattttaatcttcttcttatttggtatagctgtaaccatgatagcwggtgcaggcgcaacatttgaagaaagttataacatacctacatggytaggtgcwttaattatgacattagcratttatrtwacrttgctattagactttaataaaatagtacgtgcmctwggtrtcgttacaccatttttaattgttttagttgtattaatcgctggcgtktatttatttaaaggtcatgtttcattagcagaagttaaccaagtagtgcctgaagcaagtatytggaagggaatctggtttggtacaatatatggtggattagctttttctgtaggttttagtaccatcgtagcaatcggtggggatacwgaaaagcgtacagtgtcaggtgcaggcgcgatgtayggtggtattatctatactgtattactagcattgatcaactttgcattgcaaagtgaatatccaactattaaaaatgcctcaattccwacattracrttagcmaataayatycatcckttaatagcaacagtgttatctgttattatgctggcggttatgtayaatactattctaggactaatgtattcatttgcagcacgttttacagaaccrtayagyaaaaawtaycatatctttattrttataatgatgrtagcaggttatttattaagtttcgtaggatttgctgaattaattaataagttatatacaattatgggatatgtaggcytatttattgtagtagctgtaattattaaatatttcaaacgtaaaaatgcggataaaaaacatattgcttaa

SEQ ID NO: 1923 - DNA, 978 bp, Staphylococcus aureus
atgattacagataggcaattgagtatattaaacgcaattgttgaggattatgttgattttggacaacccgttggttctaaaacactaattgagcgacataacttgaatgttagtcctgctacaattagaaatgagatgaaacagcttgaagatttaaactatatcgaraagacacatagttcttcagggcgttcgccatcacaattaggttttaggtattatgtcaatcgtttacttgaacaaacatctcatcaaaaaacaaataaattaagacgattaaatcaattgttagttgagaatcaatatgatgtatcatcagcattgacatattttgcagatgaattatcaaatatatctcaatatacaactttagttgttcatcctaatcataaacaagatattatcaataatgtacayttgattcgtgctaatcctaatttagttatwatggttatcgtattttcatcaggtcatgttgagcatgtacatcttgcttcagacataccgtttartaatgayaaactaaatacaatatcaaattttgttacwaacaaactaactgagtttaatcagaatttacaagatgatattgtctcttttgttcaatcagagcaggaagaaatwtttatcaataaattgwtaaatacgatgaataatcatatttctaatcaaagtaatagcatttatatgggkggraaggttaaacttattgatgcattgaatgaaagtaatgtatcttcaattcagcccattctacaatatatagaatcaaatagaattgcagaattattacaagatatatcttcaccaaatattaatgtaaaaattggtaatgaaattgatgacagcttaagtgatatttcaattgtaacaagtcaatatcattttgatgaaacgttaaaaggtcaaatcgctgtgattggacctacagctatgcattatcaaaatgtcattcaattattaaatagaatttggtaa

SEQ ID NO: 1924 - DNA, 1044 bp, Staphylococcus aureus
atgaataaagataataaatggacgatgataactgcgctttttatarcwgtaatcagtgtattgttarcatttcatctgaaacaacattatgaccaaaytacaaatgagaaccatgctaataaagacaaaattaatattaaaaataaaaatgtgcgcatttatcaaaaccttacatacaatagagtttwycctaacagtaaattagatattattacacctgttgatatgtcttctaatgccaaactgccagttattttttggatgcacggtggtggttatattgcgggtgataagcagtataaaaacccattattagcgaaaattgctgaacaagggtacattgttgtgaatgtaaattatgcattggcgccacaatataaatatcccacaccattaattcaaatgaatcaagcractcaattcattaaagaaaataaaatgaatttacctattgattttaatcaagtarttattggcggtgattctgcwggygctcaattagcwagycaatttackgcaatacagacraatratcrmttaagaraagccatgaaatttgatcagtcattcaaaccatcgcaaattaaaggtgctatactatttggkggtttttataatatgcaaacagttagagaaactgagtttccrmgaatacarttatttatgaaaagttatacwggygaagaagattgggaaaagagytttaaaaayatttcacaaatgtcgacagtaaaacaatcgacaaaaaattatccaccaacatttttatctgttggagatagygatccattcgaaagtcaaaatatagaattcagtaagaaattacaagaattgaawgtaccagtagatacwttgttttatgatggtacgcatcatttacatcatcagtatcaatttcaccttaataaacctgaatcgatagataayatcaaaaaagtgttacttttcttaagtcgtaatacatcytctagtggtattcaaactgaagagaaaccacaaatrgaaaatccgagtaatgaattaccgttaaatccwttaaactaa

SEQ ID NO: 1925 - DNA, 1158 bp, Staphylococcus aureus
ttggataaamagtctgagaagcggggcattaaaatgacrgtacaaagtgcatatatacatattccattttgtgtaagaatatgtacatattgtgatttcaataaatattttatacagaaycaacctgtagatgagtacttagatgcactaatmacagaaatgtctacagcaaaatataggawcttaaagacyatgtatgtaggtggcggcacaccaacggccctttctattaatcagttggaaagattacttaaagcaatacgtgatacgtttacaatcacaggygagtatacatttgaagcaaatcctgatgagttaactaaagagaaagtccaactattagaraaatatggagtaaahagratttcaatgggcgttcaaacattcaarccggagttattgtctgttttaggtagaacgcacaatactgaagatatttacacktcggtgttaaatgctaaaaacgcmggtattaaatcaatcagtttagatttaatgtatcatttaccgaaacagacgattgaagattttgaacaaagtttagatctagctttagatatggatattcaacatatttcgagttacggcttaatacttgaacctaaaacccaattttataatatgtatagaaaaggbttgctyaaacttsctaatgaggatttaggtgctgacatgtatcagttgytgatgtctaagatagaacaatctcctttccatcaatacgaaatatctaattttgcattagatggccatgaatcagaacataataaggtttactggtttaatgaggaatattatggatttggagcaggtgcaagtggttatgtagatggtgtkcgttatacgaatatcaatccagtgaatcattatatcaaagctataaataaagaaagtaaagcaattttagtatcaaataaaccttctttgactgagagaatggaagaagaaatgtttcttggkttgcgtttaaatgaaggtgtgagtagtagwaggttcaaaaagaagtttgaccaatcwattgaaagtgtctttggtcaaacaataaataatttaaaagagaarraattaattgtagaaaagaacgatgygattgcactwacaaakmgagggaaagtcatwggtaatgaggtttttgaagctttcctaataaaygattaa

SEQ ID NO: 1926 - DNA, 429 bp, Staphylococcus aureus
atgacaaggtcagcattaaaaccatttaaaaataaacgcgttatggttactggacgtatacawcgtgtkttgtttaaaaattatttagatagacatagcacatttaagccgaatgtaaggatattattaaaagatgtawttgtttcaggtgtwtcaatagatcatttatggytatatgagacaaataaatactatgcattrgcaatggaacttattcatcaacgagtaaaatttagtgcgaatgttgtaccrtattacaaaataaatagaaataataatttattcgtacaagattatggaattaagcgtaaaggtarkttarttactgaagaagcttacawtcaaaacaatcagtatcaggataaratatatgaaaaattaccggatatagattttagactcgaagatttttatagtaaggaaaactaa

SEQ ID NO: 1927 - DNA, 1824 bp, Staphylococcus aureus
atggataatgagcaacgcttaaaaagaagagagaatataaggaatttctcgattatagcacatattgaccacggaaaatctacattggctgatagaattttagaaaataccaaatcagttgaaacaagagatatgcaagatcagttactagattcaatggatttagaaagagaacgtggtattacaatcaaattaaacgcagtwcgtttaaagtacgaagctaaagatggaaatacttatacattccatttaatcgatacgcctggacacgtcgattttacatatgaagtgtcacgttctttggcagcttgtgagggygcgattttagtagtagatgcggctcaaggtatcgaagcacaaacattagcaaatgtttatttrgcattagataatgagttagagttattgcctgttattaacaaaattgatttacctgctgcagaacctgaacgcgtgaaacaagaaattgaagatatgataggtttagaccaagacgatgttgttttagcaagtgctaaatctaacattggaattgaagagatactwgagaaaatagttgaagttgtgccagctccagatggygacccagaagcaccactaaaagcrttaatatttgattctgagtatgatccatatagaggggtaatttcatcgataagaattgtrgacggtgttgttaaagcyggagataaaattcgaatgatggcsactggtaaagagttcgaagtaacagaagttggaattaatacacctaagcarcttccagttgatgaattaacagttggtgatgttggttayattattgcaagtattaaaaatgttgatgattctagggttggtgacacmatcacattagctagtagacctgcatcagaaccattgcaaggttataagaaaatgaatccaatggtatattgcggactgttcccaatagataacaaaaattataatgatttaagagaagcattagaaaaattacaattgaatgatgcatcattagaatttgagcctgaatcrtcacaagcattaggttttggttatagaactggtttcttaggtatgttacacatggaaataattcaagaaagaattgaaagagaatttggyattgaattaattgcaachgcaccatctgtaatttatcaatgtrttttaagggacggttcaraagtgacggttgataayccagcacaaatgccagaycgtgataaaattgataaaatattygagccatatgttcgtgcaactatgatggttccaaatgactatgtmggtgcagtaatggaattatgtcaacgtaaacgtggacaatttataaatatggactatttagatgatattcgtgtaaatattgtttatgaattacctttagctgaagttgtatttgatttcttcgatcaacttaaatctaatactaaaggatatgcatcatttgattatgarttcatcgaaaataaagaaagtaatttagtbaagatggatattttattaaayggtgataaagtggatgckctragcttcatagtycatagagattttgcatatgaacgtggtaaagcattagttgaaaaacttaaaacgttaattccaagacagcaatttgaagtacctgtacargctgcaataggacaaaaaattgtagcrcgtacaaatattaaatcaatgggtaaaaacgttttagctaaatgttatggcggtgacataagccgtaaacgtaaattacttgaaaaacaaaaagcaggtaaagctaagatgaaagcagttggtaatgttgaaattccacargatgctttyttggctgtattgaaaatggatgaygaataa

SEQ ID NO: 1928 - DNA, 924 bp, Staphylococcus aureus
atgaaacctaaagttttattagcaggtggaacaggrtatattggtaagtatttaagtgaagtgattgaaaatgatgctgaactttttrctatatcaaaatatccagacaataaaaaaacagatgatgttgaaatgacttggattcagtgtgatatatttcattacgaacaggttgttgcmgcaatgaatcaaatagatattgctgtattctttatcgayccaacaaagaattctgccaaaataacacaatcatcagcaagagatttaacattaatcgcagcagataattttggtcgagcagcggctatcaatcaagtaaaaaaagtaatctacatacctgggagtcgttatgataatgaaacaattgaacgcctaggtgcatatggyacamctgtagaaacaacaaatttagtttttaaacgttctttagttaatgtagaattacaagtttcaaagtatgatgatgttagatcaacgatgaaggtagttttaccaaagggatggacattaaagaacgttgtaaaccattttattgcatggatgggttacactaaaggaacttttgtgaaaacagaaaaatcacatgatcaatttaagatatatattaagaataaggtgcgaccrctcgcagtatttaaaatagwagaaacagctgayggaataataactttaattttattgagtggaagtttagtgaaaaaatayacagttaatcaagggaagttagaatttagattaatcaaagartcrkcagtcgtttatatacatctatacgattatatccctcgattattttggccgatttattactttatacaagcaccaatgcaaaaaatgatgattcatggctttgaagttgactgccggattaaagattttcaaagtcgattaaaatcaggagaaaatatgaaatatactaaatga

SEQ ID NO: 1929 - DNA, 975 bp, Staphylococcus aureus
atgagcgacaatattgtagctatttatggagatgtgcctgaattggttgaaaaacaaagtgcagaaatyatatcacaatttttgaaaagtgatagagatgactttaactttgtgaaatataatttatacgaaamagagattgcaccaattgttgaagaaacattaacattgcctttcttttcagataaaaaagcaattttggttaaaaatgcatatatatttacaggtgaaaaakcgccaaaagatatggctcataatgtaratcaattaatagaatttattgaaaaatatgatggcgaaaatttgattgtctttgagatatatcaaaataaacttgatgaaagaaaaaagttaactaaaactctaaaaaagcatgcaaggcttaaaaaaatagagcaaatgtctgaagaagaaataaaaaaatggattcaaagtaaattaaatgagaatttcaaagatatcaaaagagatgcattagatttatttattgagttgacaggtattaactttaatattgtctcacaagagatagaaaagttgattttatttttaggcgatagaccaacaattaataagcaggatgttaaccaaattattaatagaagtttagarcaaaatgtatttttactgactgaatacattcagaaaagaaagaaagaacaagcaattcatttagtaaaagatttaataacwatgaaagaagaaccwattaaattacttgcactaatyacaagtaattaccgattattttatcaatgtaagattytgagtcaaaaaggatatagtggacagcaaattgctaaaacaataggmgtrcatccatacagagtaaaattagcgttaggacaagtaagacattatcaacttgatgaattattgaatattrtagatgcttgtgcggaaactgattataaacttaaatcatcatatatggataaacagttaatactggaattattcattctatctttataa

SEQ ID NO: 1930 - DNA, 684 bp, Staphylococcus aureus
gtgatatggatgcaaatactactagtagaagatgacaatactttgtttcaagaattgaaaaaagaattagaacaatgggattttaatgttgctggtattgaagatttcggcaaagtaatggatacatttgaaagttttaatcctgaaattgttatattggatgttcaattacctaaatatgatgggttttattggtgcagaaaaatgagagaagtttccaacgtaccaatattatttttatcatctcgtgataatccaatggatcaagtgatgagtatggaacttggcgcagatgattatatgcaaaarcckttytatacmaatgtattaattgctaaattacaagcgatttatcgwcgwgtstatgartttacwgctgaagaaaaacgyacrttracwtggcaagatgctgtcrttgatctatcaaaagatagtatacaaaaaggtgaysakacgattttyctrtccaaaacagaaatgattatwttagaaattcttattacyaaaaaaaatcaaatcgtttckagrgatacaattatyactgcrytatgggatgatgaagcatttgtyagtgataayacrttaacagtwaatgtgarycgwttacgwaaraaaytatctgaaatwrgkatggayagygcaatygaaacaaaagtaggaaaaggatatatggcwcatgaataa

SEQ ID NO: 1931 - DNA, 2148 bp, Staphylococcus aureus
gtgctctctacatttcttttyattttacttttgtatattrcttatcgtaaaaataaaatcgtwtatgcccctatttctctctttttaatcattttctcckcatggtatttacattattcacaacaagcaatatttaattatatcaattatattgaacgtaattctcagtttaatgagcgtgctcaagtaatccaaattcaacgtcaaggtagtgacacatataaaggtaggttgagtttaaaaaatgaaatatatcctttctttttaacarataaaaagaattttgatttaaagaaaattgaaagtcgtaattgtattgttaaaggacaattcaaagttaatgamaataagtttgtaactcttaaattacaaagtatagttgtacaaagctgcctagaatcgaaccggtctaatttaattgagaaacataaacagtttataatgaatcgaatttatgattcgggtattaagtttccggatcgtattatggcattgattactggtgacgtaaaagaarttaatgagcaatttaaggaacgtgttaaagarataggtatatatcatttgctggcagttagtggctcgcatatagctgcaattgtattyttaatttacmaacctttaaaacgattaaatttacctttatttgtcattaaaggaattacaatcattgtattarcyttatwtgctcaatacacaaattatgcacctagtgctgtaagagctataataatgacaackcttgtactgsttattactaakcaaattaaaataaagrgtattcagctwttagcatttgcatttataattatgtttattttaaayccactagttgtttatgatattggatttcaattttcattcatcatttcattttttattatgytactttttccttttttacagcaattgtcraagttacaatcattattcataattacgtttattgcacaattagcttcatttatcgttgccattccaarctttcatcaacttcaatgggtgggatttttatctaatttgatttttgtaccrtactattcgattatattgtttcckctatctattttattctttattacaagtcattttattgtgggattaacgccgctaaattacttggttgacctaagttttaattttcatgactggttactagacctattcacaagaatyaagcaatcacatttttctgttmccaagtttaatgattggatatttatartatttataatttcygtttattacatattttggttattggctaaacgtaaatatatattggttacgktttggactataattattctgacattattaataacgtttccaacaaattcacatcacaaaattacaatgttaaatgtggggcagggagacagtattttatatgaaggyggtaagaaccaaaatgtcttgattgatacaggtgggaaagtgattgatgatactaaacaacctagttattcaatttctaaatatcatattttaccaacgctaaatgaragagggataaatgaattagagtatctaattttaacacatccacacaatgaccatattggtgaaktggaatatattattagtcatattaaaattaaacatatagwgatatacaataagggatatagtagtaatacattgatgttattatcgaaattaagccataagtayaacattaaacttatrgatgtaagrcaagttagtagttttaaacttggagatagtagttttctattttttgatagttttattccaaatagccgagataaaaatgartaytcgattattactatgattacatatcaaaataaaaaagttttattaatgggcgatgctagtaaaaataatgaatctttactwctaaaaaaatataayttgccggagattgatattttaaaagtaggwcatcatgggagyaagacaagtagttctaaagaatttatagagatgattaagcctaaaataagtttgatttcttctggraagaacaatatgtatcatcttcctaayatagaagttgttaaacgattgcaaaggattcgcagtcgcatttacaatagycaacaaaacggtcaagttacaatwgacttagatgataatttaaaagttgattcaarctcttatggaaatgcaagtggtttatag

SEQ ID NO: 1932 - DNA, 432 bp, Staphylococcus aureus
atggcacaaagtcatttgctagcattacgttcaacttgtcaaagattatctgtaggtgcaacgattgttaaggataatcgtattattgctggtggttataatggctctgtagctggcgaggtgcattgtatagatgaaggrtgtttaattgaagatggacattgtatcagaacgatacatgcagaaatgaatgctttattacaatgtgcaaaacaaggtgtatctactgaaggtgcaacaatctatgttactcattttccatgcctaaattgtacaaagtcaattattcaagcaggtataaagcgtatctactatgcagaagattatcataaccatgaatatgcaactaaattactcaaacaatctggtattgaatttaaaaaaattccattttcaccwgaatatgttgctraatatctgactaaaggttra

SEQ ID NO: 1933 - DNA, 687 bp, Staphylococcus aureus
gtggttttattgtatcaatttttattacgctataaagattttttarctcartggaagttatatattmtaagtgctgttgttttaattatggtattaattggttttatattctggagacaagatgattatacttcaagarattttgaaaataaagatamtgytctgaaacaaagcactagtgaaaatartagtttgtccaaaktagaagatgtccaggtcaaagatggagataattccaaaaataarggtcctgtatatgtcgatrtaaaaggtgctgttaaacatcctaatgtttataaaatgacatctaaggatagagtagttgatttacttgataaagcacaattattrgakgatgcagatgtaagtcraattaatttgtctgaaaaattaacagatcaaaaaatgattttcatwcctcataaaggacaaaagaatgttgaaccacaawttgragyaaacagtgtgcaygwaaaaaatgggaacacaaataatactaaagtaaatttaaatacsgcatctgtatcagaattgatgtctgttcctggagtwgggcaagctaaagctaatgcaattgttgaatatcgcaaccaacaaggtgcatttcaagaaattgacgatttgaaaaaagtaaaaggttttggaagtaaaacttttgataaactgaawtcttatttcacgayataa

SEQ ID NO: 1934 - DNA, 1890 bp, Staphylococcus aureus
atgacctttaacgagataatatttaaaaatttccgtcaaaatttatcacattatgccatctatcttttttcrttaattacgagtgtagtattgtattttagctttgtagcattaaaatacgckcataaactaaacatgacagagtcatatccaattatwaaggaaggctcacaagtcggaagctactttctatttttcatcataattgcatttttgttatatgccaatgtgttatttattaaacgacgaagttatgagcttgcattatatcaaacattaggtttatctaaattcaacattatttatatactaatgctcgaacaattactaatatttataattacggcaatattaggtattattattggtatttttggttcraaactgttattaatgattgtctttacattattaggaattaaagaaaaggttccaattatttttagtttgagggcggtatttgaaacattaatgttaatcggtgtcgcttattttttaacmtctgctcaaaattttatattagtgttcaaacaatctatttcacagatgtcaaagaataaccaggttaaagaaacaaatcataataaaattacatttgaagaggttgttttaggcatcttaggtatagtattgattaccacaggatactatctatctttgaacattgttcaatattatgattctatcggtayacttatgtttattttattgtcaactgtgattggggcatacttattttttaaaagctctgtttctctagtttttaaaatggtgaagaagtttagaaaaggtgttataagtgtaaatgatgtcatgttctcatcatctattatgtatcgtattaagaaaaatgctttttcacttacggtcatggcaatcatttcagcgattactgtttcagttctttgctttgctgctataagtagagcgtccttatcaagtgaaataaaatatactgcaccacacgacgttacaattaaagaccaacaaaaagctaatcaattagcaagtgaattaaacaatcaaaaaattcctcatttttataattataaagaagtaattcatacgaaattgtataaagataatttatttgatgtaaaagcgaaagaaccatacaatgtaacaattactagtgataaatayatccctaatactgatttgaaacgtggrcaagctgatttrtttgtagcggaaggttmtatcaaagatttagtgaaacataagaagcatggtaargcarttataggaacgaaaaaacatcatgttaatattaagttrcgkaaagatattaataaaatctattttatgacagatgttgatttaggtggaccaacgtttgtcttaaatgacaaagactatcaagaaataagaaagwatacaaargcaaagcatatcgtctctcaatttggattcgatttgaaacataaaaaagatgctttagcattagaaaaagygaaaaataaagttgataaatctattraaacaagaagtgaagcgataagctcaatatcaagtttaaccggaatattattatttgtaacatcatttttaggtattacattcttgattgctgtatgttgcattatatacatwaagcaaatagatgaaaccgaagatgagttagagaattatagtatwttgagaaagcttggatttacacaaaaagatatggcaaggggactaaagtttaaaattatgtttaattttgggttacctttagttattgcactatcacatgcatattttacatcattagcatatatgaaattaatgggtacaacgaatcaaataccggttttcatagtaatgggattatacatttgtatgtatgctgtttttgcagtgacggcttataatcattccaagcgaacaattagacattccatataa

SEQ ID NO: 1935 - DNA, 717 bp, Staphylococcus aureus
atgtcgcaatatgcagaaatgagcctagtgtacgatcaattgactcaagatcaaccatatgaaaaatggtttgaaattgtaaaaaatcactgcaaagatgaatcaaatattttagatattggatgcggtactggtagtttaacagttcaattagaagctttaggtaatgttactggtatggatttaagtgttgatatgttgactgttgcagctcaaaaatcagcaaatgtaaattggcttgaaggagatatgacatcktttgatttgcaacaacaatttgatatcatcactattttttgtgactctctaaattatttgcaagatgaaactgcwgtkattgaaacattcatcaatgtttatcrtcatctgrctgattcaggtgtatttatttttgatgtacatactgtttataaaatgatgactttgtttaataatcaaagttatattgatgataaaggggacatttttttagcatgggatgctgtgcaaggagatttacctttaagtgtttatcatgatatgacatttttcattcgacatgaagatgaaacatattcaagatttgaygagtctcattttcagagaacatttgatgaaaagacatatttgtcttggttarctcaagtyggttttaaacatgttgaaacatttactgattttaatatagatgaacataatgaagatrcagaaagattgtttttcattgcgaaaaaataa

SEQ ID NO: 1936 - DNA, 618 bp, Staphylococcus aureus
atgtttagtaagaaaaaagataagtttatggttcaattagaagagatggttttyaayctrgatcgtgcwgctattgaattcggtaaaatggatttcaatacacatytagatttaaargcatactcagacaacattaaaacttatgagtcacatggtgacgaattagtacatcaagtaattactgatttaaatcaaacatttatcacaccaattgaacgtgaagatattttatcattatgtgatgcaattgatgatgttttagatgcaattgaagaaacggcagctatgtttgaaatgtattcaatcgaatacacagatgaatatatggctgagtttgttgataacattcaaaaagcagttgcagaaatgaaacttgctgtcggcttattagtcgataaaaaattatcacatatgcgtattcattcaattaatattaaagaatttgaaacaaactgtgatggtattttaagacagtcaattaaacatattttcaatagygaaacagatccaatcacwttaattaaaataaaagatatttatgaaagcatggaagaaatygctgataaatgtcaaatcgtagcaaataattttgaaactattattatgaaaaatagctaa

SEQ ID NO: 1937 - DNA, 354 bp, Staphylococcus aureus
atgaattcacaagaattattagcaattgctgtggatgcaattgacaataaaaaaggcgaagatacgatttctttagaaatgaaaggtatcagcgatatgacagattattttgttgtaacgcacggaaataatgaacgacaagttcaagcgattgctagagcggtgaaagaagtagccaatgaacaaaatatagaagtaaaacgtatggaaggwtacaatgaagcgcgttggatattaattgacttagctgatgttgtggtacatgttttccataaagacgaamgaaattattataatattgaaaagttatatcaagatgcaccattagaatcatatrgtcaggttgcgtattaa

SEQ ID NO: 1938 - DNA, 1593 bp, Staphylococcus aureus
atgtcaaatttattagaagtcaacagtctgaatgtacaattcaattatgatgaaactacagttcaagcggtaaaaaaygtctctttcgaattacgaaaaaaacatatcctaggtattgttggtgaatcaggatcaggaaaaagtattacygctaaatctattttagggctactaccagattatccrgatcacacrttaacaggagaaattatttttaatgggcaatcgttaamtaatttatcaacttcagcgttacaacaaattcgaggyaaggatatttcaatgatttttcaagatccactctcttcgttgaatccaagattaacgattggcaaacaaattacagaagtamtatttcaacataaacgtgtatctaaatctgaagcaaagtcgatgacaataracattttagaaaaagtaggtataaaacatgcaactcgacaatttgatgcttatccrcatgaactttctggtggtatgcgtcaacgtgtcatgatagcaatggcattgattttaaagccacaaattttaatcgcagatgaaccaacaacggcattagatgccagtacacaaaatcaattactgcagttaatgaagtccctttatgagtacacagaaacrtctattatttttatcactcacgatttaggygctgtgtatcaattttgcgacgatgtgattgtaatgaaagatggaagtgtcgttgaaagtggcacggttgaaagtatttttaaatcgccacaacatacctatacraaacgcttaatagatgcgattcctgatattcatcaaacgcgtccgccaagaccgttaaacaatgatattttattaaaattcgatcgcgtgagcgtggattacacatcaccgagtggcagcctataccgagcagttaatgatattaacttggstattagaaaaggcgaaacrttaggcattgtcggtgaatcagggtcagggaaatcgacattagctaagacggtcgtcggtctaaaggaagtgtcagaaggctttatttggtataacgaattaccattaagtttatttaaagatgatgaattgaaatctttacgacaagagatacaaatgattttycaagatccattcgcatctattaatccaagatttaaagtcattgatgtgattaaacgaccactaatcattcatgggaaagtcaaagataatgaygacattattaaaactrtcgtatcgttgttagaaaargttggcctagatcaaastttcttatatcgctatccacacgaattatctggtgggcaacgycagcgtgtaagtatcgcragagcacttgctgtwgaacctaaagtgattgtttgcgacgaggcagtrtcmgctttagacgtttcaattcaaaaagatatcatcgagttattaaaacaattacagttagacttcggcatcacttatttattcatcacacatgacatgggtgttatcaatgaaatatgtgatcgmgttgcagttatgaaaaatggcgaaatcgttgaactkaataacacagaagatattatcaaacatccgcartcagactatgcaaagcaacttatttcagaagtagcagttattgctaaataa

SEQ ID NO: 1939 - DNA, 1008 bp, Staphylococcus aureus
atgtcatatataatcatcgtcactatagctgtagttattttctcgctgatatttgactttatcaatggattccatgatacagccaatgcagtagctactgctgtatctactagagcgttaacgcctaaaacggcaattttaatggcagcagtgatgaactttataggtgctttaacatttacgggcgttgcaggcaccattactaaagacattgtcgatccatttaaattggaaaatggattagttgttgtgttagctgcaatacttgcggctattatttggaatttagctacttggttttacggaattccaagttcgtcttcacatgcacttataggttcaattgcgggtgcagcaatcgcatctgaaggctcatttggmgtrttacattaccaaggtttcacaaaaattattattgtattaatcgtttcaccgatwatcgcattttgtgttggtttcttgatgtattcaatttttaaagttatctttaaaaatgcaaatttaacaagagcgaatcgtaactttagatttttccaaattttcacrgcagcgttacaatcattctctcacggtacgaatgatgcgcaaaartcaatgggtattattacgttggcattrattgtygctaatgtacagaatgatggcagygttgaaccacagttatgggtaaaatttgcctgtgcgacagcaatggggcttggtactgcaattggtggctggaaaattatcaaaactgtaggtggtaatattatgaaaatacgyccagcaaayggtgctgcggccgatttatcatctgcattaacaatttttgttgcatcatcgctacatttcccattatcaacaactcacgttgtgtcatcatcaatcttaggtgttggtgcttctaaccgagctaaaggtgtaaaatggagyactgcgcaacgaatgatcattacatgggtgattacattacytatttcagcattgttagcaggtttaytattctatatacttaayttatttttctaa

SEQ ID NO: 1940 - DNA, 585 bp, Staphylococcus aureus
atgaacattgaaaaagcaaaacggcttkcaaaagagaaactgccagagaaacgttataatcattctttaagagttgcagaaacagckattaaattrgcagaaatttatgatggagacactagtaaagtagaattagcaggtgtattacatgatttctgtaaatatgatgatttaggtaaaatgtatcaaattgttcgacaatacgaattaggtaatgatctactgagttatggtagtgaaatattgcatggcccwgtgtgtgcagcaatcatggaacatgaatatggtatcaatgatgaggaagtattaatggctatcaaataccatactackggacgtcaacaaatgacaaaaactgaaaaactgatttttattgcwgattacatcgaacctggwagaacaatcccaggagttgatgatattcgagatatggcatacaatcaaggtagtttagataagacaatttatgaaatttctaaacgcacagtactatttttaatacagaaagatattacggtatataataagacrattgactgtttaaattattataactatagtgacgaaagaataaaggatgattaa

SEQ ID NO: 1941 - DNA, 645 bp, Staphylococcus aureus
ttgtcgcaaaatacaaatcattcatattatcatcaaaaccagcatgctcaakcaataagtaaagtgtggctttattttatgtattattggattatatttggcataggatgctatctaggtcagtttttaccattaagttggcgacaacccttgtcatttggattactgattattattttagcaacacttgtttttgaaagagcgagacggttcggtttaattatttcacatatwtacgctgtagtgatyggcttattgtcatacgcaacgtttaccacgtatttacaaaatttaggaccagatattttctataaaaatatcgcattagcaatttttgcatttatagcatttggtattattggttatttcttcgttggagatgcatcgagtataggcaartatttattcgttacattaataacattaattattgcgagtctaattggtatttttcttcaaaatcctattttttayactattattaccgtcgttagtytgttgttatttctactttatactttgtatgattttaatcgtttaaaaagaggtgactattcaccaagagaaatgggatttaatctatttattaatttgttgaatattattaaggatatactttaycttgctaatatgttcagaagataa

SEQ ID NO: 1942 - DNA, 570 bp, Staphylococcus aureus
atgaaaargatagtactttacggcggtcagtttaaccctatccatactgcacatatgatagtagctagcgaagtatttcatgaattacagccagatgaattttattttttacctagttttatgtctccattgaaaaagcacmatrattttatagaygttcagcacagattaacaatgatacagatgrttatcgacgagcttggttttggagatatttgygacgatgaaattaaacgtggtggtcaragttatacctatgacacgatcaaggcattcaaggagcaacacaaagacagtgagttgtactttgttattgggacggatcagtataaccaactagagaaatggtatcaaattgaatacttaaaagaaatggttacttttgtagttgtaaatcgagacaaaaatagtcaaaatgttgaaaatgstatgattgcaattcagatacctagggtagatataagttcgacaatgattcgacaaagagttagtraaggkaaatctatccaagttcttgttcctaaatccgttgaaaactatattaagggggaaggattatatgaacattga

SEQ ID NO: 1943 - DNA, 2151 bp, Staphylococcus aureus
atggcaaaatcatgcttgcatatacttactaataatgaatatgcgacaacgcgttgccaagatggcatagtcttattttggccaattgacggggaaatcgaactacaaaaatttcgtaaaagtaaaataattgaagatgatatatatattattaatcatctggatgtatttagtattaagaataataaaaaaacgatcatgttgtatttgagtagcgattggtttgcggaattaggctttactttctttaattaccactatacagcaaagttrattaaatcatcytataatttgaaatgtytactattaaaattgacwtatcgataycttgataatcarcctctyaatgacgctgatrttagaaaattacaggatattattaaaatyattgcaaaagaagcaagtatggataaaaagattgcrcaaaatcaatatcgatatgcbtattatggtgatttrcgtgaygagctcgaatatatttatcaaaatgtaaatcaacgattgacattaaaaagtgtcgctgataaattatttgtctcaaagtcaaatttgtcatcacaattccacttacttatgggcatgggttttaaaaaatatattgatactttgaaaattggtaaatcgattgaaattctacttactactgatagtactatwagcaacataagtgarcatttaggttttagtagtagctcmacttactctaaaatgtttaaaagttatatggatataacaccgaatgaatatcgtaatttatcaaaatwtaataaatstwtaatgctwaakccagarccactwgtaggcrrwatggygcaagaagtaaaagaartcatattgaattatattgawcattataaaaaycacctaactgatgttatacatattgaygaagacaaatttgaaayacctaarttrtttcaaacggttattcaaatwaatacttatacagaaatgaaaytagttttcttagaaggamtytttaaaaccttattgaataagaayagycaagttgtctttttcatcatgccatcgattytaaaaagtaaaaataccatgtccgaagaagaaaarttyacaatcattaaaacmataattgaaagtratytaaagatagcatttaatataaatratattgaaacracttattwtgttgaagaagcttttatgartgttwtyagacaawtatctccaaacgaawtaartmatcataataattacgaagtgcattttgtttttgatttatcattgatggaaattagracaatttaycgwatgatwttaaaaytacataacatcatgttraatgtgaaattaggattgaayattacctgtttatttgawaaaccttcagtttttaaatcactagtatcacaaataaagcgacttaaattcgattcgttaataatagataatgcaaatttaagtagcccttatttgatgggggaaagtgatgagttactattgaaaaatattttgcattttaaaaatttaaaacaagtwattaaygaattggatatwgaacaagaaaagctkatttttctaaatgttgaaaatcataaactgcttaataataaagaacgagatytaagtaatagtgctccattaatttataagacattaagtgcgctgtatcayaactttsatggytttggattaaacatttttgayaatcatcawrcatttaatgcgatgcatctatatgayaaaaatggatttaaaacaacactaggtcttatattrgaaaartttatcgaatatgtctcgaaaccaaaatacgaaaacagttattattctatttttgatatagagaattattattgyctkgttatttatgattggcgagtgatwgagagcgagacaattatgagyaattttgargatagtcaagtttatatwaatttyaaaaayaatrttttaaacgataaatatctaattgtaatagaaacrttggaygaaaatagtggsaacattaatcatttgatytctaaagaattaagagataaatatgaatggaaccyyagtttactmtctaaaattgacaactaccttaaaccrgcaatmgagattaaagagcataaytttagtrataattccttraatattaacgttacttttaatgcgttatacataattaaaataggaaaaaaataa

SEQ ID NO: 1944 - DNA, 291 bp, Staphylococcus aureus
atgcttactggcaaacaaaaaagatacttaagaagtttagcacacaatattgatccgatttttcaaattggaaaaggcggtatcaacgaaaayatgattaaacaaatagatgatacgttagaaaacagagaattgattaaagtacatgtactacaaaataactttgatgataaaaaagaattagctgaaacattaagcgaagctackcrtagtgaattagtgcaagtgattggatctatgatmgtgatttatagagaatctaaagawaataaagaaattgaattgccataa

SEQ ID NO: 1945 - DNA, 426 bp, Staphylococcus aureus
atggcwraaaaatttaagataataatgacagaagcattgtctttatatatttgggggtgcaacattttgaatactgagaaattagaaacattgcttggcttctataaacaatataaagcattatctgaatatattgataaaaaatataagttgtcgctaaatgatttagcagtcttagatttaacgatgaagcattgcaaagatgaraaagtacttatgcaatcatttttaaaaactgcaatggatgagctagatttaagtaggacaaaattattagtttctataagaagactaattgaaaaagaaagacttagtaaagttagatcatctaaagatgagcgtaaaatttatatttatttaaatratgatgatatatctaaatttaatgctttatttgaagatgtagaacaatttttaaatatttaa

SEQ ID NO: 1946 - DNA, 807 bp, Staphylococcus aureus
atgaaatttgcagttatmggaaatcctatttcacattccttgtcgcccgttatgcatagagcaaattttaattctttrggattagmtgatamttatgaagctttaaatattccaattgaagattttcatttaattaaagaaattatttcraaaaaagaattagawggctttaatatcacaattyctcataaagarcgtatcataycgtatttagatyatgttgatgaacaagcgattaatrcaggtgcagttaayactgttttgataaaagatgrcaagtggatagggtataatacagatggtattggttatgtwaarggattgcacagygtttatccagatttagaaaatgcatacattttaattttgggmgcaggtggtgcaagtaaaggyattgcttatgaattagcaaaatttgtaaagcybaaattaactgttgcgaatagaacgatggctcgttttgaatcttggaatttaaatataaaccaaatttcawtrgmagatgctgaaaagtatttagctgaattcgatatygttattaatacaacaccagcgggtatggctggaaataacgaaagtattattaatttaaarcatctttctcccaatactttaatgagtgatattgtttatataccrtataaaacacctattttagaggaagcagagcgcaagggaaaccatatttataatggcttagatatgtttgtttaccarggtgcggaaagctttaaaatttggactaataaagatgctgatattaattctatgaaaacagcagttttacaacaattaaaaggagaataa

SEQ ID NO: 1947 - DNA, 717 bp, Staphylococcus aureus
atgggacgtaaatggaataacattaaagaaaaaaaggcccaaaaagataaaaayacaagtagaatatatgcgaaatttggtaaggagatttatgttgcagcaaaatctggtgaaccmaatccagaatctaaccaagctttaagrttggtrcttgaacgcgctaagacatattcagtrccgaatcatattattgaaaaagcaatagataaagctaagggtgctggagacgaaaactttgatcacctaagatatgaaggatttggcccaagcggatcaatgctwattgttgatgcgttaacaaayaatgtaaatcgtactgcmtctgatgtgcgwgctgcttttggtaaaaayggcggtaatatgggtgtatctggrtcagttgcttatatgtttgaycatgtggcaacatttggtattgaaggwaartctgttgacgaaatacttgaaacattaatggaacaagatgtagatgtaaatgatgtgattgacgataatggattgacaatagtctatgctgaaccagatcaatttgcagtcgttcaagatgcgcttcgtgcagcaggtgttgaagaatttaaagttgctgaatttgaaatgttacctcaaacagatattgarctttctgaagcggaccaagtaacatttgaaaaattaatcgatgcattagaagatttagaagatgtacaaaacgtattccataatgtggatttgaaataa

SEQ ID NO: 1948 - DNA, 1101 bp, Staphylococcus aureus
ttgtctgacattttaaaatgtatcggttgtggtgcgccacttcaatctgaagataaaaataaacctggktttgtaccagagcataatatgtttsgtgatgacgtgatttgcagacgttgtttccgcttgaaaaattataacgaagttcaagatgtaggattagaaagtgaagactttttaaaattattatcaggacttgcggataaaaagggtattgtcgtcaatgtygtggatgtatttgactttgaaggatcatttattaatgcagttaaacgtattgtcggaaacaaaaaaatcattttagcagcaaataaattggatttattgccgaarcaaattaataaacgtcgagttaaagaatggytaaaacgaacagcaagaaaatatrgtttggaagctgacgatgtcgtattaatttcagctgaaaaaggctggggcatagacgacttattatcatcaattgcgaatattcgagaaaatgaagatgtgtatattgtagggacaacgaatgttgggaaatctacattgattaataaactgattgaagctagtgttggtgaaaaagatgtagtaacaacttcaagattccctggaacaactttagatatgatagatattccwttagatgaawcatcatttatgtatgatacaccaggtattattcaagatcaycaaatgacgcatttagttagtgaaaaagaattgaaaattattatgcctaagaaagaaataaaacaacgcgtatatcaattaaaygaggcgcaracattattcttcggcggtctagcgcgcatagattatgtatcaggtggtaaacgtccgttartttgtttcttttctaatgacttgaatatacatcgtactaaaacggagaaggcyaatgatttatggcgtaatcaacttggcgatttattaacgccacctggaaatcyacaaaattttgatcttaatgagktaaaggctgttagacttgaaacaggcaaagagaaacgygatgttatgatctctggtctaggctttataactataggaccaggrgctaaagtaatcgttcgtgttcctaaaaatgttgatgttgtattaagaaattctattttataa

SEQ ID NO: 1949 - DNA, 474 bp, Staphylococcus aureus
atgaaatcagcagaacaatggattgatgaattgcaacttgaatcrcatcctgaaggtggtttctatagagagacaatycgagaagtattgaaagatggacgmagagcgccgtttagtagtatttattttttrcttacagatgacaatatttcgcattttcatcgaattgatgctgatgaagtatggtactatcatgctggygattctctaacaattcatatgataaatccggatggggaatatacgactgcaacattgggtactgatatccaaaatggagatgtattgcaatatgyagtgcctaaaggaacaatttttgcttcttcaatcgaawtwtcaaatacttwtagtttagtaggttgtatgtgtcaaccrgcatttgagtttaagcagtttgaattgtttaagcaatctgaattaattacrcaatatccgcatcttaaatcagtratygaaaaatatgctttaaaataa

SEQ ID NO: 1950 - DNA, 528 bp, Staphylococcus aureus
atgggtttagttcgcaagttttttatgccgaattcatatgttcaatcaatatttcaaattgatttagacaagttagtggacaaaggcgttaaaggtattattacagatttagataatacgctagtaggttgggatgttaaagaacctacagaacgtgttaaagcatggtttaaggaagctaatgaaaaaggaatcactattacaatygtgtctaataataatgagtctcgtgttgctagttttagtcagcatttagacatcgattttatttttaaagcgagaaagccaatgggraaagcgtttgataaagcaataactaagatgaatatmagaccwgatcaaactgttgttataggtgaccaaatgcttactgatgtatttggtggtaaycgtcgaggtytatatacaattatggtygttccagttaaacgaackgatggctttattactaagkttaatagattaattgaaagacgattattacgtcatttcagtaaaaaaggttatatcacatgggaggaaaattga

SEQ ID NO: 1951 - DNA, 117 bp, Staphylococcus aureus
ttgrtgcttcagctgwttttaatgaaaatagcattaaatgattttgaaaamgataagagtgtgttatttatatttttgaaaaatcacttttatgaagaaatgtgtgtactatctaat

SEQ ID NO: 1952 - DNA, 687 bp, Staphylococcus aureus
atgattggtataattggtgccatggaagaagaagtaacaatattaaaaaataaattaacacaattaagcgaaatttcagttgcacatgttaaattttatactggcattttaaaagatagagaagtagtgattacccaaagyggcattggaaaagttaatgctgcaatttctacgacattattaattaataagtttaaaccggacrtcattattaatacaggttctgctggagctttagatgaaagtttaaatgtaggtgacgttcttataagtgatgatgtaaaatatcatgatgcrgaygcaacagcatttggttatgaatatggacaartaccacagatgccggtagcatttcaatcaagtaaacctttaatagaaaaagtatctcaagttgtacaacaacaacaattaacagctaaagtaggcttaattgtaagtggtgatagctttatcggtagtgttgaacaacgycaaaaaattaaaaaagcatttccaaatgcgatggcggttgaaatggaagcaactgcaattgcacaaacatgttatcaatttaatgtaccatttgttgtagttcgtgcagtttcagacttagcaaatggagaagcggaaatgagyttcgaagcatttttagaaaaagcagckgtatcatcaagtcaaactgttgaagcattagtgtctcaattataa

SEQ ID NO: 1953 - DNA, 645 bp, Staphylococcus aureus
gtgaaagtaaagtatatagataaacgtcactggcgtcgcctaattgatagggaatacacagaggtaaaagttaataataataggttyaagggtattataggcttagtcacgatgaaaaaggttcgtgatcctttagaggtgacggtagttggacaaaatatyattgtcgcagatgacaattataaatggttgcaaatactacctgaaaagaaacgttatagtatwactgtaatgtttgataataaaggcaatccattagaatattaytttgatataaatatyaaaaatataacgcaaaaaggtaatgcgcgtacagtagatttatgtttagatgttttagcrttaccwagtggtgaatatgagttggtagatgaagatgayttaatgtttgcattagaaagtgagcaaattacaaaaaagcaatttcatgaagcatatatgattgcrcatcaaattatggcagagttagaaaatgattttaaaggattccaaaagaaaatcatgtactgctttaataaaattaatgcaaaggctcaaaaaawtcatcaaaagccacaaaataaaactaatwttgaaaaaagcaaacaaataaarcctaagcaatataatcaaactaaaaatcaccaacaacaaaagaaaaactaa

SEQ ID NO: 1954 - DNA, 867 bp, Staphylococcus aureus
atgaagattgaagactatcgtttactaataacattagacgaaacgaaaacgttacgtaaagcggctgaaattttatatatatctcaacctgctgttacacaaagactaaaagctattgaaaatgcttttggagtagatatttttatcagaacaaaaaaacaattgattacaacaactgaaggaacaatgattattgagcatgcycgtgacatgttgaaaagagagcgattattttttgacaaaatgcaggcacatattggtgaagtgaatggaacratatcaatcgggtgttcttcwttgattggacaaaccttacttcctgaagttttgagcctatataatgcccaatttcctaatgttgaaatwcaagtrcaagttggttcaactgaacaaattaaagcaaatcatagagattatcatgttatgataactcgtggaaataargtaatgaatttagctaayacacatttatttaatgatgatcattattttatttttccraaaaatagacgagatgatgttacaaagttaccatttatagagtttcaagctgatccgatttatataaatcaaataaaasaatggtataacgataatttagaacaagattaccatgcaactattacagtggatcaagtagcaacttgcaaagaaatgttgattagtggtgtaggtgttacaatyttgccrgaaatyatgatgaaaaatatcagcaaagaacaatttgagtttgaaaaagtagaaattgataatgaaccgctgattcgttcgacatttatgagttatgatccgagyatgttgcaattrccacaagttgattcwtttgtaaatctyatgrcgagctttgttgaasaaccaaaggcgtag

SEQ ID NO: 1955 - DNA, 1221 bp, Staphylococcus aureus
atgggttacagaactttaaaaagtatttttcatgaacacaatgaaagtaaaatgaaggaagagtataytaarmgatttaattctttagcwtctttcaatactaatattaatatcatacctatggaaaatggaaaaaaagttaatgatttggaatatcctctattctttatggtgactaaaaatctatcaaaaaaacaagaattaatatcaattaatagtagaaaaattgatagagcacttaattctttaccatatgcagctagagaacaatattttaatgatttattaatcgatgaattacaaagtactaatgaaattgaaaatgtatttagtactaaacaagagattgcacatgcgttaaataaccaagcatcagaatttcttaagttcagaggcctcgtggatcaatataaagagatagaacttaataaaaaaattaaagttgataatgtaagagacattagagcgatttatgataaattagtttcaaatgaaattaacgaacaagataagttagatggagagctatttcgtaaaaattttgtcggtgtgcatgatgggtcaacgaataaatatatacatgttgggttacaacctgaaaccaaaattgttgaatwtataggtgaaatgctaacatttttaaaatattttgatgcgcctcagccgttcaaaatcatggctagtcattatmtgtttgaatatatacatcctttttatgatggcaatggtagagttggaagatttataattgccaagctcttgagtgattattatgataattatactgctttgacattttcatatgttataaatagraataaatcgaaatattacaaggcgtttatgactgcttcaaatcatttgaattgtggtgatttgacggaatttattgacacaatgcttgagytattgatagcaggacaagaaagaatacttgatgagttaataccaaaaatggatgcgactgaaaaattaacgctttatttaactagtcattataaamagatagattatgaatttttgtatctcctttcaatggataaattgtttggaaataaaagaaatagattaacattaattgatttagaaaacatattgggagtaggaagagtaaaaattaataatacaattaaaaaatwtgrtaactacttagttaaaattaaaagtagaccaayaatttatgagataagtgatgaatttctaaattckattataaaataa

SEQ ID NO: 1956 - DNA, 1221 bp, Staphylococcus aureus
atggatatgtttgcagcgttattacaaataaagaattataaactctttgttgctaatatgtttctaytaggtatgggtattgcggttacggtcccatatcttgttctttttgcaactaaagatttrggtatgacaacaaatcagtatggattacttctagcatctgcagcgattagycagtttacagtaaattcaattattgctagattttcggatacgcatcactttaatagaaaaattattattattctcgcattattaatgggtgcgcttggtttttcaatatacttttttgtagatacaatctggttattcatattactatatgcgattttccaaggattatttgcaccagcaatgccccaactttacgcatctgctagagaatctatcaatgtttcaagctctaaagatagagcycaatttgccaayacagtattacgttcaatgttctcattgggctttttatttggtccatttattggtgcscaattaatcggwttaaaaggctatgctggattgtttggtggaacaataagtatcattttatttactttagtacttcaagtgtttttctataaggatttaaacattaaacaccctattagtacgcaacaacatgttgaaaarattgctcctaatatgtttaaagacaaaacgcttttattaccatttattgcatttattttattacacattggacaatggatgtatacgatgaatatgcctttatttgttactgattatttaaaagaaaatgarcaacatgtcggttatttagctagtttatgtgctggtttagaagtgccatttatgatcattcttggcgttttatcatctagattacakactcgaacattgttgatttatggagcgatttttggwggtttattctacttcagcattggggtatttaaaaacttctatatgatgttagcaggacaggtrtttttagctattttcttagcggttcttttaggaattggtattagttatttccaagatatcttaccagatttyccaggatacgcytcaacactattttctaatgcaatggttattggacagttaggcggtaacytattaggtggtgctatgagtcactgggtaggtttggaaaatgtattttttgtatcagcagcatcaatcatgttaggtatgatacttatattctttactaaaaatcaaaaaattacaaaagaggatrtgatatcaacatga

SEQ ID NO: 1957 - DNA, 1230 bp, Staphylococcus aureus
atgggragaaatttaaagcttaaaarmgaaagtgaytttgaattyacwaaaaaycataaragrttattrttaggttctgtatttytratggcaacytctgcaatwggrccagcatttttaacrcaaacrgcagtatttacatcrcaatttttkgcragtttcgcatttgccatattactgtctatyaycattgacattggtgcacaaattaatatatggcgcatattagttgtaactggtttaagaggtcaagaaatatcaaataaagttgttcctgggcttggtactgttatctcaatattgattgcatttggtggtctagcttttaatattggtaatattgctggtgccggtttaggtttaaatgcaatttttggattagatgtaaaatggggcgcagctattactgcaatctttgcaatattaatctttgtaagtaaaagtggmcaaaaaattatggacgttgtttcaatgattcttggtattgtgatgattttagttgtggcatatgtgatgtttgtttctaatccaccttatggtgatgcttttgtgcatacatttgcgccagaacatccaatgaaattagtcttgccmatcattacgttagttggtggaactgtaggtggttatattacctttgcaggtgcacatcgtatattagactctggcattaaaggtaagcaatatttaccatttgtaaatcaatcagcaattgcwggtattttaactacaggtattatgagaacgttactwttcctagcggtattaggwgttgttgtaacaggtgtgacactaagttctgaaaatccaccagcgtcagtttttgaacacgcaattggaccaattggaaagaatatttttggtattgtgttatttgstgcagctatgtcatcagtaattggctcagcatacacaagcgcaacatttttaaaaacacttcataaatcacttaamgaaagaagtaatttaattgtgattgtgtttatcgttatttcaacaatgattttcttatttattggaaaaccaatcagccttttaattatagcaggcgcgataaatggatggattttacctattacgttaggtgcaattttgattgcaagtaaaaagaaatcaattgtwggtgattataaacacccaaattggatgttcatctttggtatcgttgcagtacttgttacaatattgacaggtatattctcattcaaagaagtrcttcagttattttaa

SEQ ID NO: 1958 - DNA, 2199 bp, Staphylococcus aureus
atgyyagatttcaaaaggctcaatrgtttaatgattggttttgttattaaaggtgaggcacayatttatgatgaaaataayatgacgcaatgcaacagtggcgacattttcatcattaaccaccgygacttgtatcgatttcaacttcaacaagatggcatcatatgttatatccaattccaaatgaaatatttrgcagacaagtttgatgatgygcattgtctatattttcacttaacagatgcgaccacaacmaaraatatacatcaactgagaaatataatggcaagactggtttcaacacayatycgacataatgagttgtctaaattgactgagcaacaacttgtsattcagttgcttatgcatatgattcattatgtyccgcgtacatatcattcgaaccaaagtatcttaaatgatgataaagtgaatcaagtatgcgactatatcgagttacattttcatgaagayttaagcctttcrgaattaagcgaataygttgggtggtcagagagccatctgtctaaaaagtttrcagaatcgctaggtgtaggattccadcatttcttaaatacgacgcgaattgagcatgcgaaactcgatttracatacacagatgaaacsattactgatattgcattgcaaaatggcttttcaagtgcagcgagctttgcgagaacatttaaacactttacgcatcaaacrcctaaacaatatcgaggtgatcgtccagcaatcactgaaaaycarcaatcggcacaacatrattatcacgaccgtgaattgatattacttttaaatgactacattgaagaaatgaatcatttyattgaagatattgaaaagrtgaactataaagagattrcctttmaaccaacyaatcamcaactaaatcaatttaatcatattattcaagtgggctatttgaggaatttgctcaatacacagtatcaatcacagttgcttacatgtcatmrtgattttcaagtcaatgaagtattagcatatgatgtgatkccatatatyatgaaaaagctcaatgcgccattcacgtatgatgcagaratttcgaatatattttatgatatygatttgtgtttagactttttattagatcataaytttagtytraccatgcatttgratcagtatgactcacgwgattatatcgatgcattyaaartwtttatccatcacgttgccctgcatgtcagtcatagaaaagatttgaagttcaacttgtatgtgacgacattgcacamkkctttrattgaaatgattgattattttaaagcrttattcccyaatggtggcttgtacrttcacttagatcaagctacggaaagacatctaccattrttgaaacgacttgagccacacatcraccattttgtatttgatgcyaattcaaatgaygctgttgattttaataaaatgaatgatgatgaatttaaaaccgcgagtcaaatgattattaataaaacgaattacyttatcgacttaatrcatcgycatmrcctaaagcgtccactcattttactcaattggaatacattgacgggtgatacatttatwacmaacggcgaatattttagaggtggtatcatcattgagcarttattaaarttaagywcwaargtagagggkatcgggtattggttgaattatgatttgcacgtyagtcattgtaraaatgaacgggattatatgaattctattgaactrtttcatcaatataatggaaaacgtccggtctatttcacggcattgytatttaataaattaacaagcaatattttrtattctgatgatacatgtattgtcacgggractgattcaaattttcaaatattgttatatgatgcaaagcattttaatccrtacttagcgttggacaatcaaatgaatatgcgtgcracggaaatgatycatttgaacatwaatgccytrgaagamggtatrtataagattaaacattttaccttagataaagaaaatggtgcrttatttaatctttggcgmaaacatcatacgatacatggcatggacaaggactctatagattacgttaatcgaatgagttttccraaattagaagtrtaygatatagatrtsacggayacrctggcattaaacattaaaatgattacgaatgggattcacttaattgaagtaaaacgttacccaagttcataa

SEQ ID NO: 1959 - DNA, 774 bp, Staphylococcus aureus
atgaaarcacataaaattttctggttaaacttagcagcaattattattatttcaattgtagtcagtggcgrtatgtttttggcaatgaagtgggaacaaattcatttgaaagatggtcttaaaaaagtactaagtacgtatcctattaaaaacttagaaacgctttatgaaattgatggtcacgataatccccattatgaaaataatgatcaagacacatggtatatagaatcytcttattcagttgttggatcagatgagcttttaaaagaagaccgtatgttgttaaaggtagataagaacacacataaaataactggtgaatatgacacaactacaaacgataraaaaratgctactgactcgacatacaaaagttatccagtaaaagtagttaataataaaatcgttttcacaaaagacgtaaaagatcccgcgctgaaacaaaaaatcgaaaacaatcaatttttgattcaaagtggtgatttaacaagcattttaaatagcaatgatttgaaagtcacacatgatcctaccactgattattataatttatctggtaagttgtcgaaygataatccaaacgttaaacaattaaaacgtagatataatattccyarwaaygcatcaacaaaggtggaattaaagggaatgagtgatttaaaaggcaataatcatcaagatcagaaactttatttttatttttcaagtcctggaaaaraccaaatyatwtayaaagaaagccttacttataataaawtaagtgaacattaa

SEQ ID NO: 1960 - DNA, 489 bp, Staphylococcus aureus
atgacaattattttatggctacttatcatcgctgccttcatgttagcatttgttgggttgattaagccgattattccttctgttttagtattatgggttggctttytaatctatcaatttggctttcataatcagcatttatcatgggtgttttatgtatctatggcattgctaacaataytaattttatgtgcsgactttttagctaataaatattttgtgaatcgcttcggtggttctaagtttggagagtatgcagctttaattggtgtggttattggatgttttgttttaccgccatttggaattattattataccttttattttggtattcatagttgaattaatacaaggctattcatttgaaagagcagttaaagtaagtataggttcaatcgtagcatttttaacaagtagtatagctcaagcaatcattatgtttataatgattgtatggttctttatagatgctttattgattaattaa

SEQ ID NO: 1961 - DNA, 753 bp, Staphylococcus aureus
atgcgagttgatttgaattgtgatttaggcgaagcatttggaaattattyctttggtggtgatcatcaaattattccgttaattacaagtgcgaatgttgcttgtggttttcacgctggtgatgaaaatgtaatgaatgaaacggtaaaacttgccaaagcacataatgttgcagtaggtgcacatcctggtttacctgatttgaaaggctttggcagacgaaatatagatatctctaacgasgagatttataatttgatgatttatcaattaggtgcattacaagggttttgtcgcattcatcaasttaaaattaatcatgttaaaccrcatggtgcrttgtatcagatgggtgcaaaagacagagaaatagcaarcgttatagcacaagctgtttatgactttgatccatcactagtgttagtaggattagcaaattcatatctaatttcagaagcaaagaatgtcggattaattacagcttctgaagtgtttgctgatagacgatacgaagatgatgggcagctcgttagtagaaaagaaagtgatgctgtgattactgatactgacgaagcacttaagcaggttttraagatggtgaaggaaaataaagttatttcaaaaaacaataaggaagtaacgttacaagcagatacaatttgtgtgcatggtgatggagaacatgcattattatttgtttcgaaaattagagaaattttaatgaaagaaggcattgatattcaatccttatag

SEQ ID NO: 1962 - DNA, 468 bp, Staphylococcus aureus
atgacaattgttttatggctacttatcatcgctgccttcatgttagcatttgttgggttgattaagccgattattccttctgttttagtattatgggttggctttctaatctatcaatttggctttcataatcagcatttatcatgggtgttttatgtatctatggcattgctaacaatattaattttatgtgcggactttttagctaataaatattttgtgaatcgcttcggtggttctaagtttggagagtatgcagctttaattggtgtcgttattggatgttttgttttaccgccatttggaattattatcattccatttattttggtattcatagttgaattaatacaaggctattcatttgaaagagcagttaaagtaagtataggttcaatcgtagcatttttaacaagtagtatagctcaagcgagtctgggacataaatccctaaaaaaacagcagtaa

SEQ ID NO: 1963 - DNA, 444 bp, Staphylococcus aureus
atgaggacacttaataaagatgaacataattatatcaagcaaatagctaatatacaygagacattattgtcgcaagyagaatccaactataaatgtactaaactgagtattgctcttaggtacgagatgatatgttcaagattagaacatacaaatgataaaatttatatatatgaaaatgaaggtcaattaatagcgtttatttggggacattttagtaatgaaaaaagtatggttaacattgaactgctatatgttgaaccacaatttcgcaaactgggaatagctacgcaactgaagattgcgcttgaaaaatgggcaaaaactatgaatgcaaagcgaataagcartacaattcataaaartaatttrccaatgatatctttgaataaagatttaggttatcaagtgagtcatgtraaaatgtataaagatattgattag

SEQ ID NO: 1964 - DNA, 1362 bp, Staphylococcus aureus
atgcttcgttgtttaattgcgaayagaggtgaaattgctgtaaggattataagagcttgcagagaatatgggattgaaactgtagcagtttatgcaaaaggggacgagcaaagcttgcatgtacatttagcrgatcaagctatatgtattggrgaagctaatrctttagrtagttatttaaatattgaccgcatcatatctgctgcacaaatcactggtgctaatgcaattcacccaggatatggctttttatcagaatcaacaaaatttgctcaaaccgttgaggaacaaggcatagcgtttatagggcctactaaaaaaacgatggaaatgatgggggataaaataacagcaagacaaacagttcatcatgcaggtgttcctgtgattccaggatcaaatgrtgctgtgaaycatgtgtctgaaattgagaakcttgccaaagacatcggttatccagttgttatcaaagctgccagtggcggtggtggtaaaggtatacgtattgtaaagaaagctgaagatttagaaaaggcatttaaagaagctaaaagtgaaggaaaaaaatactttgatgatgatcgtgtttatgttgaggcttttatacctgttgcaaaacatgttgaagttcaagttatgggrgatgggcaggataattwtgtacatttaggggaacgtgattgttctgtacaacgtaaaaatcaaaaattaatcgaagaatctccttgtgcagcattaactgaagaamgacgacaacaaatatgtaacgatgctgttaaagttgcacgtgcagcaaattatagaagtgcaggtacgattgaatttttagtaactgatamcgcacattactttattgaaatgaatgctcgaatacaagttgaacatactgttacagagatgcgagcagaacgtgatttggttgcagcacaaytgtatttattggaacataatcatttacctttttcacaaarcgatattcaatttaatggtcatgtgatagaagcgagaataaatgccgaaaatcctgaaaagaaatttcaaccaacaccaggtaaagtgacagcgttacatttacctcaaggctttaatgtgcgagtcgattctttactatatcacggttatcaagtttcaccatattatgattctttagtagctaaagtaattgtaaaatctcatgatagagcttcagcaattgataarttgaragyyaccttagatgaaatggtgatagatggattttctacaactgccgattttttatatgcagttttaaattatccactatatcgtgatggagatgcaaaagatgttgatattaaatttttagaaaaacatcaaattgttaaaggggtggaattataa

SEQ ID NO: 1965 - DNA, 396 bp, Staphylococcus aureus
atgaagaaattaatcatcagyattatggcgrtcatgctatttttaacaggttgtggtaaaagycaagagaaagccactctggaaaaggatatcgataatttacaaaaagaaaataaagaattaaaagayaaaaaagaaaagcttcaacaagaaaaagaaaaattagcagataagcaaaaagaccttgaaaaagaagtgaaagatttaaaaccttcaaaagaagataacaaggaygataaaaaagacgaagacaaaaataaagacaaagataaagataaagaggcatcacaagataagcaatcaaaagatcaaactaagtcatcggataaagataatcacaaaaagcctacatcarcagataaagatcaaaaagctaatgacaaacaccaatcataa

SEQ ID NO: 1966 - DNA, 450 bp, Staphylococcus aureus
atgaatattgaaaaaatcgaacaaataatcaaattagtgaaggaaaatgatgttaagaaatttaaatataaaaattttgaagatgaaatagaaattgacttcactgaytygaatcatttggctgcacacagtaatcaatcaaatcaaagtatgaacaataatgatttgacagcttcaaaagygaatgataactccgatgtttcgacaaatgattatcatgacattaaatcaccaatgrtaggtacattctttttacaagayagtaaagaattaactgaaccaattgtgaawgtcggtgacaaagttaacaagggagatattataggatatgttgaagcgatgaaagtattaaacgaggtaacaacagatgttgctggagaaatyactgaaatagtagctgatcatggmacaaatgttgaatacgaccaagttttggtacgtattaagtaa

SEQ ID NO: 1967 - DNA, 300 bp, Staphylococcus aureus
atgcatgaacaagattttagaattttagagggtcaagatattactttgccagaattaggtagagaattagaaaatattacaggacryacgattgctgattctactggcgaaattaagcgtgtaattgcacatttaccaaactttgagtccgatacagatacttttgttgctacatatcgtttaaaccatcaacaagattttatagatgcaacttttactgcgctgaaatcagatagagcacgtttaaaagaagtgccagttcatgttgaacttataagytatatttctaaatcaaaataa

SEQ ID NO: 1968 - DNA, 915 bp, Staphylococcus aureus
atggatcaatttagttttaaggttgcgcagtyattaattaacaatgatggtccagcgattgaatatactttgattggtcctaccattcaatttaatacgcaaaatacatttgttataaccggtggtagtrttaatgcytcgctaaataataaaactatatcaatgaattctgtcatattagctgagaaaggtgacattttaaaaataggtgctataaccaaaggtgyacgcggttatcttacttttggtcatwctatcaacgtacctycwattgctgaaagttatgcaacacatacccgaagyagtataggaggattcaaaggtagaaagttattagctratgatgtaataacagtgaaaatwaataatgactttaaagaaaacattggaaagackattcatttacaggacgatttattgccagaaaataatattatacacattcttcaaggacctcaattcgaggcattttctgaagaggctagagcgaaaattgtaaatcatccatatttaattacygaacaatcagaccgtatgggstatcgtttggaaggtgacagcgttgcaccwattaatcaagcagatatcatttctgaaccggttgctcttggyagtgttcargtaccaaatgatggtcaacctattattctkcttaatgataaacaaacgataggtggttataccaaaattgcaactgtatgcaaatttgatctgccaaagttagcacagatgaaaccamaagatacaattcaatttaaatggatatcattccaagaagctgtagataagaatcgggaacaaatgtctctgtttaatgaaattcttaagagtcatcaaaagactccaatttttgatacatctagcttgcgacatacttcgaaaaaattakcaacaattttaaaaggggatttgtaa

SEQ ID NO: 1969 - DNA, 543 bp, Staphylococcus aureus
atgatttattgtgaaacagagcgtttaatattaagagactggcatgaagatgatctgttaccttttcaaaaaatgaatgcgaattatgacgtacgtaaatattttccaagtttattgagttatcgtcgttcagaattagatatgagaactatggatgcggttattaaagattatggcattggattatttgctgtagaagataaagagtcccatcaatggataggctttataggtttgaattatattccagaaacaagcgattatccatttaaagaattaccgctttatgaaataggttggcgcttgttgccwgaattttggggaaaaggattagcaactgaaggcgcaaaggcaacrttgaagttagcagaasaacatcaaatatacgatgtctatagttttacagcagaagcaaataaagcytcacaacgtgtaatggaaaaaattggcatgacagtgtatgatcatttcgaattacccaatctaagtaagtatcatttattaaaaaggcaagtgcgctattacattaatcttcgaaagtga

SEQ ID NO: 1970 - DNA, 735 bp, Staphylococcus aureus
gtggatgtaagatttattaacgagcagacrattatgatttattttgaaaataaaatatccgaagagacatatcgwaatgtcacagcaatggtacggtggatacgagaaaaagaaatattagaaattcaagatattgtcccttcgtatcgagcagttctaatatattttgatgaacaagctataacaycttctaaattaattgaaaatttagaacttaacaaatttaatgaaaaaaatgttcatgctgtgaatcaaaccaatmgtattattaaaatacctgttcaatatggtggtacatatggaccwgatattgaagaagtagcaaagcataatcgaataactgttgagcaagttattgaaaaacatacaagtaaaccttatttaatatatatgctaggatttatgccwggatttccatacttaggcggacttgatgaacaactacatacacctagacgtaatcagccaaggttaaaaattcatgcaggttctgtaggtattgcgaataatcaaacaggactatatccatcagattctcctggcggatggcaaattattggacgcacaccgttaaaagtatttagcagcgagcgtgaaccaatgtcaatgtaygaagcaggagaatggatacaattttatgcaatagatgaacarraatttatacaaatcgaaagagatatatcagatggcaactttaatgttgatgactgggtggtgatygaaaatgtcaattaa

SEQ ID NO: 1971 - DNA, 1632 bp, Staphylococcus aureus
gtgaaaaaattaacaayaatactgtttcaatataaaatttttccggtactcatgttcttggtcagtactggtctcggcatamtcgttataacgcaaaatattttaatagcagattttttagctaaaattataagacatcaatttcaaggtttatggattgtattatttattttattaggtgttttacttttaagagcaactgtgcaatttctaaatcaatggttaggtgatacattagcatttaaagttaagcatatgcttagacagcgggttatttataaaaataatggtcatccaatcggtgaacaaatgactatactcacagaaaacattgatggtytagcacctttttataagagttatttgcctcaagtgttcaaatcaatgatggttccgctcatcataatcattgcaatgtttttcatccatwtcaataccgcattaattatgttaataactgcaccatttattcctttgttttatattattttcggtttgaaaacgcgagatgagtcaaaaratcaaatgacttatttgaatcaatttagtcaacggtttttaaatattgctaaaggtttagtgacgttaaagctatttaatcgtacagagcaaacagagaagcatatttacgacgatagtactcagtttagaactttaacaatgcgcattttacgcagtgcttttttatcgggattaatgctcgaatttataagtatgttaggtattggattggttgcattggaagcaacgctaarcttagtagtatttcataatattgattttaaaactgcggcaattgcgattattttagcgcctgaattttataatgcaattaaggacttaggrcaagcrttccatactggaaaacaaagtgaaggtgccagtgacgttgtgtttgagtttttagaacaaccgaacwataataatgaatttctattaaagtatgaggaaaaycaaaarccatttattcagttaacagacatatcatttcgatatgatrattctgatagattggtattaaatgatttaaatttggaaatatwtaawggtgatcaaattgcacttgtaggtccaagcggggcaggtaaatcmactttgacacatctwattgcaggtgtttatcagccaacaataggtactataagtayaaaccagcgtgatttaaatataggaatacttagtcaacagccatatattttcagtgcttctataaaagagaatattacgatgtttaaagatatagaaaataatactrttgaagaagtgctagacgaagtaggtttattagacaaagtkcaatctttcacamaaggcattaayacaataataggtgaaggaggcgaaatgttatctggtggacagatgagacgcatagaactttgccgtcttttagttatgaagccagatctcgttatatttgatgagcctgcaactggtttagatattcaaacagaacacatgattcagaacgttctgtttcaacattttaaagrtacaacgatgattgtcattgcacatagagataatacaattcgccatttacaacgacgyttgtatatagaaaatggaagactgattgctgatgatcgcaatatttcagtaaatataacagaaaatggtgatgacttatga

SEQ ID NO: 1972 - DNA, 477 bp, Staphylococcus aureus
atggaaaatcaaaagcaatatccaatgactcaagaaggttttgaaaaattagagcgtgaacttgaagaattaaaaacagttaagcgtcctgaagttgtagagaaaattaaagttgcacgttcatttggtgacttatcagagaactctgagtatgatgcagcaaaagatgaacaaggattcatcgaacaagatattcaaagaattgagcatatgttaagaaatgcattaatcattgaagatactggagataacaacgttgttaaaattggtaaaacagtaacgtttgtagaattaccaggtgatgaagaggaaagttatcaaatcgttggttcagctgaatcagatgcatttaatggtaagatttcaaatgaatcaccaatggctaaagcgttaattggtaaaggtttagatgatgaagtkcgtgttccactacctaatggtggcgaaatgaacgtaaaaattgttaatatccaataa

SEQ ID NO: 1973 - DNA, 1674 bp, Staphylococcus aureus
atgaaaacacgactaaaatttcaagtagataaggatttattgttagctatagttgttggtgtttgtggaagtttagttgcgctcgccatgtttttcttaagtggttatatggtgacacaaagtgcacttggtgcgccactatacgctctgatgattttagtcgttacagtaaaattgtttgggtttttaagagctattactcgatacgtagagcgccttatttctcataaagctacatttacaatgctacgtgatattcgggtacagtttttcggtaaattagtaaatgtcattcctaatgtttaccgtaaactgagttctagtgatttaatttcacgtatgattagtcgtgttgaggcrttacaaaatatwtatttacgtgtttattatccaccagtcgtyatcggtttgacagcgctagttacagtmatagtwttggcgttcatttcaatcggccatgcgctattgattatggttagcatgttgttyactttactcrttgttccttggttaagctcaaaaaaagcacgtactttaaagaaacatgcagctaatgaacaggcycgatttttaaatcatttttatgattataaagctggtatggatgaactacgtcgatttaatcaaattaatcattatcgarataatttgatggctaaattaaatcattttgataaattacaacttaaagagcaacgctttttaacgatttatgattttatattaaatattattgctatgctttcgatttttggtagtttagttctaggattaattcaaattaatgcaggccaactaaatattatttatatgacgagtatagttttaatgrtcttaactttatttgaacaagctgtaccaatgacaaatgtcgcgtattataaagcsgatactgaccaagcattgcaygatattaatgaagtgatatctgtaccttctacyaatggaaawaamcgycttaatgataagtatgatgcaacgaacatttatgaagttaaggaygctagttttaagtattggaaycagcaaacgtatgtgttgtcggatattaattttaatgttaatagaggcgaaaagattgcgattgtgggkccttcwggttcaggaaaaagtacattactacaaattatggcwgggttatatcaattagatagtggctctrttcgtttcgaaaatatggatatgtttgaaatagatgacaaagataagtttgaakcgttaaatgtcttgctacaatctcaacaattatttgatggtacaatacgtcaaaatttatttaccgatgaaaaagatgaagcggtgcaagcaatatttaagcaattagatttagaacatttggcactagaacgtcaaattgacttagatggtcatacattatctggcggagaaattcagcgtttagcgattrcraggatgttattaaaagatactgcatcaacrtggattttagatgaaccaacaackgcattagataaacaaaatagtttraaagttatggatttaattgaagcacatgcagaaacattaattgttgctacacacgatttaactttattgtcacgttttgagaccatcattgtgatgataaatggtaaaatagttgaaaagggaaactatcaacaattactmgctaatcaaggtgctttatggaatatgattcaatataatgcataa

SEQ ID NO: 1974 - DNA, 624 bp, Staphylococcus aureus
atgaaagctactacaatcattggcatagctggtggatctggctcaggaaaaacaactgtaactaacgaaattatgaaaaacttagaaggtcatagtgtcgctttacttgctcaagattactattataaagatcaaaagcacttgactttcgacgagcgcctagaaaccaattatgaccatccatttgcattcgataatgatttattaattgaaaatcttaaagacttgaaaaatggtaaagcagtagaagtaccgacatatgattatgctagtcatacaagaagtgacattaccattgattttaaacctaaagatgttattatcgtagaaggyattttcgctttagaaaataaggtattacgtgatatgatggatgttaaaatatatgttgatacagatgcagacttgagaatattacgccgtttaacacgagatactaaagagcgtgggcgttcaatggactctgttatcaatcaatatttaagtgttgttagacctatgcatgaccaatttattgaaccgactaagaaatatgctgatataattattcctgaaggtgggagcaataaagttgcaatagatattatgacaacaaaaattcagtctttagttagcaagcaatag

SEQ ID NO: 1975 - DNA, 927 bp, Staphylococcus aureus
atgaaaaataataaagatgaaaaaataagaatatccataattaacggatttttgggtagtggtaaaaccacgttactgacacattatattagtgaattattaaaaaatgatgagaaaattaaaatcatcatgaatgaattcggtactkttgatatygatagcaatagtatttcaaatgaaattgaagtccattcattgattaatggttgtgtttgttgcgatcttaaacaagaacttgtctatgaactaaaagccattgctttaaaaggggacgttaatcatgtcatcatagaarcgacaggcattgcgcatcctttrgaattactagttgcatgtcaagatccgcaaatcgttaatttctttgaaaagccrattatttatggtgtattagatgcgactcgatttttrgaacgtcatcaatataccgaaaatacagtttcgctgatggaagawcagttgaaactaagtgacatgattattattaataaaattgatcttrtaactgatgacmgtmttgagaraattgataagcaattargtwtgatttgtgcaagtattccaacwtataaaacaacctatggamaagtttcgttggaagaattggacttamctgktaaagacagagagatatcgtckcatcatcaccatcatcatgggattaaaagtatgacttacacrtttacaggtccgattgatcgtcawttgttttatcaatttataatgaaattaycggaatctgttctacgtttgaaaggttatgtrtcatttagaratcaaccaaatgcaatttatgaatttcaatatgcwtatggtttaccagaytatggaataattggcatgcaattaccattaacgattgttattattggtgaaactttagatacaaatcacatacgtaatcaattggatatgctacaatttacgtaa

SEQ ID NO: 1976 - DNA, 1269 bp, Staphylococcus aureus
atgaagacaatagaagagattaaatcaactcctaaaacagttatgaagaaaccagaattattagcacctgctggaaacttagaaaagttaaaaatagcagtacattatggcgctgatgccgtatttttaggtggtcaagaatatggattacgttcaaatgctgataatttcacgatggaagaaatagctgaaggtgttgaatttgcgaaccgttacggtgccaaaatttatgttacgacaaatattattgcacatgatgagaatattgaaggtctagaatcatatttgcgtaatttggaaaagactggtgcgacaggtatcattgttgcagatcctttaattatcgaaacatgtaaagaagttgcgccaaaacttgaaattcatttatctactcaacaatcactttctaattacaaagctgtagaatattggaaagaagaaggattggatcgtgttgtattagcacgtgagaccggcgcgatggaaatgcgtgaaatgaaggaaaaagtagatattgaaatcgaagcatttattcatggtgctatgtgtatcgcctattcaggtagatgtacattaagtaatcatatgactgcaagggattccaacagaggcggttgctgtcaaagttgycgttgggattatgaattattagaagttgatgataatggtgaacttgatgtwttttataatcaaggtgaagttacaccrtttgcgatgagtcctaaagatttaaaattaatcgaatcwattcctcaaatgatggatattggtgtggactcattaaaaattgaaggacgtatgaagtcaattcaytatattgcaacagttgtctcagtatatcgtaaagtcattgatgcgtatgcggcagatcctgacaaytttaagattaatccggaatggttaatwgagttagataaatgtgcaaatagagacactgcaccwgcattctttgagggaacacctggttatgaagaacagatgtttggtcaacaacaatctaaaaaatcaycatttgatttttgtggtttggtattagaytataatgaagatacaaaaattgcgactattcaacaacgaaataactttaaaccaggtcaagaaatagaattctttggtccagaaattgaaacatttacacaagtagtagaagcaatttatgatgaagaaggtaacagcttagacgcggcgcgccatccattacaaatcgttcaaattaaagtggatcgcccgatatatccaaacaacatgatgagaaaggaaattggctaa

SEQ ID NO: 1977 - DNA, 924 bp, Staphylococcus aureus
atgacagaattacttgtcacacccaagtcattaagccatatggaaacacttattgatttaggtgcagatgcttttgtaattggcgagcaaaagtttggtttaagacttccaggggaattcaatagacaacaaatgacagaggctgtcgcattagctcacaaaaacgataaaaaagtatatgcggcrgtgaatggattatttcataattatcatttagatgctgtagaagattatattaattttttacatgaaatacgagttgacagaattattttcggggatccagcagtagtaatgtatgtgaaggcgcaagaraatccaataccacttcattggaatgcagagacgttagtaactaatcattttcaatgtaattactggggtaaaagaggcgcatcaagagctgtcttagcacgtgagctgaatttggatgaaattattaatataaaagaaaattcaaatgtggaaattgaggtgcaagttcaaggaatgacttgtatgttycaatcaaagcgtatgctactaggcaattattatacgttccaagatcgycaaatgaaaattgaacgtcgcaatgatgaacaatctttattrctttatgatgaagaaagacaaaataattacccagtttacgaagattacaatggtacgcacattatgtcaccaaacgacatttgtttaattgaagaattagcaccattttttgaggcgggtatagattcatttaaaatcgatggtattctacaaacggaagaatatattaatgtggtaacggaacagtatcgtcaagcgatagatttgtacaatgaagatcctgaaatctatgaagatgagaaatttatgttgatkgayccaattgaagaaattcaacctgatcatcgaccatttgacgaaggtttcttatataaacaaacrgtatattaa

SEQ ID NO: 1978 - DNA, 288 bp, Staphylococcus aureus
atgacaaacgaagataaacgtttcgaacaattaagatttgaacgcaaatttatagttattccgtatktaatttatgcagtcattgtattactattaaatattttctattctgatttgaaaataacaatgacattattcggacttttctttgcgtataatgtagtcattttgttcatagcatttrttaaacattataaacgcacattgttactaagtcttatattaacagtgcttagtggcgcggcattctttggaattatttatgtttatggcattaatcatttttaa

SEQ ID NO: 1979 - DNA, 639 bp, Staphylococcus aureus
atggatgacctaaataaaaaatatttaatagatttacatcaacatcaaaatagttcaatcgaagttttgcgtgaatttgccgargkaaatgaagtgccaatygtrgatcgtttaacattagatttaattaagcaattaattcgtatgaataatgttaaaaatattttagaaattggtacagcaatcggctatagttctatgcaattcgcttctatatctgatgacattcatgtcacaacgatagagcgtaatgaaacgatgattcaatatgctaaacaaaatttagytactyatcattttgaaaaccaggttcgaattattgaaggtaatgctttagagcaatttgaaaatgtaaatgacaaagtttatgatatgatatttattgatgcagcaaaagcgcaatcaaagaaattttttgaaatatatacaccacttttaaagcaccaaggtctcgtaattacagataatgttttatatcacggttttgtatcggatattgggattgttagatcgagaaatgtaagacaaatggttaaaaaggttcaagattataatgagtggttaataaagcaaccaggatatacaacgaattttttaaatatagacgatggattagcgatttcaattaaaggagaatga

SEQ ID NO: 1980 - DNA, 1179 bp, Staphylococcus aureus
atgaatcaacaattaattgaarctttaaaatcwaaagaagrcaaaatgrttgagatcagacgttatttacatcagcatccagaattatcttttcatgargatgaaacggcgaaatacatcgctgaattttacaaaggtaaagatgtrgaagtagaaacgaatrtcggaccacgtggaattaaagtaacgattgattcagggaaacctggtaaaacattagcaatccgtgcagactttgaygcattaccyattactgaagatacaggattatcttttgcatcacaaaataaaggtgttatgcacgcatgtggtcacgatgcacatacagcwtacatgcttgtattagcagagacgcttgcygaaatgaaagatagttttacaggaaaagtcgttgtgatacatcaaccagctgaagaagtaccaccaggtggtgctaaarcaatgattgaaaatggtgtattagacggtgttgatcatgtattaggtgtacacgtcatgagcacaatgraaacaggtaawgtgtattacagacctggttatgttcaaacaggacgcgcattyttcaaattgaaagttcaaggtaaaggtggtcatggttcatcaccmcatatggccaatgatgccattgttgcaggtagctacttcgtcacagcgttacaaacagttgtatctagacgactaagtccatttgaaaccggtgttgtcacaatcggttcatttgacggtaaaggtcaattcaatgtyattaaagatgttgttgaaattgaaggtgatgtacgtggattaacagatgctacaaaagcaacaattgaaamagaaattaaacgtttatcaaaaggattagagsatatgtatggtgtaacttgcacmttagaatataacgatgattatccwgcattatataatgatccagagtttactgagtacgtggctaagacgytraaagaagcaraccttgawtttggtgtygaaatrtgtgaaccacaaccaccttcagaagactttgcataytatgctaargaacghccaagtgcctttatttatacaggtgcagckgtggaaratggtgaaatttacccacatcatcatcctaaatttaasatttcagaaaaatcattacttatttckgcagaagcwgtagggacagttgttttagattaccttaaaggagataactaa

SEQ ID NO: 1981 - DNA, 627 bp, Staphylococcus aureus
atggcaaaagtattatatattacagcacacccttttaatgaactggtatcaaattctatggcggctggtaaagcatttatcgaaacatatcaacaacawcatcctgawgatgaagtgaaacatattgatttatttgaaacttatattccagttattgacaaagatgtattaactggttggggraaaatgagtaatggcgaaacgttaactgatgatgaacaaatgaaagtttcaagattgagtgacattttagaagaatttttaagtgcagataaatatgtryttgtaacgcctatgtggaacctttctttcccacctgtagttaaagcatatattgatgctatttcaattgcaggtaaaacttttaaatattctgctgaaggaccacaaggtttactaactgacaaaaaagtattacacattcaatcacgtggtggatattatactgaaggacctgctgctgattttgaaatgggtgaccgttatttaagaacaattatgacattcttaggtgtgccatcatatgaaacaatcattattgaaggacacaatgcygaacckcataaractgaagaaattaaagcaactagtattaataatgctgaaaaattrgcaacaaywttttaa

SEQ ID NO: 1982 - DNA, 1554 bp, Staphylococcus aureus
atgtcagaagwaaaamakgtagtkraacatgaacaacaaaagaaagaaaagacaaaaaagcaatacaagccattttggattgtyatgagttttataatacttatagttgtactattactcccggcaccttcaagtctgccrataatggctaaggcagtactagctattttagcttttgcagttattatgtgggtaacggaagctgtatcatatccggtgtcagcaactttaattattggyttaatgatattacttttaggatttagyccdgttcaaaatttaggggagaagctaggtaatccgaaaagtggcagtgctrttttagctggaagtgaycttctaggaacwaatcatgcattatcattagcrtttagtggatwtgcaacwtcagctgtagctctcgttgcagcygcattatttttggctgctgctatgcaagaaacgaatttgcataaaagactagctcttttagtgytatcaattgttggtaataaaactagaaatatagttattggagcaattatygtttcaattgtacttgcatttttcgttccttctgcaacagctagagcaggggcagttgtaccaatcttgctgggtatgattgcrgcatttaaagtttcyaaagatagcaagttagcgtctttattaataattacttcagtacaagctgtgtcaatttggaatattggtatcaaaacggcggcagcacaaaatatcgtagcgattaattttataaaccatcaattaggatttgatgtttcatggggcgagtggttcttatatgcagcgccttggtccatagttatgtcyrtagctttatatttcatcatgattaaagtgatgcctccagaaattaatacaatagaaggtggyaaagatttaataaaagaagaattgcataaacttggccccgttagcscacgtgaatggcgtttaattgttatatcgatgttattattactgttttggtcaactgaaaaagtattacatccgattgactctgcatccattactattattgctttaggtgttatgttaatgccgaaaattggtgtcatgacatggaaacatgttgaaaataaaataccatggggaacaattatcgtgtttggtgtaggtatttcactaggkaacgttcttttgaaaacaggwgcagctcaatggttaagtgatcaaacttttggtgttttaggtttaaaacatttacctattatcgcgacaattgcacttatcacgctttttaatatattgattcatttgggctttgcgagtgcaacaagtttatcatcagcgttaatacctgtttttatttcgctaacctctacgttacacttaggagaccagtctataggatttgttttaattcaacaatttgttattagttttggtttcttattacctgttagtgcacctcaaaatatgttggcttatggcactggtacttttackgtkaaagatttcttgaagrcaggtataccattgacaattgtagggtatattctagtgatagtttttagyatgacttattggaaatggttaggtttgctttaa

SEQ ID NO: 1983 - DNA, 309 bp, Staphylococcus aureus
atgactgaacataatcatgattcacaactagaaattaataacgaagaagaattattaactttattcgatgaagagggaaatgaagttttataccgaaaagttttagaattttatcatcctgaattcaaaaaagagtatgttatcttagctgaagaaggtgctcaatcagatgaagacgatatgattgagcttgtaccaatgatcaatgaaccagatgagtcaggtgacggtggtaagttagtaccaatcgaaactgatgaagaatgggacatgattgaagaagttgtaaatactgaaatggaagaataa

SEQ ID NO: 1984 - DNA, 1374 bp, Staphylococcus aureus
atggcaatwgctgtgttattaaatcgaatgtttcgaatggaacacaatccattatttgaatatatttatcaacaaaaagaagacattgatgcatgttattttatcattccggaagaggacatgtcttcagcttctgatttgaaagcacagttttatcgcggtactttgcagcgcttttaccaatcgttgcacgcagaaaagctyacaccttatgtyatgtcttatgacgatatcatttcattttgtaaagaraacaatatctctgaagtagtgaytgcrggtgatattatgagttatcaycttgaagaatatgatattttacatcaacgytctttattcaatgaagcacgyattgccgttactttratwcgtgggaatcattactttaaagcgagtaaaacaatgaatcaacaaggggagccatacaawgtttttactagtttctmtaraaaatggcgaccttacttgaggcatagagacgtatatcactatgatttaaaatcattcgaaracttygtcattgcatcacctgatgatttagtgtttgatgacatagcrtttggatcctcacaartaattgaacagaataaatggcaacattttttagatcaagatatacagaattacgaaagcggaagagactatttacctgaagtrttaacaagtcagctaagtgttgctttagcatatggattattagatattattgaaatttttaatgatttattggcgcgttatgatgargatgaggcaaacyatgaagcatttatacgtgaactcatttttagagaattttattatgtgttaatgacacagtatccwgaaacctcataccaagctttcaaayctaaatatcgacagataaaatggtcgcaaaatgaagcgrattttaatgcatggtgcgaagggcaaacaggatttccaatcattgatgcagcaataatggaattgacacaaactggttttatgcayaatcgaatgagaatggttgtgtcgcaatttttaaccaaagatttatttatagattggacatggggagaaaaattctttagaaagcaccttattgactatgatgcagcatcaaatattcatggatggcaatggtctgcttctacaggtacggatgcagtgccgtattttagaatgtttaatccaataagacagagtgaacgctttgatsctaaagctttgtatatcaaaacatatcttccgatttttaatcaaattgatgcwaaatatttgcatgatacacaacgcaatgagtccaacctttttgaacwggggattgaattaggtmgtcattatccaagacaaatggtagatcatcaagaaaaacgtacacaagttttagctrcatttaaagcgctagactaa

SEQ ID NO: 1985 - DNA, 429 bp, Staphylococcus aureus
atgttacaacataaaattttaggactcgatgtcggtagtagaacggtaggaattgcaattagtgatataatgggttggacggcacaaggattagacacactccgaatcaatgaagaaaataatgaattaggtattgaccaattagtagacattattaaaaaacataatgtgggtacagtcgtaataggactacctaaaaacatgaataattcaataggatttcgaggcgaagcttcgttaacatataaagaaaaattattagaagcttatccttctattgagattgtgatgtgggatgaaagattaagcacaatggctgctgaacgatcattattagaagcagatgtttcaagacaaaaaagaaaacaagtgattgataaaatggcagcggtatttattttacaaggctatttagattcactacattaa

SEQ ID NO: 1986 - DNA, 1167 bp, Staphylococcus aureus
atgaataaacagattttkgtmttatattttaatattttcttratttttttaggtatcggtytagtrataccagtcttrcctgtttatttaaaagatttgggrttaactggtagtgatttaggrttaytwgttgctgctttygcsttatctcaaatgattatatcgccrttyggtggtacgytagctgayaaattaggraagaaattaattatatgtataggrttaattttrttytcagtgtcagaatttatgtttgcwrtyggycasaatttttyrrtwttgatgttatcragrgtkatyggtggtatgagtgctggtatggtwatgcckggkgtgacaggtttratwgcwgayrtttcaccaagccatcaaaaagcaaaaaactttggctacatgtcagcgattatcaattcwggattcattttaggaccagggattggtggatttatggcagaagtttcacatcgtatgccattttaytttgcaggwgcattaggyattytagcwttyataatgtcarttgtattgattcaygayccraaaaagtytacgacaarygghttccaaaarytdgagccmcaattrytaacraaaattaaytggaaagtstttattacrccagywattytaacrctygtmttakcgtthggtttatckgcatttgaaacaytgtattcwytatayacakckkayaargtaaattattcacctaaagatatttcgattgcdattacrggtggcggtatmtttggkgcactttkccaaatytatttcttygataaatttatgaartayttctcwkagttaacatttatwgcwtggtcattawtatattcagttrttgtmttartrytattagttwttgcyratgrytaytggwcaatwatgktaathagytttgytgtcttyatmggkttygatatgatamgaccwgcyattacaaattatttytcwaatattgctggwgawagrcarggmtttgcaggyggrttraactcracattcactagyatgggkaatttyataggtcctttaatcgcaggtgcgttatttgatgtrcacattgaagcmccaatttatatggctataggtgtktcattagcwggtgttgtyattgttttaattgaaaagcaacatagagcwaarttraaasaacaaratwtgtar

SEQ ID NO: 1987 - DNA, 261 bp, Staphylococcus aureus
atggaaaactttgataaaacaatgaaattcgactatgaagaacttccaacrcaagatgtaagagatgttttaaataatgtttatcgaacattagatgaacgaggatataatgccgtaaaccaaattgtaggttatttattatcaggtgaccctgcgtatattccacgccaraatgaagcaagaaatcaaattcgtcatattgatagagatgttattatggaagarcttgtttcttactatttaaaagagcaaaataaataa

SEQ ID NO: 1988 - DNA, 465 bp, Staphylococcus aureus
gtgggtaaggggatgacagtaaaaaatttatttttaggctttgttgctgtaatattaaccgtttgtttaattggtttattaatattagcaacaaatgaagatgcgcttgctaaggtacataaaacrattaatacgcttaacgcgataaatgtatcaactgaagatacttataaaaagaaaatggatattctcaatattcatactgctaaakcatctgaagtgaatgaaaatrtgraaaagcaaaatcattttaarcatcgtgtgaatgcaaataaatcaaattcttttaacgaacaagagtgccaagttattgctgatcgttatgcagataagcatatcaatgataattatggtttagaaagaatttctaagacaaatcatggatataattatgtktattccaatgataattcaackagtaagcaacatgtaagtatttcaaatcaaggcataataacgaaataa

SEQ ID NO: 1989 - DNA, 2631 bp, Staphylococcus aureus
atgaaaaagttaaaagcgagtgaaattagacaaaaatatctagatttctttgttgaaaaaggacatatggttgaaccttctgcaccattagtgccaattgatgatgatacattattatggattaattcaggtgtagcaacattaaagaaatattttgatggacgtgaaacacctaaaaagccaagaattgtaaactctcaaaaagctattcgtacaaatgatattgaaaatgttggtttcacagcgcgtcaccatacattctttgaaatgttaggtaacttctcaattggtgattaytttaaacaagaagcgattgaatttgcttgggaatttttaacgagtgataaatggatgggkatggagccagataaattgtacgttacgattcatccggaagatatggaagcatayaacatttggcataaagatattgggcttgaagaaagtcgtattattcgcattgaaggtaacttctgggatattggtgaaggrccttcaggaccraacactgagattttctatgatcgcggagaagcatatggacaagacgatccggcagaagaaatgtatccaggtggagaaaatgaacgctatcttgaagtatggaacttagtatttagtgaattcaatcataataaagatcatagttacacaccattacctaataaaaayattgatacyggcatggggcttgagcgtatggcctcagtttctcaaaatgtacgtactaactatgaaacagatttatttatgcctataatgaatgaaatcgaaaaagtatcaggtaaacaatatttagtaaacaacgaacaagatgtggcatttaaagtaattgctgaccacattcgtacgattgcatttgcaatttctgatggtgcattacctgccaatgaaggtagaggrtatgtattacgtcgattgttacgtcgtgccgttcgttttagtcaaacgttaggaatcaatgagccatttatgtacaaacttgttgatattgttgcagacattatggaaccatattatccaaatgttaaggaaaaagcagatttcattaagcgtgttataaagtctgaagaagaacgattccatgaaacattagaagatggtttagcgattttaaatgaattaattaaaaaagctaaagcgacaacaaatgaaattaatgggaaagatgcatttaaattgtatgatacgtaygggttcccaattgaattaactgaagaaatagcagtgcaagcaggattgaaagttgatatgacaacattygagtcagaaatgcaacaacaacgtgatcgtgcacgtcaagcacgtcaaaattctcaatcaatgcaagttcaaagtgaagtattgaaaaatattacatctgcaagtacttttgttggttatgatactgcgacagctcaaacracactaacacacttgatatayaatggtgaagaagtttcacaagttgaagcgggtgaaacagtatacttcatgttaacggaaacaccattttatgcartcagtggtggacaagttgcggatacaggtattgtwtataatgacaattttgaaattgctgttagtgaagtaaccaaagcrccaaatggtcaaaacttgcataaaggagtagtacaatttggccaagtaaatgttggcgctacagtgtctgctgaagtgaaccaaaatgatcgacgtgacattcaaaagaaccatagtgcaacacatttattacatgcagcgttgaaatcagtactgggtgatcatgttaaccaagctggttcaytagtagaagcagatcgtttacgttttgatttctctcattttggtccaatgactaatgatgaaattgatcaagttgaacgcttagtaaatgaagaaatttggaaaggtattgacgttaacattcaagaaatggatattgyttcagctaaagaaatgggcgcaatggcattattcggtgaaaaatatggtgatgttgtgcgtgtagtaaatatggcaccattttcaattgaattatgtggtggtattcatgtccgcaatacttctgaaattggcttattcaaaatagtaagtgagtcaggtacaggagctggtgtgcgtcgtattgaagcattaacaggtaaagcagctttcttatatttagaagatattcaagagaaatttaatacgatgaaatcacagmtgaaagtgaaatctgatratcaagtagtcgawaagttaacacaattrcaagatgaagaaaaagcattattaaaacaattagagcaacgtgacaaagaaatcacatcacttaaaatgggtaatattgaaratcaagttgaagaaatcaatggctataaagtattggttactgaagtggatgtaccaaatgcgaaagcaattcgctcgacaatggaygattttaaatctaaactacaagatacaattatcattcttgcaagtaatgttgatgataaagtatcgatggttgcaactgtccctaaatctttaacaaataaygttaaagccggtgatcttatcaaacaaatggcaccaatcgttggtggtaaaggtggcggtcgtccagatatggctcaaggtggcggtacacaacctgaaaatatctcaaaatcattaagctttattaaagattacattaaaaatctataa

SEQ ID NO: 1990 - DNA, 483 bp, Staphylococcus aureus
atggctaaaaataagaaaackaacgcgatgcgtatgcttgatcgtgcaaaaattaaatacsaagttcatagctttgaggtaccagaagaacatttatykggysmagaagtcgcagaactyatacaagcaaatgttaaaacagtatttaaaacrcttgttctagaaaatrcaaaacatgaacattttgtatttgttatcccagtaagtgaaactttagatatgaaaaaggcagctgctwtggttggagagaagaaattgcarcttatgcctttagataatttraaaaatgtaacgggatacattcgtggtgggtgttcrcctgttggtatgaaaacattgtttccaacagtcgttgacaaatcstgtgaaaattatagtcatatcagtgtgagtggtgggcttcgaacaatgcaaatcacratagctgttgaggatttgattacaataactaaaggsaaaattggagcagttatccatgaatga

SEQ ID NO: 1991 - DNA, 2478 bp, Staphylococcus aureus
atgtcagaccctacactatttgattattcaatgatcaaaggtactgttgaagcgatattgtttcaaaacagtgataatttttatacagtgcttaaagtagatactattgaaacaaatgaagactttgatacaatgccaactgttgtagggtttcttccgaatattgttgaaggcgatgtctacacatttaaagggcaagttgttgatcatccacgttatggtaaacaattaaaagcagagacttttgaaaaagaaatgccacaaacgaaagaagcaattataagttatttatcwagtgatttgtttaaaggtgtaggtaaaaagacagctcaaaatattgttaatacattaggtgacaatgcgataaaygatatattagatgaccattcagtkctagaaaaagtttcgggattatctaaaaagaaacagaaacaaattgcagaacaaatttcagcaaatcaagaatctgaaaaaataatgattcgtttacatgatttagggtttggtcctaaactttcaatggcaatttatcagttttatctcggygatacactgactattttagatcgaaatccatatcaattgatttatgatattaaaggtattggttttaataaagcagatcaacttgctagaaatattggtatcgcttataacgataatgaacgattaaaagctgcgttgctctatacgttagaagaagaatgtattaaacagggacatacatatttgcctatcaatgttgttatagatttaacggttgatgtmttaaattatcaagatgaagaggtcatcgaacctgaaaaattagacgaaatgttgcaatacttaaatgaggaaaaacgactaattattgacaatgaacaagttgcaattccaagtttgtattattctgaaatcaaaagtgttcaaaacttattcagaataaagacgcatacaaataaacttacrgaaattgaacagtcagatttacaaatgcatattggygaaatagargatgcgaatcaagtgaactatgcagcttcacaaaaagaagctttgcaaacggctatcaattctaaggtgatgctattaaccggtggaccgggaacaggaaaracgacagtaattaaaggyattgtwgaattatatgctgagattcatggcttatcattagattatgatgattatgtcaatgatgattatccagttgtattagcagcgccaacaggaagagcgtcyaagagactacaagagtcaactggattagaagcwatgacgattcatcgtttaataggttggaatcaagacacaaagccagaggatatattagaaaatgaaatwaacgcacgactcataatcattgatgagatgtctatggtagatacttggttgttycaccaatttttaagtgcagttcctttagatgcacaattgatatttgtaggtgatgaggaccaattgccttctgtaggtcctggtcaagtatttaaagatttaattgaatcgaaagctataccacgagtwaatctgactgaagtatatcgtcaacaagatggttcaagcattatagaattagcacatcgaatgaarttgggtcagaaaattgatattacacagcgttttcatgatagaagttttattaactgtcaggcaaaccaaataccaacagttgtwgagaaggtagttactagtgctgttaataaagggtatactatggctgatattcaagtgcttgcaccaatgtataaaggaaatgccggtattaaacgtttaaatcaagttttacaagatattttaaaccctaaaaagaaagacacacgagaaattgagtttggtgatgtagtctttagaaaaggtgacaaagtattacaacttgttaataggccaaatgataacatattcaatggtgacataggagttattgttggtattttttgggcgaaagaaaatgcccttaataaagatgtrcttgttgtggattttgaaggtaatgaaattacatttacgaaacaagatatgatggaattaacacatgcwtattgtacatcaatccataaatcacaaggttcagaatttcctattgttatcatgcctattgttaaacagtattttagaatgttacaaagaccgatattatatactggtttaactagagcgaaaacsagtttagttytacttggtgatycrgaagcatttgatattggattraaaacaaatggtcaagcgcgtttaacacaattatgtacattgttgaaaaattattttaattcagaagatgaagamatgctggaaaayacagcaactaatgatacaggagcttcrcaaacgacaatagatgatcaagtagaagcgccaatgtcatcgaatgmtagtgragaagttaygtctgattcaacaaaaacagatayaaatgtattaacggaagctacaatgtttaaaattgacccaatgattaatatgggagaaatcacgccgtatgactttatagaacgttga

SEQ ID NO: 1992 - DNA, 765 bp, Staphylococcus aureus
atgatgataattacwgaaaaaagacacgagttaatattagaagaactttygcacaaagattttttgactttacaagaaytaatagatcgaactgghtgcagtgcttcaacaatacgaagagatttatctaaactacaacaattagggaaattrcaacgtgtgcatggtggtgcaatgttaaaagaaaatcgtatgrttgaggcgaatttaactgaaaaattagcaackaatctygatgaaaagaaaatgattgctaaaatagcagctaatcaaatcaacgataatgaatgcttatttatcgatgctggttcatctacattggagctaattaaatatattcaagcgaaagatatcattgtggtaaccaatggtttaacacatgtagaagctttacttaaaaaaggtattaaaacaattatgctaggtggtcaagttaaagaaaatacacttgctacgattggttcwagtgcyatggagatattaagacgatattgtttcgataaagcttttatcgggatgaatggattagatattgaacttggattaactactcccgatgagcaagaggcattagttaaacaaacagcaatgtcattagccaatcaatcatttgtacttatagatcattctaagtttaataaagtatattttgctcgtgtacctttgctagaaagtacgacaatcatcacatctgaaaaagcattaaatcaagaatcgttaaaagaatacmaacaaaagtatcactttataggagggactttatga

SEQ ID NO: 1993 - DNA, 669 bp, Staphylococcus aureus
atgatagatcaacaaacaatwtatcaatacatacaaaatggaaaaatagaagaagcgttacaagcattgttcggaaatatcgaagaaratcctacaattattgaaaattatattaatgcyggyatmgtacttgctgatgcgaatgagattgaaaaggcagagcgytttttccaaaaagctttaacaatagatccgaagaatggcgtcgtattttwtaatctagcaaatgtatattataatcagcaacgttatcaagaakctattaaattatatcaacaagcattacaaacagagattgaacaagttgattgtaattatatgatcggtatggcgtttaatcagttagaatcatttaagctggcattgccgtatttaatgactgctgcrgaactagataaagacaaagatgcagaagttcaatttcaatatggtcttgtattatgtcaattagaratgtttaatgaagccataactcaacttaaacatgtattaacgattgataaaaatcatgttgatgcaagatacaatttgggyttagcgttatttatgaaaaatgarratattgatgaagymataactcattttaaagaagctgtgactatcgaccctaaacacttattaagtcagcatgcgctgaaaacattcactaaaatgaaagaggaggagtaa

SEQ ID NO: 1994 - DNA, 921 bp, Staphylococcus aureus
atgatttatacagtgactttcaayccttcaattgactatgtcatttttacgaatgattttaaaattgatggtttgaacagagcaacagcaacatataaattcgctgggggraaaggtattaatgtctcrcgygtyttaaagacattrgatgttgagtcaactgcyttgggatttgcaggtggatttcctgggaaattcattatagatacattaaataacagtgcaattcaatcgaattttattgaagttgatgaagatacacgtattaatgtgaaattaaaaacaggacaagaaacagaaatcaatgcaccgggtcctcatataacgtcaacacaatttgaacaactgttrcaacaaattaaaaatacaacaagcgaagatatagttattgttgctggaagtgtaccaagtagtattccaagcgatgcgtatgcrcaaattgcacaaattacagcacagacaggtgctaaattagtagtcgacgctgaaaaagaattrgctgaaagcgttttaccatwtcatccactatttattaaacctaataaagatgaattagaagtgatgtttaatacaacagtgaactcagacrcagatgttattaaatatggtcgtttgttagttgataaaggtgcgcaatctgttattgtctcrcttggcggtgatggtgctatttatattgataaagaaatcagtattaaagcagttaatccacaagggaaagtggttaatacagttggctctggtgatagtacagttgcaggcatggtggctggaattgcttcaggtttawcgattgaaaaagcattycaacaagcagtcgcatgcggtactgccacggcatttgatgaggacttagcaacacgggaygctatagaaaaaataaaatcacaagttacgattwgcgtacttgatggggagtga

SEQ ID NO: 1995 - DNA, 1119 bp, Staphylococcus aureus
ttgtcaaataaagatatacgtgttgtcgttggtatgtcaggcggtgtagatagttctgtaacagcccacgtcttaaaagaacaaggttatgatgtcattggcatatttatgaaaaactgggatgacactgacgaaaatggcgtatgtactgcaactgaagattacaacgatgttattgaagtgtgtaatcaaattggcattccrtattacgctgttaattttgaaaaagaatattgggataaagtctttacgtatttcttagatgaatayaaaaaaggtcgtactccaaayccagacgttatgtgtaataaagaaattaagtttaaagcctttttagatcatgcgatgaatttaggtgcagattatgtagcaacaggrcattacgcacgcatacatcgtcatgaagatggtcatgttgaaatgttacgtggtgtagataataataaagatcaaacatacttcttgaatcaattatcycaacaacaactttcaaaagtgatgttcccaattggcgacatcgaaaagaktgaagtgcgtcgaattgctgaagaacaaggactwgttactgctaagaaaaaagattctacaggyatttgttttatcggcgaaaaaaactttaaaacatttttatcwcaatatytacctgcrcaaccgggtgatatgatwacacttgatggtaagaaaatgggtaaacatagtggkttgatgtattacacaataggacaaagacatggwttaggtataggtggagatggcgatccttggtttgttgtcggtaaaaayctaaaagataatgttttatatgtagaacaaggattccatcacgatgcattatacagtgaytacttaattgcttcagactattcatttgtaaatccagaagataatgacttagatcaaggttttgaatgtacagctaaatttagatatcgccaaaaagatacgaaagtttttgtgaaacgtgaaaacgaccatgcactacgtgttacttttgctgagccagtaagagcaatcacacctggacaagcagttgttttttatcaaggtgatgtgtgtcttggtggwgcaacaattgacgatgtgttcaaaaatgaaggtcaattaaattwtgttgtwtaa

SEQ ID NO: 1996 - DNA, 1143 bp, Staphylococcus aureus
atggaaatttatgcagattatgctgcgaccacaccagtaaaacctgaagtagtagatgcgatgatgaygatttacaattcgcattatggtaatccatcatcaatacatgctaagggaagagatgcgcgtaaatatttagatgagtcaagacgtcaaattgcacaattacttggtgcagatacacatgaaattatatttacgagtggygcaacagaatcgaataatacggcaattaaaggcatagtaaaagcaaatgaacaattgggtaatcacattatcacatcgaagattgaacatcattctgtgttacatgtttttgaacaattagagcgagaaggttttgatgtaacatatctagatgttgatgatacaggtgctattgatttagaycaacttgaagaaacaattacagataagacgattttagtatctattatgtttgtaaataatgaagttggcacagtgcaacaaatttatgatattcaagatattattgctgagacaaatgcatatttccatgttgatgcggttcaagcaattggacatcttgatgttaagtttgacgaatttgagatcgacgcaatgagtattactgcwcataagtttggmggaccaaaaggtgtcggtgcattaytagttaaagaccatgtyacaytagattatcctcaacttggcggtgaacaagaattgaaacgccgtgcaggyactgaaaatcttgcrcaaattgtygggatggctaaagcattacaattagcagaaaagaatcgagacgataacaatattcatttaatgaatttaaaagaacaatttttagttaaattacaagaaagagcgattccatttgaattaaatggttcaatgacggatgctacaggccatattgtaaatctatattttccgtttgttgaagttgaaaygatgttaacattgttggatatggcacaaatctatgtgtcgtctggatctgcatgtacagcaggctctacacaaccgtcgcatgttttagatgcaatgttcgaagatgargagcgatcaaatcattcgattcgatttagttttaacgaattgactactgaaaatgaaattaatgcaattgtagctgaaattcataaaatatattttaaatttaaggaggagtcataa

SEQ ID NO: 1997 - DNA, 1959 bp, Staphylococcus aureus
atgagagtaacagagttattaacaaaagatacratagcaatggatttaatggcaaatgacaaaaatggtgttattgatgagttagtaaatcaattagacaaagcaggtaaattaagtgatrtcgcgtcatttaaggaagcgattcacaatcgagaatcacaaagtacaactggtatcggygaaggtattgcyattccacatgcsaaagtrgccgcagttaagtcwccagctatygcrttyggtaaatctaaaghaggygtagattaycaaagtttrgatatgcaaccagcwcayttattctttatgattgcagcgccagaaggtggcgcmcaaacacatctagatgctttagctaagttgtctggtattttaatggatgaaaatgtacgygaraaattattacatgcwtcrtcwccwgaagaagtrytagcratyatwgatsakgctgatgatgaagygacaaaagaagaagaggcagaagctgaagcacaacaagttgcaactgcagaacaatcatctaaacaatctaaygagccatatgtrttagcwgtaactgcttgtccaacaggtattgcacayacrtayatggcacgtgaygcattgaaaaarcaagcggataaratgggyattaaaattaaagtwgaaacgaayggttcaagyggyattaaaaaccatttaackgaacaagatattraaaatgcaacaggtatcattgttgctgctgatgttcatgttgagacggatcgcttcgatggtaaaaatgtcgtagaagtaccagtagcagatggtattaaacgcccagaagaattaattaataaagcattagatacaagtcgtaaaccttttgttgcccgtgatggtcaaagaaaaggtaactcaaatgacagtcaagaaaaattaagcccaggtaaagcwttctataaacacttaatgaacggtgtttctaacatgttgccacttgtaatatctggtggtattttaatggcaatygtrtttttatttggwgyaraytcatttrawccaaaaagctcagagtacaatgcgtttgcagagcagctwtggaacattggtagtaaaagtgcattcgcgytaatcattccaattttatctggattcattgcacgtagtattgcggataaacctggwttygcwkcwggtcttgtaggtggtatgttagcaatttcaggtggttcaggatttattggtggtattattgcaggtttcttagcaggttacttaacacaaggtgttaaagysatgacacgtaagttaccacaagcattagarggattaaarccaacattaatttayccaytattracagtgacrgctacaggcttattgatgatttatgyctttaatccaccagcatcttggttaaatcatttrttattagatggattaaayaatttatcaggttctaatattgtattattaggtttagtyattggcgctatgatggcrattgatatgggcggtccattcaacaaagcggcatatgtttttgcaacaggtgcgttgattgaaggtaatgcagcaccaattacagctgcaatgattggtggtatgattccaccgttagcaattgcgacagcgatgttaattttyagacgtaaatttacaaaagaacaacgtggttcaattatccctaactatgtgatgggtatgtcvtttattacagaaggtgcgatyccattygcrgctgccgatccattacgtgttatyccttcaatgatgattggktcaggtataggtggcgcaatygctttaggyttaggttcwcgaattactgcgccacayggtggtattatygtaattgttggtackgatggtgcacayttactwcaaacwcttattgcacttstagtwggyacattagtttcagcattaatttayggwytwatyaaaccmaagttaactgaaacagaaatcgaagcttcaaaatcaatggacgartar

SEQ ID NO: 1998 - DNA, 1182 bp, Staphylococcus aureus
gtgtcagaattaattatatataacggcaaagtttatactgaagatgrcaaaatcgataatggttacattcatgtgaaagatggacagattgttgcaattggagaagkggatgataaagcagcrattgataatgatacgacaaataaaattcaagtgattgatgcwaaaggtcatcatgtattaccaggttttatygatatacatattcatggtggttatggwcargatgcaatggatgggtcatacgatggcttaaaatatctatccgaaaatttgttrtctgaagggacgacatcrtacttggccactacaatgacgcaatckactgataaaatagataawgcacttayaaatattgctaaatatgaagyggagcaagatgttcacaatgcagcggaaattgtaggtatacatttrgaaggrccatttatatctgaaaataaagttggtgctcaacatccgcaatacgttgtacgcccatttatcgataaaattaaacattttcaagagactgctaacrgaytaataaagattatgacgtttgcacctgaarttgaaggtgcaaaagaagcgcttgaaacgtataaagatgacattattttttcaattggtcatacagtrgcaacatacgaagaagcagtygaagctgytgagcgaggagctaaacatgtcacgcatttatataatgcagcgacgycattccarcatagagaaccaggtgtttttggagcagcatggttgaatgatgctytacataccgaaatgattgttgatggcacwcattctcatccggcatcggttgcwattgcttaccgtatgaaaggtaatgaacgtttttatttaattaccgatgcaatgcgtgcaaaaggtatgcctgaaggagaatatgatttgggtggwcaaaaagtaactgttcaatcgcaacaagcacgtcttrcaaatggtgcrcttgctggtagtattttaaaaatgaatcatgggttacgtaacttaatatcatttacaggtgatacattagatcatttatggcgwgtaacaagtttaaatcaagccattgcattaggtatcgatgatagaaaaggtagtattaaagtaaataaggatgcagatcttgttattctagatgatgayatgaatgtaaaatctacaataaaacaaggyaaggttcacacatttagctaa

SEQ ID NO: 1999 - DNA, 1350 bp, Staphylococcus aureus
ttggaaacttcgaccataattagtttgattatatttattctattaattgcattaaccacwgtatttgttggttcagaatttgcattagtaaaaattagagcaacaagaattgaacagctagcagatgaaggaaataaacctgctaaaatagtaaaaaagatgattgctaatctagattattatctttctgcttgtcagttaggtataacwgtaacatctttagggttaggttggcttggtgaaccaacgtttgaaaagctattacacccratatttgaagcaatcaatttaccaactgcattaacgacgacgatttcgtttgcagtrtcatttataatcgttacgtatttgcatgtagtacttggtgaattagcgcctaaatctatagckattcaacatactgaaaagcttgctttagtatatgcaagaccattgttctatttcggtaacattatgaaaccattgatttggctgatgaatggttctgcacgtgttattattagaatgtttggtgtaaatcctgatgcccaaactgatgcaatgtcagaagaagaaatcaaaattattattaacaatagttataatggtggagaaatcaaccaaactgaattggcatatatgcaaaatatcttttcattcgatgaaagacatgcaaaagatataatggtacctagaackcaaatgattacactaaatgaaccttttaatgtagacgaattactwgawacaataaaagaacatcaatttacrcgttatccaattactgatgatggtgataaagaccacattaaaggatttatyaacgtyaaagaatttttaactgaataygcttctggaaaaacgattaaaatagcaaamtatatacaygagttgccaatgatttcagagacaacacgtatcagtgatgcattaattagaatgcaacgtgarcatgtacatatgagtcttattatagatgaatatggtggaacggcaggtattttaacgatggaagatattttagaagaaatcgttggrgaaattcgtgatgaatttgatgatgatgaagtgaatgatatcgttaaaattgataataagacattccaagtaaatggyagagtactattggatgatttaactgaagagttcggtatagaatttgatgactctgaggatattgatacgataggtggatggttacaatctcgyaatacmaayttacaaaaagatgattacgtggatacaacktatgatcgctgggttgtttcagaaatcgataaccaccaaattatttgggtratrttaaactatgaatttaatgaascgagacctactatcggacagtctgatgaagatgaaaaatcagaatag

SEQ ID NO: 2000 - DNA, 183 bp, Staphylococcus aureus
atggcagacgaaagtaagttcgatcaatttaaaggmaatgttaaagaaacagtaggtaacgttactgataacaaagaattagaaaaagaaggtcagcaagataaagygaytggtaaagcaaaagaagttgttgaaaatgctaaaaacaaaataactgatgcaattgataaacttaaaaaataa

SEQ ID NO: 2001 - DNA, 1389 bp, Staphylococcus aureus
atgaatgaaacgtatcgcgggggcaacaagttaatcttaggtattgtattaggtgttattacattttggttgtttgcacaatcacttgtaaatgttgtrccraatttacaacaaagttttggtrcagacatgggracaattagtatwgcggtmagtctaacygcactattttcaggyatgtttgtygttggagcaggyggyctrgcagataaaattggrcgcgtgaaaatgacraatatcggyttattrttaagtattattggttcagcattaattattattacraatttaccrgcattrytaattttaggycgtrttatacaaggygtatcagcagcgtgtattatgccttcyacattggccattatgaaaacttattatsagggtgctgaacgtcagcgygccttaagytaytggtctatcggttcttggggtggmagtggtatctgttcactcttcggtggkgcagttgcgacaactatgggttggagatggattttcatcttctcaatyatcgttgccgtactttcaatgttactcatcaaagggacgcctgaaacgaaatcagaarttaccaatacacataaatttgacgttgcaggkctaattgttctagtagttatgttrytaagtttaaacgttgtcattactaaaggtgcagcacttggttayacatcattatggttctttggtttrattgcaatcgtaattgtagcattctttattttcttaaawgttgagaaaaaagtagataatccrcttattgattttaaattatttgaaaataaaccatatacaggtgcaacgatttcgaacttcttattaaacggtkttgcaggtacattaattgtagcgaatacattcgtrcaacaaggtttaggttatacagcattgcaggcaggatacttatcaatyacttatttaatcatggtgttattgatgattmgagttggtgaaaaattattacaaaaaatgggttctaagcgaccaatgttattaggtacattcattgtgrtcattggtattgcacttatttcattagtattcttaccaggcatattttatgttatyagttgtgtcgtaggatatttatgtttyggactaggcttaggtatttatgcaacaccttctacagatacagctatttcraatgcaccgttagataaagttggcgttgcttcaggtatttataaaatggcttcatcacttggtggygcattcggtgtcgcaattagtggtgcwgtatatgyyggtgcagttgctgcaackagcattcatacaggtgcgatgattgcactttgggttaacgtattaatgggaatcatggcatttatcgcaattttattygcgattcctaatgatgataaacgtgtcaaagatgcgaaataa

SEQ ID NO: 2002 - DNA, 573 bp, Staphylococcus aureus
ttgacaagytttatctataaaatactttatgttgtcaaaatcaacgcttatacatatgacataatgacggaggacatcatgattctatctatattacttatctttttctgtatcagacttgtcagcttaaagatatctattaatcactcaaaacaattaaaagcagacggtgcagttgaatatggcgttaaaaattcgaagtttttagcaataacacacgttttaatttatgtattggctggtgtagaggcatttattaataaagatacatttagctttgcaaatggtattggcttagttatattaatctttgcttatatcatgttatttatggttattaaaactttaggtggtatttggacattaaaattattcattttacctaaccatcctattattaaatctggattatataaaattacaaaacacccaaattacttcttaaacatcattcctgaattaatcggtgtattattattaacacacgcaacatatacaactattttattagtaccgtatgcgtatttcttatatgtacgtattaaacaagaagagaaattaatgaatatttaa

SEQ ID NO: 2003 - DNA, 840 bp, Staphylococcus aureus
atgttgaatgagatacaaatattaaataatggatacccgatgccttcagttggrttaggtgtttataaaatytctgacgaagatatgactaaagttgtaaatgctgcaattgacgcaggctatagagcgtttgatacagcatacttttatgataatgaggcttcactaggacgagcattaaaggataatggcgtcgatagagaagatttgtttataacaacgaagttatggaatgactatcaaggttatgagaaaacattcgaatatttcaacaaatcgattgaaaatttacaaactgattatcttgatttatttctaatacattggccttgtgaagcagatggtctatttttagaaacatataaagctatggaagaactttacgagcaaggtaaggtaaaagcaataggtgtatgtaattttaatgttcatcatctagaaaaattaatggctcaatcaagtatcaaaccaatggtgaatcaaattgaggtacatccatattttaaccaacaagaattacaagaattttgtgatcgtcacgatattaaagtgactgcatggatgcctttgatgagaaatagaggactactagacraccctgtcattgttaaaattgctgaaaaatatcataaaacaccagcacaagttgtattrcgttggcatttagcacacaatagaattattattccaaaatctcagacacctaaacgcattcaagaaaatatagatattttagattttaatttagaattaacagaagtagctgaaattgatgctttaratagaaatgcaagacaaggtaaaaatccagatgatgtgaaaattggggatttaaaataa

SEQ ID NO: 2004 - DNA, 423 bp, Staphylococcus aureus
atgaaaatttctactaaagggagatatggacttacattgatgatttctcttgctaaaaaagaggggcaaggatgtatatcattaaagtcaattgctgaagaaaataatttgagtgatttatatttagaacagcttgtaggtcctttaagaaatgcggggttaattcgaagtgtacgcggtgctaaaggtggataccaattaagagtrccagcggaagaaatctcagcaggggatattataagactgttrgaaggtccaattacatttgttgaaagtattgaatcagaaccacctgcgcaaaaacaactatggattcgcatgagagatgcagtgagagatgttttagataatacaacattgaaatatttagcggaatatgtagatacaagygaagatttagacggatacatgttttatatttaa

SEQ ID NO: 2005 - DNA, 984 bp, Staphylococcus aureus
atgaaaattagagtcgtcattccttgttttaatgaaggggaagtcattacacaaacacatcaacaattaactgaaatactttcacaagatagtagtgtgaaaggctatgattataatatgcttttcatagatgatggwagtacggataccactatagatgaaatgcaacatcttgccacaatagatagrcatgtcagctttatttcttttagtagaaattttggaaaagaagcagctatgattgcaggttaccagcatagtactgaatttgatgcagtcatcatgatagattgtgatttgcaacatccacctgaatatattccgaaaatggttgaaggttttatggaaggctatgatcaagtgattgcaaagcgtgatagaagtggtgaaaattttagtcgcaaaacattaagccatttgtaytataagttagttaattgctttgtagaagaagtacaatttgatgatggtgttggtgattttagacttttaagccaaagagctgttaaatccattgcatcacttgaagaatataatcgattttcaaaagggttatttgaatggmtmggmtataatactaaagtgtttacgtatcaaaatgttgmgagacaaaaaggrgaatctaartggtcctttaaaaagttatttaattatggtattgatggattgatttcctttaatagtaaacctttgagaatgatgatwtatcttggcttrtttatyttttcaataagcgygytatatattatctatttattcatcaatatyawgatwtctggtgttaatatyccrggatatttttcaacgattgcagctattttattattaggcggcatacagttaatttcaattggtgttgtaggtgaatatattggcaggatatattatgaagttaaggcacgtcctaaatayattattcaagctacaaatctttcaagtmttgaaaatgatgagaaggatrcccataaagttkattctaaataa

SEQ ID NO: 2006 - DNA, 774 bp, Staphylococcus aureus
atgaaacatcaattttcaagaaatgaactagcgattggacawcaaggtttagatttattgaagcaacaaactgttgtcatacttggcgttggaggtgttggttcatttgctgckgaagcattagcaagaacgaatattggtcatattatattaatagataaagatgatgttgatattacaaatgtaaacagacaattacacgctttaactacaacggtaggacaaagtaaagtttctttgatggaagaacgtattaaattaattaatccagattgtaaagtcacgccyttacatatgttttatacagaagagacatatgaagaaattttcgataaytacgatatagattattttgtagatgcaagtgatacaataatgtacaaagtacacttaatgaaagagtgtcttgaccgagggattaaagtgatttccagtatgggtgctgcaaataaaacagatccaacacgttttacaatttcagatatctctaaaacacataccgatccaatggccaaaattattcgtcaaaaattgaaaaaactaggaattcgtaaagggattccagttgtattttcagatgaaagtccaattgtcataagagaagatgtaaaagatatagttggagataaaaatgctatcaatcgaaaaggacaaatgccaccttcttcaaatgcctttgtgccaagtgtwgttggattaatttgtgcwagttatgtggtgaatgacgtattaaaagatattccagttcgtcgcattaaagacaaagggcaataa

SEQ ID NO: 2007 - DNA, 594 bp, Staphylococcus aureus
atgattctagtcatagataataatgattcatttacatataatttaatagactatattaagactcaaacgaaactaacagttcaagttgttggtattgataatctgctgatagaagacrtcattaatatgaagccaaaagcaattgttatttcrcctgggccgggtaatccggatgattatcctatmttgaatgaagtgttagaacaattttatcagcgtgtacctatactaggtgtatgyttaggatttcaatgtatcgtgtcttattttggtggaaatatcattcacggctatcatcctgtacacggacatactacacagttacgccataccaatgaaggtatttttcaaggactgcctcaaaatttcaatgtaatgcgttatcattcattaattgctgacggagcgacttttccaaattgcttaaagattacagcmaaaaacgatgaagcrattattatggcatttgagcatattasatttccggtttttggtgtgcaatatcatcctgaatctattttgagtgaatacggttatcgacaagttgaattatttttatcgaaggtaggtgattactgtgagaatagaatataa

SEQ ID NO: 2008 - DNA, 126 bp, Staphylococcus aureus
ttgggttttatagcgtttaataaatgtttcctcgttgaattttgggaaaataatcaaagygataatgctaaatataaaattttaagttactatgtacttatgtataaatcagtgaaagaggtaaaa

SEQ ID NO: 2009 - DNA, 177 bp, Staphylococcus aureus
gtgttgttaatcarcagaggtgtatttgatttaaatgattttattagattaaaagtattttcatcgtataacaacatacacgataaaattwtgtatttatataggaagtttttagatttacttgatttaacagataacacatttgaaaawatagttaaatcaaattatatagagtgt

SEQ ID NO: 2010 - DNA, 1152 bp, Staphylococcus aureus
gtgagaatagaatataattatcgctactatttaactgaaaatgaatataagcaataccatattcaattaaagggatttataaagaagtatgttgcyactaagttggctgatgtgggagaagtgatacactttgcacaagcgcagcaacgacaaggtagatatgtytcgttatatttaagttacgaagcggcaaagtattttaatcatgytatgtgtacacattcattagstaaagatgatatttatgcagyagcttatagttttgaaaawgcggaaagcataaattcaacatatgaacatcaaactwcttatgtatcaaagyatcatttttcatttgttgaatcttctgaggttatgatgactaatattaaacgtgtccaacaagcaattgttgaaggygaaacgtatcaagtgaactatacggcgcgcttaacggayaacatttattatcctattagtactttatatgaacgattaactcaatttagtaatggtaattatactgcgttattacaaacwgatgaaatccaagtagcgtctatctcaccagaattattttttcaaaaaggacartttaacaatgtcgataacgttatcataagcaaaccgatgaaagggacaatgcctagaggtaaaacggaagctgaagatcaacagtattataaawcattgcaaacttcttcgaaagatcgtgcagaaaatgtcatgattgttgatttrctaagaaacgatatagggagaatatcacagagtggctcaattaaggtgtataaactatttttyattgaggyatataaaactgtatttcaaatgacttcgatggtaagtggwactttaaaaamtaatacagacytaactcaaatyttaacatcgttatttccttgtggttcgattacaggtgcaccgaaactgaatacaatgaaatatattaaacaattwgaaagttcacctcgtggtatatactgcggagcaattggactattacttccaactgaagatgataaaatgatttttaatattccrattcgyactattgagtataaatatggacaagcgatttatggagtcggagcaggtattacaattgattctaagccaaaagatgaagtraatgaattttacgcaaaaaccaagattttggagatgttataa

SEQ ID NO: 2011 - DNA, 711 bp, Staphylococcus aureus
atgaaaatatatagtcaaggtgaccaagccattgtagtmgcaattgaaaaagaagtatctaaaagtttaaccgaagatttattaacacttcgctcatatttaattgaacaaaattatccatttattatagaaattgtgccatcagaatcagacatgatgattgtctaygacgcaagggatatgattaaacaccataatatacaatcaccttttttatacatgaaagcactaatagaatcgattcatttaaacataaaacatgattttaaccagcaagatttgattgaaataccaattgtgtatggttcgaaatatggtccggatwtagaatcacttttaaaacattacaaaatcaagctagaaacwtttattgaattacattctaagrcgcaatattttgtttcgatgatgggatattcacctgggtttycttatttaactggattaaataagaaattgtatattaatcacacgagtaaacagaaaaaattcattccagctggttctgtagtacttgaagggaaaaaatgcggtattgtaacwacggatacaattaatgattggttagttattggttatacaccattatcactttttaatccgaaagaatcagatttcgcacgcttaaagttaggcgataatattaaatttagacctatcaatgaaaatgaattagaagtaggagcgtttaaagatgtcaatcataattga

SEQ ID NO: 2012 - DNA, 1263 bp, Staphylococcus aureus
atgattaaaatacctagagggacgcaggatattttacctgaagattcaaagaaatggcgttacattgaaaatcaattagatgaattaatgacattttayaattataaagaaataagaacaccaatttttgaaagtacagatctttttgcaagaggtgttggtgattcaaccgatgtcgtacaaaaagaaatgtatacatttaaagataaaggcgatagaagtattacattaagacctgagggaacagctgcagttgtgcgttcatatattgaacataaaatgcaaggtaatccaaaccaaccaattaaactttattacaatggaccgatgtttagatatgaacgtaagcaaaaaggrcgctatcgtcaatttaatcaatttggtgtagaagctattggtgctgaaaatcctagygtagatgcagaagtattagctatggttatgcatatttatcaatcatttggattaaaacatttaaagcttgttattaatagtgtaggggatatggcgtctcgaaaagaatataacgaagcgttagtgaaacactttgaaccagtaattcatgaattttgttcagattgtcaatcacgtttgcatacaaatccgatgcgaattttggattgtaaagtwgaccgtgataaagaagcgattaagactgcacctagaatcactgatttcttaaatgaggaatctaaggcatattatgaacaagtaaaagcttatttagatgatttaggtattccatatattgaagatcctaacttagttcgtggattggattattatacacatacagcatttgaattaatgatggataaycctaactatgatggtgccattacaackctttgtggtggtggccgttataatggtttattagaattgctagatggtccaagtgaaacaggtattggttttgcgctaagtatagarcgattattgcttgcacttgaagaagaaggtatcgaattagatattgaagaaaacttagatttattcattgttacaatgggtgatcaagcagatcgatatgctgtgaagytattaaatcatttgagacataatggtattaaagcagataaagactayttacagcgtaaaattaaaggacaaatgaaacaagcagaccgtttaggtgccaagtttacaatcgttattggtgatcaagaattagaaaataataaaatcgatgttaaaaatatgacaactggtgaatctgaaacaattgaattagacgcattagtcgaatattttaagaagtag

SEQ ID NO: 2013 - DNA, 1005 bp, Staphylococcus aureus
atgtcaatcataattgaaaaaagtggcttattcagtagctttcaggactttggyagaaggggatatgaacatgatggtgtaattccatgtggtgcacttgatactttagcacatgaaattgctaatcgattagttgcwaatgacaagaatgaagcaactttggaaatgactaataaaatggcaacgattcgttttacagaacctacgctgattgcattagcagggggtaatgtcaaagcttacactgagcawatgactatatctccatataaattgtatttgttagataaaggcgatgttttaaagtttagagaaacaagttatacatcgcgagtgtatttagctgtgggaggyggatttgaattagatgcatggttaggatctaaytcaaccgactttaatgtaaaaattggtggttttaaaggwagaacattacaagatggcgatgaaataaagcttaagagagattatacagctcgtcatcataagttatttgaaaaccttgctcacacgaaacaaacagattggggtattgatggrtacgccttgtcatttaattatatgtctgatgtatttcatgtcgttaaaaataaaggtacggaagattttaaagaagatgccattcaaagatttgtgaaacatgattataaagtaacgagcaaagcaaatcgcatgggratgatgcttgaaggtgaaaaaatcaaagcyttttatgaagatatgccrccgtatcagactgtcaaaaaaggaacgatacaaattaagcgtgatggcacacctattatcytattaaatgatcattayacgytaggtagctacccgcaaatcggtacaatcgcaagttatcatttaacgaaattagcacaaaaaccgcaaggatcacgtttgaaatttcaatttatagatattttaacggctgaaaagaacctygttaagtatagtaactggttaaaccaattattccatggaatagaatatagaatgcaattagaaatgatgaaataa

SEQ ID NO: 2014 - DNA, 876 bp, Staphylococcus aureus
atraaaaaaatagaggcatggttatctaaaaagggtcttaaaaataaacgtactctaatagtagtgattgcctttgtcttatttatcatctttttatttttattgctgaatagcaatagtgaagatagtgggaacatyacgataactgaaaatgctgaattacgtacaggtccaaacgctgcgtatccagtcatwtayaaagttgaraaaggtgaccattttaaaaagattggtaaagtaggtaaatggattgaagttgaagatacatccagtaatgaaaaaggttggatagctggatggcacacaaatttagatattgtcgcggataatacgaaggagaaaaatcctttgcaaggtaaaacaatagtgcttgatcctggtcatggaggtagtgaccagggtgcttcaagcaatactaaatataaaagtttagaaaaagaytatacgttgaaaacagcaaaagaattgcagcgtactttagaaaaagaaggcgcaactgttaagatgacaagaacagacgatacatatgtttcactagaaaatcgtgatatcaaaggcgatgcctatttgagtatacataatgatgcvttagaatcatctaatgcaaatggaatgacagtttattggtatcatgataatcaaagagctttagcagatacgttagacgctacgattcagaagaaaggtytactttctaatcgcggttcaagacaagaaaattatcaagtgttaagacaaacaaaagttcctgctgttttattagaattaggttatattagtaacccaactgatgaaacgatgattaaagatcaattacatagacaaattttagaacaagcaattgttgatggmcttaaaatttatttttctgcgtag

SEQ ID NO: 2015 - DNA, 1941 bp, Staphylococcus aureus
atgagttcacaaaaaaagaaaattagtctttttgcgttcttcttattaaccgtaataacgattaccttgaagacgtatttttcttattatgttgatttttctttaggtgttaaaggtttagtacaaaacttaatattattgatgaatccttatagtttagtagcactggttttaagtgtgttcctattctttaaaggcaaaaaagcattttggttyatgttcataggcggcttcttattgacgttcctattatatgccaatgttgtgtactttagattcttctckgattttttaacgtttagtactttaaaccaagtaggtaacgtagaatctatgggtggtgcggttagtgcatcattcaaatggtatgactttgtttatttcattgatacgttagtttacttattcattttaatatttaaaacaaaatggttagacacaaaagcatttagtaagaaatttgttcctgtcgtaatggcrgcttcagtagcattattcttcttaaacttagcttttgctgaaactgacagaccagaattattaacacgtacatttgaccataaatatttagtgaaatatttaggaccktataactttacagtatacgatggtgttaaaactatcgaaaataatcaacaaaaagcgytagcatctgaagatgacttaacaaaagtattaaattatacgaaacaacgtcaaacagagcctaacccagaatattatggggtrgcaaagaagaaaaatattattaagattcayttagaaagtttccaaaccttcttaattaataaaaaggttaatggtaaagaagtaacaccgtttttaaacaaattatcaagtgggaaagagcaattcacatacttccctaactttttccatcaaacaggtcaaggtaaaacatctgactctgaatttacaatggataacagtttatacggtttaccgcaaggttctgccttttcattaaaaggagataatacgtatcagtcaytaccagcaattttagatcaaaagcaaggctacaaatctgatgtcatgcacggtgactataaaacattctggaacagagaccaagtatataaacactttggtatcgataaattctatgatgcaacatactatgacatgtcwgataaaaacgttgtaaacttaggcttgaaagacaaaattttctttaaagattctgctaattatcaagctaagatgaaatcaccattctattctcatttaattacwttgactaaccactatccattcacattagatgaaaaggatgcractattgagaartcaaacacaggtgatgcaacagttgatggttatattcaaacagcrcgttatttagacgaagcattagaagaatatattaatgacttgaagaaaaaaggattatatgacaattcagtgattatgatttatggtgaccactatggtatctctgaaaaccataacaatgccatggaaaaactattaggtgaaaaaatcacaccrgctaaatttacagatttaaacagaactggtttctggattaaaatccctggtaaatctggtggtatcaataatgaatatgctggtcaagtcgatgtaatgccaacaattttacatttggctggtatagatacgaagaaytatttaatgttcggtactgatttattctctaaaggtcataatcaagtagttccattcagaaatggtgactttataacaaaagattataaatatgttaatggtaagatttattctaataaaaataatgaactcataactactcaaccagctgatttcgaaaagaataaaaagcaagttgaaaaggatctcgaaatgagtgacaacgtgcttaatggtgatttrtttagattctacaaaaatccagacttcaaaaaggtaaatccttcgaagtataaatatgaaacaggacctaaagcaaactctaaaaaataa

SEQ ID NO: 2016 - DNA, 453 bp, Staphylococcus aureus
atgaaagtagttgtacaaagagttaaagaagcatcggtgacgaatgatacattaaataatcaaatcaaaaaaggatattgtttattagtcggtatcggtcagractctacagagcaagatgcagatgtaattgcaaagaaaattgctaatgcaagattatttgaagatgacaataataaattaaactttaatatccaacaaatgaatggtgaaataytatcagtttcacaatttactctctatgcagatgtaaaaaaaggtaaccgtccaggtttctcaaattctaaaaatcctgatcaagcrgtaaaaatwtatgagtattttaatgatgcgctacgagcgtatggtctwactgtgaaaacaggtgaatttggaacacacatgaatgttaryataaataatgatggtccagtcactattatttatgaaagtcaggacggcaaaattcaatra

SEQ ID NO: 2017 - DNA, 1884 bp, Staphylococcus aureus
atgggtatggaagcatataaaattgaacatttaaataaatcttatgccgataagaytatattcgataayctagatttatcaatttcagaaggtgaaaaaataggtttrgtrggcataaatggtacagggaaaagtacgttgttaaaagtaattggtggtattgatgatgattttacagccaatgttatgcatccaaatcaatatcgaattcgwtattcgtctcagaaacaggaycttaatgaagatatgacwgtttttgatgcagtattaagttctgatacaacaactttacgcatcatcaagcaatatgarcaggcagtacaagcttatgcggatgaycaaagtgataaattgttcaagcgaatgatrgatgcgcaagatgctatggatcaacatgatgcttgggactataacgctgaaattaaaacratcctctcaaaactaggtatacatgatactactaaatacattaaagaattatccggcggacaacaaaaacgtgttgtacttgcwaaaacattaatagaacaaccagatttattgttattagatgaacctacgaaccatttagacttcgaatcaatcagctggttgatcaattatgtgaagcaatatcctcatacwgttttattcgtaacccatgatcgatattttttaaatgaagtttccactagaattattgaactaaacagaggtaagttagcgtcatatcctggtaactatgaatcttatattgaaatgcgcgctgaaagagaastawcacttcaaaagcaacaacaaaagcaacgagctttatataaggaagaacttgcttggatgagggctggagctaaggcwcgtactacaaagcaacaagctagaattaatcgatttaatgacctagaaaatgaagttaaccagcaatataaagacgataaaggtgaattgaatcttgcttattcaagattaggtaagcaagtgttcgaattagaagacttatcaaaggctattaatgataaagtattatttgaacatctgacggaaattattcaaaaaggtgagcgtattggtgttgttgggccaaatggagctggtaaaacaacactcttaaatattttgagtggagaagaccaacaattcgaaggtaaattgaagactggrcagacggttaaagtagcttattttaagcaaacagatgagaccctggatagagatattcgtatgattgattatttaagagaagaaartgagrtygcaaaagaaaaagatggaacctcggtatctattacacaacttcttgaacgatttttatttccaagtgcaactcatggtaaaaaagtttataaattatctggtggagagcaaaagcgtttgtatttattacgtctactcgtacaccagccaaatgttctgttgttagatgaaccgacaaatgatttagatactgagactttaacaatacttgaagattatattcatactttcggtggtacagtgattaccgtaagccatgatcgctacttyttaaataaagttgcacagtcatattggtttattcatgatggtcagatggaaaagattatcggaacttttgaagattatgaaagttataaaaaatcattagataaaaataaatccacattgaagcaacamtctaaatcttmtacaactgtacgtaagaaaaatggtttatcatataaagaaaarttagaatatgaacaattgatgaaacgcatagaacaagcggaagtaagaatggaagaaatwgatgtgctcatgattgaggcaagtgcagattatgggaaaattaaagaaytaaacgaagaaaaagaacaacttgaaattcaatatgatttagacatcacaagatggagtgagttagaagaaattaaagaacaacaataa

SEQ ID NO: 2018 - DNA, 2190 bp, Staphylococcus aureus
atgaacaacgaatatccatatagtgcagaygaagttcttcacaaagcaaaatcatatttgtcagcagatgaatatgagtatgttttaaaaagctatcatattgcttatgaagcacataaaggtcagttccgaaaaaacggattaccatacattatgcatcctatacaagttgcaggtattttaacagaaatgcgattagacggaccgacgattgtcgcaggttttttgcatgatgtaattgaagatacaccgtatacatttgaagatgtaaaagaaatgttcaatgaagaagttgctcgaattgttgatggtgtgacgaagcttaaaaaagtaaaataccgmtcaaaagaagaacaacaagctgaaaatcatcgcaagttatttattgcgattgccaaagatgtacgcgtaattttggtgaaattagcagacagattacataatatgcgtaccttgaaagccatgccgcgygaaaaacaaattagaatttctcgagaaacattagaaatttatgcaccwttagcacatcrtcttggtattaatacaatyaaatgggaactagaagatacggctcttcgttatattgataatgtrcaatattttagaatagtcaatttaatgaagaagaaacgtagtgaacgkgaagcgtatatcgaaacggctattgatagaatacgtacygaaatggaccgaatgaatatcgaaggcgatataaatggtagacctaaacatatttacagtatttatcggaaaatgatgaagcagaaaaarcaatttgatcaaatttttgatttgttggcgatacgtgttattgtcaattctattaatgattgttatgcgatacttgggttggtgcatacgttatggaaaccgatgccaggacgttttaaagattatattgcaatgcctaaacaaaatttgtatcagtcattgcatactacagtagtaggyccaaatggagacccgctcgaaatccaaatacgaacgtttgatatgcacgaaattgctgarcatggtgttgcagcacactgggcttacaaagaaggtaaaaaagtaagtgaaaaagatcaaacttatcaaaataagttaaattggttaaaagarttagctgaagcggatcatacwtcgtctgacgctcaagaatttatggaaaccttaaaatatgacttacagagtgacaaagtataygcatttaccccagcgagtgatgttattgagttgccatatggtgctgtgccgattgattttgcttatgcgattcacagtgaagtaggtaataagatgattggtgccaaggtgaatggcaaaattgtaccaattgactatattttacaaacaggcgatattgttgaaatacgtactagtaaacattcatatggaccaagtcgtgattggttgaaaattgttaaatcgtctagtgccaaaggtaaaattaaaagtttcttcaaaaaacaagatcgttcatctaayattgaaaaaggmcgaatgatggttgaagytgaaataaaagagcaaggatttagagtcgaagatattttgacagagaaaaatattcaggttgttaatgaaaaatataactttgcaaatgaagatgatttattcgcagctgtaggatttggcggcgtgacatccttacagattgttaataaattaactgaaagacaacgtattttagataarcaacgtgctttaaatgaagmacaagaagttacgaaatcattgcctattaaagacaacatcattactgatagtggtgtctatgtagaaggtttagaaaatgtacttatcaagttgtcaaaatgttgtaatcctataccaggtgatgatattgtaggttatatcaccaaaggtcayggtattaaagtacatcgcactgattgcccaaatattaagaacgaaactgaacgactaattaatgttgaatgggtaaaatcaaaagacgcaactcaaaaatatcaggttgatttagaggtaactgcgtatgaccgaaatggcttgttraatgargtactacaagctgttagctcgacagccggcaatttaattaaagtttcaggwcgttcagatattgataaaaatgcaataataaatattagtgtcatggtgaaaaacgtgaatgatgtttatcgtgtggtagaaaagatcaaacaacttggtgatgtttatacagtaacaagagtttggaactag

SEQ ID NO: 2019 - DNA, 1782 bp, Staphylococcus aureus
atgatgcaacaaacattatcgcattactttgggtatgaaacrtttcgaccaggacaagaagaaattattagcaaagtattagaccatcgtaatgtgcttggtgtcttaccaactggtggaggtaagtctatatgctatcaagtaccaggtttattgttaggtggtacaacaattgtaataagtccactaatatcattaatgaaagatcaagtggatcaattaaaagcgatgggaattcaagctgcttttttaaatagtagtttgactcaaaaagagcaacaacgtattgaaaaagcattatcaaatggagaaattcaatttttgtatgttgcaccagaacgatttgaaaaccgatattttttaaatatgcttcagcgtataaagattcayttagtcgcgtttgatgaagcgcattgtatwtctaaatggggwcatgatttyagrccgagttaycaaaaygttatttcwaaagtatttacgttacctcaagattttacaataatagcgttgacagcaactgccacggttgaagtacagcaagatattagagaaaagttaaatatcgctcaaactgatcaaattaaaacgagtactaagcgtagaaacttaatttttaaagtaaatcctacttatcaacgtcaaaaatttatattggattatattaaaacacaygatgaagatgcaggyattatttattgttctacacgtaagcaagttgaagagcttcaagaagccttagaaagycagaaaattgaaagtgttatatatcatgcaggtttgagcaataaagaaagagaagaagcgcagaatgatttcttatttgatcgtgttaaagtagtcgttgctacaaatgcttttggyatgggtattgataaatccaatgtacgytttgttattcattataatatgcctggagatttagaatcttattatcaagaagcsggtcgtgcaggtcgtgaygggttgaaaagtgaatgtattttgttatttagygaacgcgatatcaatttacacgagtattttataacagtctctcaagctgatgatgactataaagataaaatgggcgaaaagttaactaaaatgattcaatatacaaaaacaaaaaaatgtytagaagcaacaattgtccattattttgaaccgaatgaaaaattagaagaatgtgaacaatgtagtaattgtgttcaacaagataaatcatataatatgacacaagaagctaagatgattattagttgcatcgctcgtatgaaacaacaagagagttatagtgttatcattcaagtgytaagaggagagtcaacagattatattaagtayaaaggttatgaycaaatttcaacccatggtttaatgaaaggytacacaacatcagaattaagtcacttaatagatgaattaagattcaaagggttcttaaatgaaaatgaygaaatattaatgtgtgatacttcaattaaaaaattactcagtaatgaagtagaagtattcacaacaccatttaagcaaaaagcgactgaaaaagtatttataaatacggttgaaggggttgaccgagtattattcagtcarttggtagaagttcgtaaaaagttaagtgacaaattaacgatagcacctgtaagtatattttctgattacacgttggaggaatttgctaaacgtaagcctgcttcgaaacaagatatgattaatattgatggcgtaggtagttayaaattaaaacattattgtccagcatttttagaaacgattcaaaattataaagccaaagtatar

SEQ ID NO: 2020 - DNA, 519 bp, Staphylococcus aureus
atggatttaaagcaatacgtatcagaagttcaagattggccgaaaccaggtgttagtttcaaggatattactacaattatggataatggtgaagcatatggctatgcaacagataaaattgtagaatacgcaaaagacagagatgttgatatcgttgtaggacctgaagcgcgtggctttatcattggctgtcctgtagcttattcaatggggattggctttgcacctgttagaaaagaagggaaattacctcgtgaagtcattcgttatgagtatgacctagaatatggtacaaatgttttaacaatgcacaaagatgcaattaaaccaggtcaacgtgtgttaattacagatgatttattagctactggtggtacgattgaagcagcaataaaattagtygaaaaattaggyggtatcgtagtaggtattgcatttataattgaattgaaatatttaaatggtattgaaaaaattaaagattacgatgttatgagtttaatctcatacgacgaataa

SEQ ID NO: 2021 - DNA, 2274 bp, Staphylococcus aureus
atgattaaaccgaagtataagtggaaattaactaaaccagctgaatacataagtgatgaattaacatcaaaattaaagttaacgccaatcgtaaaaaaaatattagaaagtaaatcgattattgatgaacaagcaatwgaatccatcatttcagayacagatrtcaatcatgatgcaytgcaattgagcgatatgactaagrctattgaaagaattaaaagagcgatagcgaatgatgagaaaatcctagtttatggtgattacgatgcygacggtgttacckcaactacaattttagtgayaacattacaacttttaggtgcacaagtaggatggcatattcctaaccgctttaccgaaggatatggaccaaacgarctagcatttagaaatgctcatgatgaaggcataacattaatcataactgttgataatggcatacaaggtcataatgaaattaaaatggttcaagatttaggagttgatgtcattgtaactgatcatcatgaaattggtagtacattaccagaagcatatgcaatcgtacatccaatgcatccatcgtttaattatccgttccaacaattgtgtggtgcaggtgttgcrtacaaattagcacaagcattgattgaaaatgtacctgattattttaaagcawtagttgcgataggtaccattgcggatttagtatcmttaactgatgaaaatcgatcattagtgaaacaaggattaaaagtcttaaatgatcaatgtccgacctctgttaaagcattgctaaaagaagcgggatacaatgacaatattgatgaagaaacaattggttttattattggacctagacttaatgctgtaggtcgtttagatgacgcatcattagcttgcgaattgttgatgactgacgwcgaagaagaagctgcatttttagcagaacaagttgaacawtttaaccgygaaagaaaagatattgtagcaactatcacagaagaagcaatggcwatggcagaaaygaaagttaaaaakggagatttatttttacttttagcaaaagaaaattggcatgaaggtgtcttaggtattgttgcttcgaaaattgtcgaaacatttgctttgccaacattaattttaaatattgatagggagcaaaatcatgcaaaaggytccgccagatcaattgatcaagtgtcgatgtttgaaatactatcagcacaycaagrgttaatcgctaaatttggcggccatcatatggctgcaggtatgacgatggatattgaaaatatagaatcgttagctgaaggtttaaataaatggatgaaagaattatctaaaacaacttcgttagatcccgtaaagcmagtagaygtattattaacagaaaatgatataacgattaaaaatattcgtgatatgaatcgtttaagacccttcggaacagatttttctagacctatttttgaaatggatgatttatcagtttcttcagttaaggcgatmggtcaacaaaaaaatcatctraaattgacacttggtgaaagtaatatcgccgcgctattttggcaaaatggacacttagaacctgarttacaagatgaacagccaattaatatattaggatctgttcaaatcaacgaatggaatggtaatcaatcaccgcaawtaattattcaagatattgcgatgaaygaacagcaaatattagattatagaagtaagcgaaaaagtttaccttttacagaaaatgatgaaaatattgtcgtgcttattcatcctaaaagtgataaagtaaatgcgaatgaatattattatggtgaagaaattaaacaacaaactgataaagtagtattaagagatttaccwacgtcaatggaagayttgtctaattccytgcaacaactgcaattttctcaactttatatagttttgcaacataatcattcgatttacttcgatggtatacctaatatggatrtttttaaaaagtgttataaagcattaataactaaacaagaaacaaatatccagaaagagggtatgttattgtgtcaacatttaagtgtgaaaccagatacacttaaattcatgttgaaagttttcttagacttaaaatttgtaacacaagaagatggtttaattcgaatcaatcaacaacctgataaaagatcgattgattccagcaaagtatatcaattaagacaacaacgtatggatgttgaaaagcaattattatatcaagatttttcagaaataaaaaattggataaagtcacaattgtcgtga

SEQ ID NO: 2022 - DNA, 978 bp, Staphylococcus aureus
gtgattaagtttaaaaatgtaactaagcgttatgrcaaacatgttgctgtcgataacattagtttcratattaatgagggtgaattytttgtrctaattggaccttcaggttgtggaaaaactacgacattaaaaatgattaatcgactcattcacttaagtgaaggttatatttattttaaagataaaccaataagtgattatccagtatacgaaatgcgttgggatattggatacgtattgcagcagattgcattattcccacatatgacratcaaagaaaatattgcacaagtgccacaaatgaaaaagtggaaagaaaaagatatagataaaagagtagatgaattacttgawatggttggattagaacctgaaaaatataaaaacagaaaacctgatgaattgtcagggggrcaacgacaacgtgtaggagttatacgtgcgttagcagctgatccaccagttattttaatggatgaaccgtttagtgcattagacccaatcagccgagaaaaacttcaagatgatttaattgaattacaaactaaaattaagaagrcaatcatatttgttacacatgatattcaagaggcgatgaaacttggtgataagatttgtcttttgaatgaaggkcatattgaacaaattgacacaccagaaggatttaaaaataatcctcaaagtgaatttgttaaacaatttatgggtagtcatttagaagatgwtgcgccatgtgttgaagagaaygcrattatycgtgacttggatattatgaaaccaatcgatgaggttacatctatgagcgcttatccaattgtttatgacaatcaacmaattgaagtattgtatcaacwtttatcagagagcgagcgtgtcattgtcatgcaagaagatrgcgtaggtcaatatgttattgataggaaagatatcttcaaatatttgtcccagaaaaaggaggtagctcaacatgactaa

SEQ ID NO: 2023 - DNA, 120 bp, Staphylococcus aureus
gtggatggttatttattgcgttgttctaaaaatttggacatttatatrgaargaactatatataatgtgaaggttatggcaattcgcttcaatgaaggcgacgtgaaagtgaatactaaa

SEQ ID NO: 2024 - DNA, 759 bp, Staphylococcus aureus
atgtttaaggtagttatttgtgatgatgarcgaattattcgagaaggwttaaagcaaatcattccttggggagactatcatttcaatacaatatacactgctaaagatggtgttgaagcattatcactaattcaacaacatcagccagaattagtaattactgatattcgtatgccacgtaaaaatggcgtcgatttactcaatgatattgcgcwtctagattgtaatgtcatcatattatcgagttacgatgactttgaatatatgaaagccggyattcaacatcatgttcttgattatttattaaaaccagtrgaccatgcacaattagaagttattttaggaagacttgtccgtaccttattagagcaacaatcacagaacggccgtagcttagcaycttgtcatgatgccttccaaccaytattaaaagtagaatacgatgattattatgtaaaycarattgtkgatcaaattaagcaatcttatcaaacgaaagtgactgtttcagatttaattcaacatatcgatgttagtgaatcgtatgcgatgcgaacatttaaagatcatgttggtattacaattgtcgattatttaaatcgctatcgtattttacaatctctrcaattgttagatcgacattayaarcactatgaaattgcagacaaagtaggcttttcagagtataaaatgtttagctatcattttaaaaaatatttacaaatgtcgccaagtgattattgtaagcaagcwaaatag

SEQ ID NO: 2025 - DNA, 1515 bp, Staphylococcus aureus
atgactaactttttcgacatattgagtgarcgtaaggggcaactmttttcgacaatgatagaacatattcaaatatcatttatygcattattgattgcaactgctattgcggtaccattaggtattttattracgaagactaaaacgatatctgaaatcgtaatgaatattgcggcaattcttcaaaccataccatcgttggcattattaggtttaatgattcctttatttggtatcggtcgtgtgccagcaattatygcacttgtagtgtatgcrttgttaccaattttaaggaatacgtatactggaattaaagaagttgatccatcrctcattgaagcggctaaaggtataggtatgaarccatttagacgtttaactaaagtygaacttccratagcaatgcctgttataatggctggtgtaagaacggctatggtattaattataggtacagcracactagcagcattaattggtgcaggcggactaggagatttaattttattaggtatagaccgtaacaatgcrtcrttgatattattaggtgcaattccagcagccttattggcaattatatttgatttaattttaagatttatggctaaattatcttataaaaagttattgatgacgttaggtgttatagtgatgattattatactggcyatcgctattcctatgtttgcacaaaaaggtgataaaattacgttagctggaaagcttggctccgagccwtcgattattacaaatatgtataaaattttaatagaagaagagaccaaaaatactgtagaagtgaaagatggtatgggsaaaacagcatttttatttaatgctttaaaatctgaygatatagatgggtatttagartttactggaacagttttaggygaattaacaaaagaaccattgaagtcaaaagaagagaaaaaagtwtatgawcaagctaagcaaagtcttgaaaagaaatatcaaatgactatgttaaaaccaatgaartataacaatacgtatgctttagctgtaaaacgtgattttgctaaacaacataatatacgtacaattggtgatttaaataagrttaaagatcaacttaaaccaggatttacattggaatttaatgatcgtccagatggktacaaagctgttcaaaaggcttataatttaaatttagataacatacgtacaatggaacctaagttgagatatcaagcgatyaataaaggtaatattaatttaatwgatgcatattcaactgacgctgaattaaaacaatatgatatggttgtgttaaaagatgataagcacgtatttccaccatatcaaggagcaccattatttaaagaaagctttttaaagaaacatccagaaattaagaaaccgttaaacaaactagaaaacaaaatatctgatgaagatatgcaaatgatgaactataaagtaacagttaaaaatgaagacccatatacagttgcgaaagattatttaaaagcaaaagggttaatcaaataa

SEQ ID NO: 2026 - DNA, 2151 bp, Staphylococcus aureus
gtgctttatcaagtcgaycctttaaataaaggcgacaaaatagataaaaaagccttacaatcaacagcgcaaacattagaaaatcgtgttaacgttttaggtgtttcsgaacctaaaattcaagttgaagaacctaatagaattagagtwcaacttgctggtgtaacagaccagaatgaagcacgtaaaattttatcttctcaagctaatttaacaattcgcgatgcagaagataaagtaaaattaagcggttctgatattaaacagggatctgccaaacaagaatttaaacaggaaacaaaccagccwacagttactttyaaagtaaaagacaaaaacaaatttaaaaaagtaacggaagaaatctctaagaaacgtgataatgtcatggttgtttggttagatttcaaaaaaggtgacagctataaaaaagaagcacaaaagaaaaaccctaaatttatttctgcagcaagtgttgatcaaccaatcaattctgatagcgtagaaatctckggtggatttaaaggacaagaaggcgttaaaaaagcaaaacaaatcgccgaattgttaaatgcaggttctttaccagttgacttgaaagaaatttattcaaactcagtaggtgcccaatttggtcaagatgcattagataaaactgtgtttgcatcgtttattggtgtagcattaatttatttattcatgcttggattctaccgattacctggtttagtagcgattattgcattgacaacttatatctatctaacgttagtagcatttaatttcatttccggggttctaactttaccaggattagcggcgttggtattaggtgtaggtatggctgtagatgccaatattatcatgtatgagcgtattaaggatgaacttcgaataggtagaacgataaagcaagccttttctaaagcaaacaaaagttcrttcctaacaatttttgattctaacttaacaacagttatcgccgcagcagtattattcttcttcggtgaaagttcagttaaaggtttcgcgacaatgttattattaggtattctaatgatctttgttacagccgtgttcttatcaagattcttattatcattacttgtttcatcaaatatattcaaaaatcaatwttggttatttggtgttaaaaagaataaacgacatgatattaatgaaggtgtagatgttcatgaccttaaaacttcattcgagaaatggaattttgttaaattagctaagccattaattggagtaagtattttaattgtagttgtcggtttagttattctttatatcttcaagttaaacytaggaattgatttctcaagtggtacacgygtagatttccaatctaaacaagcaattactcaacaaaaggtwgagcaagttgtaaaagrtagtggacttaaagcggatcaaattcaratcaatggtaaagayaataaagtagcaactgttcaatttaaagacgatttaacgcgtgctcaagataataaattgagtgataatattaaatcgaaattcggtgacacacctcaaattaayactgtatcaccaattattggacaggaattagcaaaaaatgcaatgcttgcattaatctatgcatcgataggtatcatcatctatgtatcattacgatttgaatggcgmatgggtctttcatctgtattggcattattacatgatgtattcattatagtagcgattttcagtttatttagaattgaagtagatttaacatttatcgccgctgtattaacaattgtcggttattcaattaatgatacaatcgtaacgtttgaccgtgtacgtgaaaacttacaaaaggttaaagtgattackacaacagaacaaattgatgatatcgttaatagatcaattagacagacaatgacacgttcaattaatacagtattaacagttattgtagtagtagttgctatactattcttcggtgctcctacgatattcaactttactttagcattatttatcggattgatttctggtgtattctcttcaatcttcattgccgttccgctwtggggaataatgaaaaaacgtcagytgaaaaaatcgccgaaacacaaattagttgtatataaagaaaagaaatcgaacgatgaaaagattttagtttaa

SEQ ID NO: 2027 - DNA, 1059 bp, Staphylococcus aureus
atgaaagaacaacttaatcaactatcagcatatcagcctggtttatcwccaagggcattgaaagaaaagtatggcattgaaggagatttatataaacttgcatcaaatgaaaatttgtatggaccatcgcctaaagttaaagaagcgatatcagcacayttagatgagttatattattatcctgaaacaggatcaccgacattaaaagcggcgattagtaaacatttaaatgtagatcaatcacgcattttatttggtgcgggattagatgaagttatattaatgatttctagagcwgtattaacgccaggggayactattgttacaagtgaagcgacattcggtcaatattatcacaatgcgattgttgaatcagctaatgtgatacargtacctttaaaagatggtggcttcgayttagawggyattttaaaagaagttaatgawgayacgtcattggtatggttatgtaatccaaataatcctacaggtacrtattttaatcatgagagcttagattcgtttttatctcaagtaccwycacatgtwccrgtamtyatagatgaagcttattttgaatttgtgacagmagaggactacccggatacacttgctttgcaacaaaaatatgacaatgcwttcttattacgtacattttcaaaggcgtatggattagcgggtttacgtgtaggatatgtggtagcaagygaacatgcgattgaaaaatggaacatcattagaccaccatttaatgtgacacgtatatctgaatacgcagcagttgcagcacttgaagatcaacaatatttaaaagaggtaacacataaaaatagtgttgaacgygaaagattttatcaattacctcaaagtgagyatttcttrccaagtcaaacgaattttatatttgtaaaaacaaagcgggtaaatgaactttatgaagcacttttaaatgtagggtgtattacgcgaccatttccaactggtgttagaattacaattggttttaaagaacaaaatgrtaaaatgttagaagttttatcaaaytttaaatacgaatag

SEQ ID NO: 2028 - DNA, 261 bp, Staphylococcus aureus
atgcaattttcattactwatatatatagtcgtaatttttgcggttatgtatttcttgatgatcagaccacaacaaaaacgtgcgaaacagcatcgtgagttgattaataacattcaatctggtcaaagaattacaactattggtggtattaaaggtactgttaaagcagtagatgaaacaactgttgttattacagttaatggtcatggtactgaattaactttcgaaaaacctgctattaaacaagttgacccttcataa

SEQ ID NO: 2029 - DNA, 543 bp, Staphylococcus aureus
atgacccgtaaatcaatcgcgattgatatggatgaagtattggcagatacattaggagaaatcattgatgctgtcaattttagagcggatttaggtattaaaatggaagctttgaatggtcaaaaacttaaacatgttattcctgaacatgatggattaattacagaagtattragagaaccaggcttcttcagacaycttaaagtgatgccryatgcacaagaagttgtraaaaaattaactgaacattatgatgtatatattgctacagcagcaatggatgtaccaacatcattyagtgataaatatgaatggttactagagttctttccattyttagatccwcagcattttgttttttgtggtagaaaaaacatcgttaaagctgattatttaatagatgacaatcctagacagcttgaaatttttactggtacaccgattatgtttacagcagtgcataatattaatgatgatcgatttgaacgcgtaaatagctggaaagatgtagaacagtattttttagataatattgagaaataa

SEQ ID NO: 2030 - DNA, 1140 bp, Staphylococcus aureus
atgcctgcagtaacatacgaacacattaaaacttgtaaacaatcaggtgcgcgtttaggtatcgtgcacacaccacacggttcatttgaaacacctatgtttatgccagttggtactaaagcaaccgttaaaacaatgagtccagaagagttaagacaaattgaagcaaaaatcattttgggcaacacatatcatttgtggttacaacccggaaatgatattatcaaacacgctgggggattacataaattcatgaattgggatggtccgatyctwacagattcaggcggtttccaagtgtttagtttaagtaatttacgtaaaattacagaagaaggcgtggaatttagacatcatactaatgggtctaaattatttttgagtcctgagaaatcaatgcaaattcaaaatgatttaggwtctgatattatgatggcatttgatgaatgtccaccgatgcctgctgaatatgattatgtaaaaaaatctattgaacgtacaacrcgttgggcgaaaagatgtctagatgcacaccaaagacctgaagatcaagcattgttcggcattatacaaggtggcgaatatgaagatttaagagaacaaagtgcaaaggatttagtagaattagattttcctggttatgcaatcggmggtttgtcagttggtgaacctaaaccggttatgtataaaatggttgaacatacagagcagtttatgcctaaagataaaccaagatatttaatgggtgtaggatctccagatgcgttaatcgaatgtagtattcgcggcatggatatgtttgattgtgtcttaccgacacgtattgccagaaatggtacttgtatgacatcgcaaggtcgtttagttattaaaaatgcaaaatttgcagatgatttaagaccgttagatgagaattgtgactgttatacatgtcaaaactaytcaagagcgtatatacgtcatttaatcaaggcagaggaaacttttggtattcgtcttactactattcataatttacattttctgctaaaattaatggaagatataagacaagccattcgagaagatcgtcttttagatttcaaagaagaattcttcgagcaatatggattaaatgttgagaacccaaaaaacttttaa

SEQ ID NO: 2031 - DNA, 1026 bp, Staphylococcus aureus
gtgaatattgaagaatttgactatgacttaccagaatcattaattgctcaaacgcctttaaaagatcgtgatcatagtcgtttattagtcatggatagagaaactggtgaaatgaaacatttacatttyaaagatatcattgagtattttagacctggtgatacattagtgcttaacgatacgcgagtaatgccagctagactttttggtttaaaagaagaaactggtgcaaaagttgaaatgttaatgttaactcaaattgaaggtaatgattgggaagtcttactgaaaccagctaagcgtattaaagttggtaataaattgaattttggtaatggcaaaattatagctgartgcataaaagaaatggatcaaggtggacgyatcatgcgtttacattatgaaggtattttacaagaaagattagatgaattaggggaaatgccactgccaccatacatcaaagaacgtttagatgatccagatcgttatcaaacagtttacgctaaagaaagtggttcagcggcagcaccaacagcwggattacattttactgatgagttattaaytgaaattaaaaataaaggygttaatatcgcatttgttacattacatgttggrttaggtacgtttagaccggtgagcgtmgaygatgtgaatgaccackaaatgcatagtgaatattatcaaatgacacaagaaacagctgatttattaaatgatrctaastmcaamggacatygcattatwtcagwtggtacaacttcaacacgtacacttgaaacawttcgacgcgatcatgataaatttgttgaaacgagtggctggactaatatatttatttatccaggatttgattttaaagcwattgatggccagattactaattttcatttaccaaaatcaacattagttatgctagtatcagcgtttagtastcgtgaaaatgttctgaatgcttataaaacrgcagtaaatttagaatatagattctttagttttggcgatgcaatgttaattatataa

SEQ ID NO: 2032 - DNA, 399 bp, Staphylococcus aureus
atgaaaataatatatttttcatttactggaaatgtccgtcgtttyattaagagaacagaacttgaaaatacrcttgagattacagcagaaaattgtatggaaccagttmatgaaccgtttattatcgttactggcactattggatttggagaagtaccagaacccgttcaatcttttttagaagttaatcatcaatacatcagaggtgtggcagctagcggtaatcgaaattggggactaaatttcgcaaaagcgggtcgcacgatatcagaagagtataatgtccctttattaatgaagtttgagttacatggaaaaaacaaagacgttattgaatttaagaacaaggtgggtaattttaatgaaaaccatggaagagaaaaagtacaatcatattga

SEQ ID NO: 2033 - DNA, 1005 bp, Staphylococcus aureus
atgaatgagcgtatggttgatcaatcaatgcatagtgaagaaactgatttcgaattgtcgcttagacctacgagattacgacaatatattggtcaaaattcaataaaaagtaatttagaagtatttattaaagcggctaaacttcgtcatgaaccattagatcatgtattgctttttggcccccctggattaggtaagacaacattatctaatatcattgccaatgaaatggaagttaatatacgtacagtatcagggccttcattagaaagacctggtgatttggctgcaattttatcaggrcttcaacctggagatgtwttgtttattgatgaaatacacagactgagtagtgttgttgaagaagtgytataccctgcaatggaagatttctttttagatattatcattggtaaaggcgatgaggctagaagtatccgtatcgacttacctccattcactttggtaggtgcaacaacrcgagctggyagcttaacaggtccactaagggatcgatttggtgtgcacttaagattagaatattataaygaatcagatttaaaagaaatcattattagaacagctgaggttttaggcacaggtattgatgaagaaagtgcyattgaacttgctaaacgttctagagggactccaagagtagcmaatcgactattgaarcgggtaagagacttccagcaagtgaatgaagatgaacaaatatacattgaaacaacraagcacgcattaggtttacttcaagttgatcaacacggactagattacattgatcataaaatgatgaactgtattattaagcagtataatggyggacctgttggtttagatacgattgccgtaacaattggygaagaacgtattacaattgaggacgtttatgagccatttcttattcagaaaggctttttagaacgtacgccrcgtggcagaaaagcaacaccattagcttatgaacattttgcaaagtcgaatgaggagagagrataa

SEQ ID NO: 2034 - DNA, 2106 bp, Staphylococcus aureus
atgaaaaccatggaagagaaaaagtacaatcatattgaattaaataatgaggtcactaaacgaagagaagatggattctttagtttagaaaaagaccaagaagctttagtagcttatttagaagaagtaaaagayaaaacaatcttcttcgayactgaaatcgarcgtttacgttatttagtagacaacgatttttatttcaatgtgtttgatatttatagtgaagcggatctaattgaaatcactgattatgcaaaatcaatcycgtttaattttgcaagttatatgtcagctagtaartttttcaaagattacgctttgaaaacaaatgataaaagtcaatayttagaagactataatcaacacgttgcmattgttgctttatacctagcaaatggtaataaagcacaagctaaacaatttatttctgctatggttgaacaaagatatcaaccagcgacaccaacatttttaaacgcmggccgtgcrcgtcgtggtgagytagtgtcatgtttcttattagaagtggatgacagcttaaattcaattaactttattgattcaactgcaaaacaattaagtaaaattggkggcggcgtwgcaattaacttatctaaattgcgtgcacgtggtgaagcrattaaaggaattaaaggcgtagcgaaaggygttttacctattgctaagtcacttgaaggtggctttagctatgcagatcaactwggtcaacgccctggtgctggtgcwgtgtacttaaatatcttccattatgatgtagaagaatttttagatactaaaaaagtaaatgcggatgaagatttacgtttatctacaatatcaactggtttaattgttccatctaaattcttcgatttagctaaagaaggtaargacttttatatgtttgcacctcatacagttaaagaagaatayggtgtkacattagacgatatygatttagaaaaatattatgatgayatggttgcaaayccaaatgttgagaaaaagaaaaagaatgcdcgtgaaatgttgaatttaattgcgcaaacacaattacaatcaggytatccatatttaatgtttaaagataatgctaayagagtkcatccgaattcaaayattggacaaattaaratgagtaacttatgtackgaaattttccaaytacaagaaacttcaattattaaygactatggtattgaagacgaaattaaacgtgatatttcttgtaacttrggytcattaaayattgtwaatgtratggaaagcggaaaattcagagattcagttcactctggtatggacgcattaactgttgtragtgatgtagcraatattcaaaatgcwccaggagttagaaaagctaayagtgaattacattcagttggtcttggtgtsatgaatttacayggttacytagcaaaaaataaaattggttatgagtcagaagaagcaaaagattttgcaaatatcttctttatgatgatgaatttctactcaatcgaacgttcaatggaaatcgctaaagarcgtggtatcaaatatcaagactttgaaaagtctgattatgctaatggyaaatatttcgagttctatacaactcaagaatttgaacctcaattcgaaaaagtacgtgaattattygayggtatggctattcctacttctgaggattggaagaaactacaacaagatgttgaacaatatggtttatatcatgcatatagattagcwattgctccaacacaaagtatttcttatgttcaaaatgcwacaagttctgtaatgccaatmgtwgaycaaattgaacgtcgtacttatggtaatgcggaaacattttaccctatgccattcttatcrccwcaaacaatgtggtactrcaaatcwgcattcaatactgatcagatgaaattaatcgatttaatwgcgacaattcaaacgcatattgaccaaggtatctcaacgatmctttatgttaattctgaaatttctacacgtgagttagcaagattatatgtatatgcgcactataaaggattaaaatcactttactatactagaaataaattattaagtgtagaagaatgtacaagttgttctatctaa

SEQ ID NO: 2035 - DNA, 603 bp, Staphylococcus aureus
atgtacgcgtatgtcaaaggtaagttaacacatttatatcctacacacgtagttgttgaaactgctggtgttggttatgaaattcaaacaccaaattcttatcgttttcaaaagcatctagatcatgaagttttaattcrtacatctttaattgttcgtgaagatgcacaattattgtatggatttagtagtgaagaagagaaagatatgttcttgagtttaattaaagtyactggtattggtccgaaatcagctttagctattttagcgacaagtacrcctaatgaagtaaaacgtgccattgaaaatgaaaatgatacgtatttaactaaattcccaggaattggtaagaaaacggcaagacagattgtcttagatttaaaaggtaaagtgaaaatyactgaagaagatagcgattcattattacaagtagacgctacwtcgacggwgcaagatcaattcgtgcaagaagcaatgttagcgttagaagcattaggttattctaaacgagagcttgcaaaagttgagaaaacgttaaataaaaataaatatgactcagttgatgaagctgttaaggcaggtcttcaattagttgtatcttaa

SEQ ID NO: 2036 - DNA, 972 bp, Staphylococcus aureus
atgatagctgttaattggaacacacaagaagatatgacgaatatgttttggagacaaaatatatctcaaatgtgggttgaaacagaatttaaagtatcaaaagacattgcaagttggaagactttrtcwgaagctgaacaagacacatttaaaaaagcattagctggtttaacaggcttagatacacatcaagcagatgatggyatgcctttagtyatgctacatacgactgacttaagraaaaaagcmgtttattcatttatggcgatgatggagcaaatacacgcgaaaagytattcrcatattttcacaacrctattaccatctagtgaaacaaactayytattagatgaatgggttttagargarcchcatttaaaatataaatcwgataaaattgttgctaattaycacaaactttggggtaaagaagcttcsatataygaccaatatatggccagagttacgagtgtatttttagaaacattcttattcttctcwggtttctattatccrctatatytwgctggtcaaggraaaatgacgacatcaggygaaatcattcgtaaaattcttttagatgaatctattcatggtgtrtttacyggtttagatgcrcagcatttacgaaatgaactatctgaaagygagaarcaaaaagcwgaycaagaaatgtataaattgctaaatgacttgtatttaaatgaagagtcatacacaaaaatgttatacgatgatcttggaatcactgaagatgtgytaaactatgttaaatataatggaaayaaagcactttcaaayttaggytttgaaccttattttgaggaacgtgaatttaacccaatyattgagaatgccttagatacaacaactaaaaaccatgacttcttctcwgtaaaaggtgatggttatgtattagcattaaaygtagaagcattacaagatgatgactttgtatttgacaacaaataa

SEQ ID NO: 2037 - DNA, 456 bp, Staphylococcus aureus
atggacaataaagattataaaaagttttatttaattagagaagatgtcttgcctgaatccgtggttaaaacattgaagattaaagatgccttaaaaagtgatccgacattgtccatttatgatgccgttaaacagtttgatctatctagaagtgctttttataaatatagagaaacgatatttccagtagacgataaaatgcttgaccatcgagaatttacattaattttatatgtaactgatattgtkggtatgttggcacgtgtactagatgttatatcaaagttagaactatctgtattaacgattcatcaaagtattccaatggaagaaaaagcaacaataacattatcactgaatgctaaatctaaagaaacttcagtagaagatgttattggygctttgagaaatttagattatgtatcaaaagtagaattaattagtatgagtatgtaa

SEQ ID NO: 2038 - DNA, 102 bp, Staphylococcus aureus
atgtacaatgctatttatattggcagtagttggcggggccccaacacagaagcaggcggaaagtcagctaacaatattgtgcaagttggcggggccccaaca

SEQ ID NO: 2039 - DNA, 1293 bp, Staphylococcus aureus
atgtttgtcgatcaagtcaaaatatctcttaaagccggtgatggtggtaatggtattaccgcatayagaagagaaaaatatgtaccatttggtggaccagctggcggtgacggtggtaaaggtgcttcagtcgtatttgaagtggatgaaggtttaagaacgttattagattttagrtatcaacgtcattttaaagcaagcaaaggtgaaaatggccaaagtagtaatatgcatggtaaaaatgcggaagatttagtattaaaagttccacctggyacaattattaaaaatgttgaaacagaygaagtgttagcagatcttgttgaagatggtcaaagagctgtagtagcgaagggcggtcgaggtggccgaggtaattcacgttttgcaacacctagaaaccctgcacctgacttcagtgaaaaaggtgaaccaggtgaggaattagatgtatctttagaattgaaattattagctgatgtaggattagtaggtttccctagtgtgggtaaatcgactttattatctatcgtttcaaaagctaagcctaaaatwggggcatatcattttacaacgattaaaccaaatctaggwgttgtttcaacrcctgatcaacgwagttttgttatggcagatttaccaggtttaattgaaggtgcatctgatggcgttggattaggacatcaatttttaagacatgtagagagaacaaaagttattgttcacatgattgatatgagyggttctgaaggtagagarcctattgaagattataaagtcattaatcaagaattagcygcgtacgagcaacgtttagaagatagacctcaaatcgtagtagctaacaagatggatttacctgaatcacaagataatttaawcttgtttaaagaagaaattggcgaagatgtgccagttattccagtttcaacaataacgcgkgataatattgatcaattattatatgcaatagcagatrawttagaagwrtataaagmtgttgacwtcacagttgaagaagaggagtcwgttggcattaaccgagtattatataaacatacaccgtcrcaagataaatttacaatttcaagagatgatgatggtgcttatgtggtaagtggtaatgctattgaaagaatgtttaaaatgactgactttaacagygatccagcagtacgtcgatttgctcgtcaaatgcgttcgatgggtattgatgatgcrcttagagaacgtggttgtaaaaatggtgatatcgttagaattcttggcggagaatttgaattcgttgaatag

SEQ ID NO: 2040 - DNA, 153 bp, Staphylococcus aureus
gtgttctattttactttaagtaaacaaaatacacattccgaaaaattaaatttcagtttaattgcaaatatcaataaaattgacactaaattatttgaaaggctattgaaattatggtcaaaaaacgctactattaatgagaaatattatcaa

SEQ ID NO: 2041 - DNA, 285 bp, Staphylococcus aureus
atgktraaawtaracttacaattcttcgcatctaaaaaaggggtaagttctacaaaaaacggacgtgactctgaatcaaaacgcttaggtgctaaacgtgctgacggtcaattcgtaacaggtggttcaattttatatcgccaacgtggtactaaaatttaccctggtgaaaatgtaggtcgtggtggcgatgatacattattcgctaaaatcgacggcgtygttaaattcgaacgtaaaggtcgcgacaaaaaacaagtttctgtatatgcagtagctgaataa

SEQ ID NO: 2042 - DNA, 339 bp, Staphylococcus aureus
atgattactgttgatattacagttaatgatgaaggcaaagtaacagacgttattatggatggccatgctgaccatggtgaatatggtcatgatatcgtttgtgctggagcttcagctgtattgtttggtagtgttaatgcgattataggattgacatctgagagaccagatatcaattatgacgacaatggtggtcattttcatataagaagcgttgatacaaayaacgatgaagcgcaactaattcttcaaacaatgcttgtgtctttacamactattgaagaagaatataatgagaatattagattaaattataagtgwggtgcatcacgatggtga

SEQ ID NO: 2043 - DNA, 1398 bp, Staphylococcus aureus
atggctaaatataaagatattgctagtgacataagagataaaataatcacaggggattggttttatggaatgaaratacctycacakaggcagttggcgatacartacaacgtaaatagagtracgattattaaaagtattgagttattagargctgaaggatttatctatactaaagtrggkagtggaacatatgttaatgactatttgaatgaagcacatattacaaataagtggtctgaaatgatgttatggtcctctcaacaaagaagtcagtatacggtgcaattaattaataaaattgagacagatgattcgtatatacatataagtaaaggtgaattgggtatatcgttaatgccacatattcaattgaaaaaagccatgtctaatacagccagtcatattgaagacttatcttttggttataataatggctatggttatatcaagttaagagatattatcgttgaacgaatgtcaaagcaaggtataaatgtaggtagagaaaatgtaatgatcacttcaggcgctttacatgccattcaacttttatctattgggtttttaggtcaagatgccataataatttcgaatacaccatcatatattcactctacaaatgtttttgagcaattgaattttagacatattgatgttccttataatcaaattaatgaaattrataccatcattgatagatttattaattttaaaaataaagcgatttatatagaacctaggtttaataacccgacaggtcgttctttaacgaatgagcaaaagaaaaatataattacttatagcgaaagacataatattcctatcattgaagatgatatctttagagatattttctttagcgatccaactcctkctatcaaaacttatgataaattgggaaaagttatacatataagcagtttttcaaaaacgattgcaccagcaataagaataggttggattgttgcttctgaaaaaataatagagcaattggcagatgtaagaatgcaaattgactatggatccagtattttgtcacaaatggttgtatatgagatgttgaaaaataagtcttatgataaacacttagtaaagttaaggtatgttttaaaagataaacgagactttatgttaaacatcctcaataatttatttaaggatatagcacattgggaggttccaagtggaggttattttgtatggttagtctttaaaatagatatagatattaaatatttattttacgaattgttaagtaaagaaaaaatattaatcaatccgggttacatttatggcagtaaagaaaagagtataaggctatcttttgcctttgaatcaaatgaaaatattaagcatgcgctctataaaatttatacatatgtgaaaaaggtttaa

SEQ ID NO: 2044 - DNA, 1557 bp, Staphylococcus aureus
atgacggcatacaaaccttatagacatcaattragacgatcgttatttgcgtctactatttttccrgtatttttagtsattattattggactagtaagcttctatgccatctatatttggattgagcatcgtacgattcatcaacatgttgatgaaagtcagtcatctttacatcayactgaaaagcarattcagacrtttattacacagcataataattcgtttcaagagctcgatttaacaaatcatcatgatgtkaccgctacaaaacgtgrattattaaaattaatacaccaacagcccgcaacactttattatgaattatctggaccaaatcagtttataaccaataattatgaacatttaaacactaaaaatatgtatttattttcaacgcatcagcttaaattcaawaatagtacatatatgcttaaaatttatatrgctaacaccccacgtttaagtgaaattaagaaagatarccgacaattcgcacttatcgttgatcaatatgacaatattttatacgccaacgatgaccgttttactataggtgaaaagtatagaccrcaacaattcggatttatgaatgaatctgtaaaattaaaccatgctgaccatcgtctcattatttataaagatatacatgaaaacattgaagatggtatcacgttgttaattgttatggccgtagttcttgttttactagtaatatttggtttcattagygcagataatatggctaaacgacaaacaaaagatatcgaaacgattattcaaaaaatttactatgccaaaaatcgtcatctaggtacatatacrcctttaaaaaacaacagtgaactagaagaaattaataattatatttacgatttatttgaatcaaatgagcaactgatccattctatcgagcatacagaacgtcgcttgcgtgatattcagttaaaggaaatagaacgccaattccarcctcatttcctattcaatacgatgcaaacaatacaatatttaattacgttatctccgaaattagcacaaactgtggtccaacaattatcgcaaatgttacgttactcattacgtacaaactcacatacagtggaattaaacgaagagttgaactacattgaacagtatgttgcratacaaaacatccgttttgatgacatgattaagctccatatygaaagttctgaagaagcgcgtcaccagacaattggtaaaatgatgcttcarccactcatagaaaatgctattaaacatggtagagatactgagtcattggayattactatacgcctgacattggcacgtcagaatttacatgttttagtttgcgacaatggtatygggatgtcgtcatctcgcctgcaatatgtacgccaatctcttaataatgatgtatttgatactaagcatttgggattaaatcatttacacaataaagcaatgattcaatatggttcacatgcacgactycatattttttcaaagcgtaatcaaggtacgttaatttgttataaaataccactttcaagggggaatgtagatgtttaa

SEQ ID NO: 2045 - DNA, 957 bp, Staphylococcus aureus
atgcgcaacaataataaaaaaataatgcttttaattgcagtmacgttmttaattagtatgctgtacttatttgtwggtattgattttgawatatttgaatatcaattttcaagtcgtttaagaaagttcatattaattattttagtaggtgctgccattgcaacwtcmgtkgtkattttycaagcgattacaaataaycgtytattgacaccatcaataatgggrttagatgcagtttatttatttatcaaagtattgccmgtctttttatttggaattcaatcggtatgggttactaatgtatatttgaactttatattaacacttataacgatggtgttattcgcactaatcctattccaaggyatctttaaaatyggacatttttcaatttaytttatcttacttatwggtgtccttttaggaacattttttagaagyatwacaggttttattcaaytgattatggatcctgagtcatttttrgcratacaaagtagtatgtttgcwaattttaatgcwtctaattcgaatttagttaywttytcagcagtrytattagtaatmwtattagtcattacaattttwctattgccwtatttagatgtattgcttttaggtcgtgctgaagcaattaatctkgggatatcgtatgaaaaattaacgcgrattctacttgtaatagtytcwgtyttagtytctgtgtcaactgcattagtaggaccaattacatttttaggyttattractgtaaatctagcgcatgaactaatgaagacgtatgaacataartatatwttaatygcgacaatttgcttgagttggattagtttatttagtgcgcaatgggtagttgaaartgtgtttgargctacgacagaaatgagtatacttattgatttrattggtggaagttatttcatttatctattagttagaaggagaaatgcgcaatga

SEQ ID NO: 2046 - DNA, 309 bp, Staphylococcus aureus
atgtttgctattattgaaacaggtggaaaacaaatcaaagtagaagaaggtcaagaaatcttcgttgaaaaattagacgtaaacgaaggagatacttttacatttgataaagtattatttgtaggtggagattcagttaaagttggagcgccaacagttgaaggtgcaacagttactgctactgttaataarcaaggtcgcggtaaaaaaatcactgtattcacatacaaacgtcgtaaaaattcaaaacgtaaaaaaggccatcgtcaaccatacactaaattaacaatcgataaaatcaacgcgtaa

SEQ ID NO: 2047 - DNA, 762 bp, Staphylococcus aureus
atgattcaagttgrraatttaactaaaactataaataatcaaatgatattggamgatattagcatagawatygaaaaaggtaarttgacttctttaattggacctaatggwgcrggkaagagtackttactttcagcgatwtgtmgsttaattcgktttgakramggkgaagtraaaatagatggacrgctyatgtctgattataaaaayaatgayttgtcgaaaaaratatckatwttaaarcaaacraaccatacwgaaatgaayattackgtagarcarttrgtwaaytkyggacgattyccwtattctaaaggwcgtttracgaaagargaycatgawattgtyaatgatgckytagatttgttgcaaytacaagatatyagaaakcgtaatatwaartcattrtctggtggacaacgtcarcgtgcmtayatwgcratgacmatwgcacaagatactgaatatattytkytagatgaaccrttaaataatttagatatgaagcatgctgttcaaattatgcaaacgttaaaaatgttagcgcataaaatgaataaagcgattgtcattgtrtyacatgatattaactttgcgtcctgttattcagatcagattgtagcawtgaaaaacggacaactagttaartcagatttgaaagataatgtcattcaaagtartgttttaagtgatttatatgacatgratattcaaattgaacatataagaaatcaaaggatttgtttatattttaaggattga

SEQ ID NO: 2048 - DNA, 531 bp, Staphylococcus aureus
atgcgtacactgtattattttttgataggtattttactattttatatagatactgcaattgggcttcttatwccaatgcayataggtaagtttgaacttgtatttgtaccacaccttacatttatgtatattttaatgatggtagtgtatcgtrgctttggcgtatcattattgctcagcatatttttaggygtaatgactgatgtatactttggtagtatttatggagtgtacttatttggctatatattgtttttagcacttatagatcgattctttaaaattttttacaaagatcattcgatgttattcattattatattagcyagcaccttattattagaagtctatgtggcattaatatacggtatgttaggattcattcaatttgatattattcattttgtagtctttagattattgccaacattaattatraattttgtactgttgatyatgctttatccgttgattataaagttccttaaaaaaacaaacaatgacattgacatgaaacgycgtcaatggtaa

SEQ ID NO: 2049 - DNA, 1030 bp, Staphylococcus aureus
atgaagaaaacagtcttatatttagtaktagcagtaatgtttttattagcggcatgcggtaacaattctgataaagaacaatcaaaatcagaractaaaggttctaaagatacagtraaaattgaaaayaactataaaatgcgtggcgagaaaaaagatggtagygaygctaaaaaagttaaagaaactgttgaagtaccaaaraaycctraaaatgcagttgtrttagaytatggcgcattagatgtaatgaaagaaatgggcttatcagayaaagtaaaagcattacctaaaggkgaaggcggyaagtcattaccgaatttcttagartcatttaaagatgayaartatacaaaygttggtaayttraaagaagtkaatttygataaaattgcwgcracraaaccsgaagtaatctttatctctggmcgtacagcwaatcaaaagaatttagatgaattyaaaaaagctgcaccwaaagcraaaattgtttaygttggtgcagatgaaaagaayttaattrgttcaatgaaacaaaacactgaaaatatyggwaaaatytacgayaaagaagwyaaagctaaagaattaaataaagatttagataayaaaattgcttcaatgaaagataaaackaaraasttcaayaaawcwgttatgtatttaytagttaaygaaggtgaattatcaacatttggacctaaaggtcgtttyggtggattagtttacgatacattaggwttcaaygcrgttgataaaaamgtaagyaatagyaaycayggacaaaatgtytctaacgaatayrttaataaagaaaatccagatgttattttagcratggatagaggwcargckrtaagtggtaaatcaactgcgaaacaagcattaaataatcckgtattaaaaaatgttaaagcaattaaagaagacaaagtwtataatttagaycctaaattatggtactttgcagctggatcaactacaactacaattaaacaaattgakgaacttgawaaagttgtaaaataat

SEQ ID NO: 2050 - DNA, 843 bp, Staphylococcus aureus
gtgcttaagttttttaaaaataacaaattaattgttgttttatgtgcaattatcgtttttattgcattaattgggctgtccatacgttcacaatctcaatcacctcctgaacaatatataggtgattctgtgtcttttggacaacgagttgtgagttatccagttaattttgttgctggtacgattggggacttttttaaaaaaggagattctaaagaatctaaaaataagattagccagttagaatctaagaaccaacaattagaagcggaaaatgaaaaattaaaaaaagagcttgatttaaaagatatttcaaaatttgatcctatttctactacggttttrgcaagaaatccggatcagtggatgaatacaattgtaattgataagggatctaaatcaggtataacttcaaatatggctgtgatgacatcacaaggttttgttggaagagttactaaagttaataaattttcttcacaagttgatttaatctcaactaatacacgtgcgggtaaattatctgtaaatatacaacacggttctaaaaatatatttggyttaattgatcgttatgatgaaaagaactcagaacttgtaattagtgayattaataatagagataatatctcaaaaggtgataaagtcgttacaagtggattagctgatcaactaccaagtaatttatatataggagaagtgactaaggttcaaaatgatcaatacggcttagctaaagaagttagggttaagactggtgcrgacttaacagatttgagycatgtttatgttgcaaaaagagatcctaaaacaattcctgatgatgaaagcagggataaataa

SEQ ID NO: 2051 - DNA, 879 bp, Staphylococcus aureus
atgaaaaaaattgttattatcgctgttttagcgattttatttgtagtaataagtgcttgtggtaataaagaaaaagaggcacaacatcaatttactaagcaatttaaagatgttgagcaaaaacaaaaagaattacaacatgtcatggataatatacatttgaaagaaattgatcatctaagtaaaactgatacaactgataaaaatagtaaagaatttaaggcactacaagaagatgttaaaaaccatctcatacctaaatttgaagcatattataagtcagcaaaaaatttgcctgatgatacaatgaaagttaagaaattaaaaaaagaatatatgacgcttgcaaatgagaagaaggatgcgatatatcaattaaaaaaattcataggtttatgtaatcaatctatcaagtataacgaagacattttagattatacgaaacaatttgaaaaaaatagatacaaagttgaatcagaaattaaattagctgataataaaagtgaagcaactaatcttacgacaaaattagaacataataataaagcgttaagagatactgcgaaraagaacctagatgatagtaaagaaaatgaagtaaaaggcgcgattaaaaatcacattatgccaatgattgaaaarcaaattaccgatattaaccaaactaatattagtgataagcatgttaataatgcaaggaaaaacgcaatagaaatgtattacagtctgcagaactattataatacacgtattgaaacaataaaggttagtgagaagttatcaaaagtcgatgtagataagttgccgaaaaagggtatagatataactcacggcgataaagcctttgaaaaaaagcttgaaaaattagaagaaaaataa

SEQ ID NO: 2052 - DNA, 474 bp, Staphylococcus aureus
atgagattgatatttagtatgattaaaaacattatagcagtaatagcaattgtgataattgtttatatcgccttgaaatacgcaccttttttaaaagaacaagattggaatcctgtaaatcacgataatgatcaaatgaatcaagttacgcaacccactaatgatgcccaacatgtttatgtaagtggtgagaaatattcattaaaagaaaatgatttaataaaraatgtaccattaagccaaattaaaaatgtatttaaaatgatagataaacwagagtttatggctgtgtctggaatgaatcgcatggcttataatgatcaatatattataggtcaaagaggagacgaatttattctttataaatttggagatgagtcaatgcgtgtttacaatactgaatttgaaatgcaacaagacttaaatgaattagggcaaaatttacaactaaaaycygaaaatgcttatcaatag

SEQ ID NO: 2053 - DNA, 321 bp, Staphylococcus aureus
gtggctataaagctaagttcaattgaccaatttgaacaggttattgaggaaaataaatatgtttttgtattaaaacatagtgaaacttgtccaatatcggcaaatgcgtacgatcaatttaataaatttttatatgaacgcgatatggacggttattatttgattgtccaacaagaacgcgatttgtcagattatattgctaaaaaaacgaacgttaaacatgaatcacctcaagcattttattttgtaaatggtgaaatggtttggaatcgagaccacggtgatatyaatgtgtcgtcattagcacaagcagaagaataa

SEQ ID NO: 2054 - DNA, 285 bp, Staphylococcus aureus
gtgactctatttattattatcggggttctcgtgccaatggtttataccatgcagttaaatattaaaaatgaacctgtaacaaagcgcaatctwttaataacattagctttatctacgttaggtattttagtaacsgcrttagcaggtgtratygttacgaaasaagcttttcctttattaagtgtagcaathggctcaattwttactggaatcgtttggggcctwttactaagtggtagctacgcgctgatacgatttttatctaacgcatttgggcgtaartaa

SEQ ID NO: 2055 - DNA, 1125 bp, Staphylococcus aureus
atgaaagtattagtagccatggatgagtttcatggaattatttcragttatcaagctaatagatatgttgaagaggcagttgcaagccaaattgaaactgcagatgtagttcaagtaccattgtttaatggaagacatgaattattagattctgtatttttatggcaatctgggcaaaagtatcgtataccagtacatgatgcagatatgaatgaagttgaaggtgtttacggacaaactgatacagggatgaccgttatcgaggggaatttatttttaaaaggtaaaaaaccaattgttgaacgaacaagttatggtttaggagaaatgattaaacatgcattagataaygacgcaaaacatgttgtaatttcaytaggtgggattgatagttttgatgctggtgcaggtatgttacaagcattaggtgctcaattctatgatgacgaagggcgtgtcgtagatatgagacaaggtgctggtgtaattaaatatattcgtcgtatggatatgtcgaacttacaccctaaaatggaaacagcaagaattcaagtaatgtcggatttttcaagtcgattatatggtaagcaaagtgaaatcatgcaaacttatgatgcgcatcagttgmaycataatcaagcagcagaaatcgataatttaatttggtattttagtgagttatttaaaagtgaattgaaaattgcaattggtccagttgaacgtggtggtgctggtggtggaattgcagcagtcttgaatggactgtatcaagctgaaatattaaccagtcatgcattagtagaccaactaacacatttagaaaatttagttgaacaagcggatttaattatttttggagaaggrttaaatgaaaatgatcagttgctagaaacgacaacattgcgtattgcagaactttgtcataaacatcaaaaggttgccattgcaatttgtgcaactgctgaaaagtttgatttatttgaatcacaaggggttacagcaatgtttaatacatttatcgatatgccrgaaasttatacygactttaaaatgggrttacaaattaggcattatackgttcagtctttaaaactgttgaaaacacattttaatgttgaggtttag

SEQ ID NO: 2056 - DNA, 687 bp, Staphylococcus aureus
ttgaaaattaaagaaatggtaacttcagaaatgccaagagaacgtttgttaagccatggtgcaaaaagtctttcgaatacagaattattagctatattaattaacaccggaagaaaaggattctcgagyatwgacattagtaatgaactgcttaaatctgcwtcgaatctgaatgaattgaaaaaatcttcaattaacgatttgatamaagttaaagggattggattacaaaaagcaattacwttaaaagcrgcatttgagttaggggaaaggatggggagaagagctgaaaataatcgtataaaaataacgcaaccaagtgatgttgctgattatatgattccaacaatgaaagatttaacacaagaacattttgtcattttattgttaaattcaaaaaatgtagtgattaaagaaacctgtgtttttaaaggtacattaaatagttcgattgtacatccacgtgaawtttttagtattgcggtgagagaaaatgccaatgcaatcatcgcagttcataatcatccatccggtgatgtawyrmccwyaswakaagatatcataacaacaatgaggttgaaggagtgtggtttgattttaggratagatttattggatcatattataatcggtgataatagatttaccagtcttgtagaagcgggttactttgatgaaaatgattga

SEQ ID NO: 2057 - DNA, 1056 bp, Staphylococcus aureus
atggttacattattactagttgcagtaacaatgattgtcagtttgacgataacaccaattgttattgcaatatcgaaaagattaaatttagttgataaaccaaattttagaaaagtacacactaaacctatttcagttatgggtggtacrgtgattctcttttcatttttaataggtatttggattggtcatcctattgaaacagaaatcaaaccacttattattggtgcgattattatgtacgtacttgggcttgtagatgatatctacgatttgaaaccgtatataaaattggctggtcaaattgcygctgccttagtagttgctttttatggtgtgactattgattttatttcgttgccaatgggtacaackattcattttggatttcttagtattccaattactgtgatttggattgttgctattacaaatgcaattaacttaattgatggactcgatggtttggcrtcgggtgtttctgcaatcggactcattacaataggrttcattgcaattttacaagctaatattttcataacgatgatttgttgtgttttattaggctctttaattgggtttttattttacaatttccatcctgccaaaatatttttaggtgatagtggsgctttaatgattggatttatcatcggattcctttctttactcggattcaaaaatattacaattattgcattgttcttcccaattgttatcttagcagttccattcattgatacyttgttcgcaatgattcgacgtgtgaaaaaagggcagcatataatgcaagctgataaatcgcatttgcatcataarytattagctttaggctacacacatagacaaacrgkattattaatctattcaatytctattttatttagtctttcgagcattatyttgtatgtatcgccaccattaggtgttgtattaatgtttgtattaatcatatttagtattgaattaattgttgaatttacaggattaatagataacaactaccgaccaatattaaatttaattagtcgkaartcrtcwcayaaagargawtag

SEQ ID NO: 2058 - DNA, 708 bp, Staphylococcus aureus
ttggtagtattgttatcttatagytgcagttgtatttttagttttctatatcaatttatatctatwgaagaaacgtcatttgattatttacatagaagatcgaaatgtgattattgtaattcrtcactcaaatggtatgaattaatgccgattattagttttttattattaaaagggmgatgtcgaaactgtcrwaagcgtatttcsctaacacatttcttwggggaaacctttgctttaatacctatcgtctttattaagtatgatttcacatacgtaaatgctacgctwtttataactacatatgtttttctgcttatttttactatgaccgatatcacttctttaatgttagattgtcgcttaattataatttattgtatygtttctctctcgttaagtatkayttatccagtagcttttatcattattagtatgaccacgcatatattctactttttatttcggkcatatattggttatggtgacgttttactaatatctgcactttctttgtttttccctctccaattcactatttatgtcattwtatttacatttgtcattgctggtttagttgctttaattaccatgatatttaagccgattaaactattaccccttgttccatttatatttatttccttttttatcaattcacttttttataatgatatccatcaatttttaggaggcgtatatttttga

SEQ ID NO: 2059 - DNA, 102 bp, Staphylococcus aureus
ttgttaattattagatacaaccaacattttaatggttttatttttaactttgtagttcttggaatgtttgaacgattaaatagacatttaaaatacttagaa

SEQ ID NO: 2060 - DNA, 867 bp, Staphylococcus aureus
atgaaaattgctgtgatgaccgattctacaagttatctgtcgcaggacttaatcgataaatataatattcaaatagcgccattaagtgtgacttttgatgatggraagaactttacagaaagtaatgaaatagcaattgaagaattttataataaaatggcatcgtctcaaacgattccracaacaagccaaccagcaattggcgaatggattactaaatatgaaatgytaagagatcarggttacacagatatcattgtcatttgcttatcmagtggrattagtggaagttatcaatctagttatcaagcaggggaaatggttgaaggtgttaatgtacatgcatttgatagtaagcttgcagcaatgattgaaggatgttatgtattacgtgctattgaaatggttgaagaaggatacgarccacagcaaattattgatgatttaactaatatgcgtgarcacacaggtgcatatttaattgttgatgacttaaagaatttacaaaaaagtggtcgaattactggtgctcaagcatgggttggaacattattgaaaatgaagccagttcttaagtttgaagatggcaagattataccagaagaaaaagttcgtactaaaaagcgtgccattcaaacattagaaaagaaagtattagatattgtaaaagactttgaagaagtaactttatttgtcataaatggagaycatttygaagatggwcaagcgttatacaaaaagttacaagawgattgtccttcagsttatcaagtagcatactctgagtttggtccagttgttgcagcacatttaggttcwggtggattaggtttaggctatgttggcagaaaaataagattaacataa

SEQ ID NO: 2061 - DNA, 1272 bp, Staphylococcus aureus
atgaattacctagagagcttgtattggatacacgaaagaactaaatttggcatcaaaccaggtgttaaacgtatggaatggatgctagcacaatttaataatcctcaaaataacattaagggtattcatgtaggtggcacraatggtaaaggctctacagttgcttaccttagaacagctttagttgaaaatggttatgaagtaggtacatttacgtcgccgtttattgaaacatttaatgaacgaattrgtctaaatggtgtgccaatatcaaatgacgctattgtagaattagtatcacgtattaaaccagtwagtgaaatgatggaacgtgaaacagatttaggtgttgcaactgaattcgaaataatcacagcgatgatgtttttatattttggtgaaatacatcctgttgattttgtcattgttgaggctggattgggtataaagaacgattcgacaaatgtctttacaccgrttttatcaatcttaactagtatcggtctagaccatacagatattttaggtggtacttatctagatattgctagggataaaggcgcgattataaagcctaacgttccagtkatatatgctgttaaaaatgaagatgcattaaartatgttcgtgaacgcgcaattgaacaacatgcaaagccaattgaattagatagagaaattgttgttgtatcgcaaaatgatgaatttacttaccgttataaagattatgaattagaaacaatcattttaagyatgttaggtgaacatcagaaacaaaatgctgcattagccataacagctcttattgaattaaatgaacaaggattaattgaattagatttcaataagatgatagacggtattgaatcagttcgttggactggacgtattgagcaggtgcatgacaaacctttaatcattttggatggcgcacataattcagagagtatagatgctctaattgatacaattaaacagtaccatgataaagaaaaagtagatattttgttctcagcaataaacggaaaaccgattaacgagatggtcaaacatttaagtttaattgcgcatacrttttatgcaactgaatttgattttccgaaagcgttacgcaaagaagaaattgtaggtagyattgaaaatgaygawatacaattagtagatgactacgtwgaatttataaaaaattatcaaggtgatacattagtaattaccggtagtctgtayttcataagtgaagttaaatcaaaattagactttgaagcattataa

SEQ ID NO: 2062 - DNA, 384 bp, Staphylococcus aureus
atgaaaattgctgtgatgaccgattctacaagttatctgtcgcaggacttaatcgataaatataatattcaaatagcgccattaagtgtgacttttgaagatggcaagattataccagaagaaaaagttcgtactaaaaagcgtgccattcaaacattagaaaagaaagtattagatattgtaaaagactttgaagaagtaactttatttgtcataaatggagatcatttcgaagatggtcaagcgttatacaaaaagttacaagatgattgtccttcagcttatcaagtagcatactctgagtttggtccagttgttgcagcacatttaggttctggtggattaggtttaggctatgttggcagaaaaataagattaacataa

SEQ ID NO: 2063 - DNA, 1083 bp, Staphylococcus aureus
atggataatgtaacaagatataaaataacagaragttcgcaaagttcatcacaagcatattatcatctctcatttgaattrtcggaacarcagtcttatgcctcagaacatattgttcgagccattagaawgagacaaacgattttgttatatgcmgtaacaggtgcaggtaagacagaaatgatgtttcaaggcattcaatatgcaagamkacagggagataatatagctattgtgtcaccrcgtgtagatgttgttgtagaaattagtaaacgtattaaagacgcatttcttaatgaagatatagacatactacaccagcaatcaagwcaacaatttgaagggcattttgttgtatgcacagtrcatcaactttaccgattcaaacagcactttgatactatttttattgatgaagtcgaygcctttcctttatcaatggataaaartytacaacaagcattgaagtcatcttctaaagttgaacatgcaacratttatatgacagcaacaccaccgaaacaacttctgtcagagattccccwcgaaaatataattaaattgccagctcgctttcataaaaaatcacttccagttcctaaatatcgytatttcaaacttaayaataakaagattcagaaaatgttataycgaattttacaagatcaaattaataatcaacgttatacactggtgttttttaacaatatagaaacaatgattaaaacattttcgrtttataagcagaaaattactaaattaacataygtccatagcgaggatgtttttcgctttgaaaaagttgaacaattaaggaatggacawtwcgatgtcatttttactacgacaatattagaacgtggatttacaatggcaaatttrgatgttgttgttatcgatgcacatcaatatactcaagaggctttaatacaaattgctggacgtgttggacgaaaattagaatgtcctrctggaaaagtattgttttttcatgaaggdgtaagtatgaatatgattcaagctaaaaaagagattcaaargatgaacaaattagcattaaaaagaggttggattgatgaataa

SEQ ID NO: 2064 - DNA, 2631 bp, Staphylococcus aureus
atggaaatgaaaccaaaatatgatcctcgtgaagttgaagcgggacgttatgaagaatgggtraagaatggttattttaaaccgtcagaagataaatcaaaagaaacatatacaattgttatcccgccaccaaatgtaactggtaaattacatttaggacatgcatgggatacractttacaagatatcattacacgtatgaaacgtatgcaaggatacgatacgttatacttaccaggtatggatcatgctggtattgcgacacaggcaaaggtagaagctaaattaaatgaacaaggaataactagatatgatcttggtcgtgaaaagtttttagaacargcatgggattggaaagaagagtatgcgtcatttattcgtgcgcaatgggctaaattaggtctaggtttagattatagtagagaacgttttactttagatgaaggtttaagtaaagcagttaaaaaagtttttgttgatttatacaataaaggaattatttatcgtggcgaacgtattataaattgggatcctaaagcacgtacagctttatctgatattgaagtaatacatgaagatgttcaaggtgcgttttatcattttaaatatccttacgctgatgktgaaggttttattgaaattgcaacwacaagaccagaaacgatgttaggtgatacagcgattgttgttaaccctaatgacgaacgatacaaagatgtaatcggtaaaactgttatattaccaatcgtaggacgcgaactgcctattttagcagatgartatgttgatatagacttcggttctggtgctatgaaagtgacaccagcacatgaccctaatgattttgaaattggtcaaagacatcaattagaaaatattatcgttatggatgaaaatggtaaaatgaacracaaagckggtaaataygaaggtatggaccgttttgattgtcgtaaacagctagttraagatttaaaagaacaagatttagttatcaagattgaagatcatkttcattctgtaggtcattcagaacgatctggcgctgttgttgaaccatatttatcaacrcaatggtttgtgcgcatggaagacttagcgaaacgttcattagataaccaaaaaacagatgatcgtattgatttttatccgcaacgtttcgaacatacatttaaccaatggatggaaaatattagagattggacgatttcaagacaattatggtggggtcatcaaattccggcttggtatcataaagaaacaggmgaaatatatgttggagaagaagcgccaactgatattgaaaattggcaacaagatgaagatgtattagatacgtggttctcaagtgctttatggcctttctctacgttaggttggcctgatttagaaagygaagactttaaacgatactacccaacaaatgccttagttacaggttacgayattatctttttctgggtmgcacgyatgatattccaaggcttagaatttacagatcgtcgtccatttaatgatgtrttattacacggyttagttcgygctgaagacgggcgtaagatgagtaaatcattaggtaatggtgtggatccaatggatgttattgacgaatacggtgctgatagcttgcgttacttcttagcaacrggttcatctccaggacatgatttaagatactcaactgaaaaagttgagtcagtgtggaactttatcaataaaatytggaatggrgcacgtttcagtttaatgaatatcggtgaagactttaaagttgaagatatcgatttaagtggtaacttatcattagcagataaatggattctaacacgtttaaatgaaacgattgcaacagttactgatytaagtgacaaatatgaattcggcgaagttggacgwgcattatataatttcatttgggatgatttctgtgattggtacattgaaatgagtaaaattccaatgaatrgtaatgatgaagaacaaaaacaagttacacgttcagtattgagttatactttagacaatattatgagaatgctacatccattcatgccatttgtaacagagaaaatatggcaaagtttaccacatgaaggtgamacaattgttaaagcttcatggccagaagtgcgtgaatcattgatttttgaagaaagtaaacaaacaatgcaacaacttgttgaaatcattaaatctgtaagacaatcacgtgtagaagtaaatacgccattgtctaaagaaatacctattttaattcaagctaaagataaagaaattgaaacaactttatcacaaaacaaagattatttaatcaaattctgtaatcctagtacsttaaatatwagcactgacgtggaaattcctgagaaagcaatgacatcagttgtaattgcaggtaaagtggtattaccattagaagggctaattgatatggataaggaaatcagccgtttggaaaaagaattagctaaacttcaaagcgaattagatagagtagataaaaagctctctaatgaaaactttgtaagtaaagcacctgaaaaggttataaatgaagaaaaacgtaaaaaacaagattatcaagaaaaatatgatggtgtgaaggcaagaattgaacaattaaaagcatag

SEQ ID NO: 2065 - DNA, 675 bp, Staphylococcus aureus
atgaataattgtttgagttgtggtgctaagttatatgaaaatataaccatttataatttgttcaagaaacctaatagattatgtgacagatgcaaagagaattgggacaatattaaacttgatattaaagcaaggcgatgttcaaggtgcttaaaayacttaratcaaratgaagcgtattgtttagactgcaagtttctatcggcacactttaatttaatggaacaattatattgtcaatttcaatatgacggtttaatgaaagagatgatacatcagtataaattttygaaagactattatttatgtgaattattggcacatttgattgaaataccacaaacatcttatgactatattgtgccaattccttcttcgccggcacatgatttatctagaacatttaacccggtagaagcagtactaaaagcwaaagggattcgctttgataagattttaaagatgtcaaatagaccaaaacagtctcatttaactaagaaagagcgtctggcagatgaaaatccatttattattgatacggaattagatttaaatggyaaggaaatattactcgttgacgatatttatacaactggattaacaattcatcgtgcagggtgtaaattatatgctaaaaatatcagaaaattcaaagtgtttgcgtttgcacgatag

SEQ ID NO: 2066 - DNA, 1074 bp, Staphylococcus aureus
atgrcaatgatatatagaaataatttcattgtgttcgttttatcattttttattagtattmtaytgtattcatcgcacgtattactyccatttatgtttggtcctattatcgcatcaatcatttgtgtraaagttttcaaacttgatattaaatggccattcttacttagtgaattaggdattgtactattaggkgtgcaaatcggatcaacgtttacgaaaaatgtcgttatggatattaaaracaattggctttcgattattgtwgtatctatttcgatattattaattgcmwtagtaatggcatttrtttttaaaaaaattgcacgtattaatacagaaacagctattttaagtgttataccaggagcactaacacaaatgytggtcatggctgaacaagacaaacgtgctaatttgttagttgttagcttaacgcaaacatcacgaattatatttgttgttgttttagtaccgttcatttcatatttttttcatgatggtaacatgcatgcgaatggwaagttaacaaaagtcttgcctttatcacaagtattaaacatagggcaaatagttattttagcgatagctatctttatagtttatctaattatgtctaaaataaagtttccaacatttcaattattagcaccactcattgtattaattgtttggaatttttctacaggtytaacatttacactagatcattggttgttgaacatggcacaactaatatatatgattagaattggagttcaaattgcgcatttattgtcagatttaaaaggtagactarcaatcgcaattacaattcaaaatattatgttgataattggtgcgctaatcatggtttatrtcatacatttctttgataataatcctattaatgaattgtttcttggtgcagcaccaggaggggttaatcagatagttttagttgcattagctactggtgccgatgttgctatgattacgagtwatcatattttccgaatctttttcatcctatttattatygcaccaggaattaattactttttaaaatatcgttcgaataagcgtgaagattag

SEQ ID NO: 2067 - DNA, 1515 bp, Staphylococcus aureus
atgactttatatttagatggtgaaacactaacaattgagkatattaaatcatttttacaacaacaatcaaagattgaaattattgatgatgcgttagaacgtgtcaaaaaaagtagagcrgtagttgaacgtattattgaaaatgaggaaacggtttacggtatyactacaggttttgggttatttagtgatgtacgtatagacccgacgcaatataaygaattacaartgaatctgatacgctcacatgcctgtggactaggtgagccattttcaaaagaagtagcattagtcatgatgattttacgattgaatacattattaaaaggtcattcaggtgccactttagaattagtgagacaattacaattttttataaatgaacgtattataccgataatcccacarcaaggctctctcggtgcatcaggagatttagcgccattatcacatttagcattagcattaattggtgaagggaaagtattgtacagaggkgaagaaaaggatagtgacgatgtattaagagaattaaatagacaacctttgaaccttcaggctaaagarggtttagcattgattaatggtacgcaagctatgacagctcaaggtgtcattagttatatagaakcagaagatttaggttaccaatctgaatggattgctgcattaacgcatcagtctcttaatggcattatagatgcatatmgacatgatgtgcackcwgttcgtaattttcaagaacagattaatgtggcagcgcgtatgcgtgattggttagaaggatcaacattaacgacgcgacaakcagaaatacgtgtacaagatgcatatacrttgcgttgtataccacaaatccatggcgcgagttttcaagtattcaattatgttaaacagcaattagaatttgaaatgaatgcggctaatgataatccacttatatttgaggaagcaaatgmaacgtttgttatttcrggtggtaacttccatggacaacctattgcttttgcattagatcatcttaaattaggtgtaagtgaattagcaaacgtatcggaacgtcgtytagagcgactagtaaatcctcaattaaatggtgatttaccagcatttcttagtccagagccaggattgcaaagtggcgcgatgattatgcaatatgctgctgcaagtctcgtttctgaaaataaaactttagcgcatccagcgagtgttgattctatcacttcatctgcgaaccaagaagatcacgtatctatgggaactacagctgctagacatggttatcaaattattgaaaatgcaagacgtgtgytggcaatcgaatgtgttattgcattacaagcagcagagttraaaggtgtygaaggwttatcaccaaaaacacgtcgyaartatgakgagtttcgaagtatcgtgccatccattacayatgaycgtcaatttcataaagatattgaagcggttgcacagtatttaaagcaatcaatttatcaaacgactgcatgtcactaa

SEQ ID NO: 2068 - DNA, 474 bp, Staphylococcus aureus
atgtctaaaatcaggtcttttacaatattaagtctacttatttacttagctatgatgtgctatacagtagtgacytatycaaaattaccaaccaaagtrcctattcaytataatttagcaggggatgctgataaytttgctgataaatgggtrctgcttttgatwaatagcgcatttatagtgatttggcttatatttttcattgcaggtagatactatgaacgatttgccaaatggtcacattataatcatacaccacgtgaaattcgagcgattaaattatttttaagtacgttaaatttagagattatgagctatatgtctatcttcacagtattagaaatttggcaaatacaacaccatcatcaattmaatttactatggtttaatatgatatttatcattatcattggtttracgcttgtcatattttgtttacttcctacaattcayaaaatgagagattctcaataa

SEQ ID NO: 2069 - DNA, 969 bp, Staphylococcus aureus
atgaaatcaaaaatttatatcttgctattatttctcatttttttatcakcatgcrctaatacgcgtcactctgaatcmgataaaaatgtattaacagtttattctccgtatcaatcaaacttgattcgtccaattttaaatgawtttgaaaaacaagagcatgtcaaaattgaaatyaaacayggatctactcaagtactgctttcaaacttgcataaygaagatytttcggagcgtggtgaygtctttatgggtggtgtgttrtcagaaacaattgatcatccagaagattttgttccctatcaagatacatctgtaacacagcaattagaggattatcgctcgaacaataaatatgttactagytttctattaatgccaacagttatagtagtkaattcagatttacaaggagatattaagattcraggttatcaagatttattacaacctatacttaaaggtaaaattgcgtactcaaatccaaatacaacaacgacaggctatcaacatatgcgygctatttatagcatgcatcatcgagtaagtgatgtgcatcaattccaaraccaygcgatgcaactgtcaaagacgtctaaagtcattgaagatgttgcaaaaggtaaatattaygcaggtctaagctacgaacaagatgcacgcacatggaaaaacaaaggttatcctgtatcaatcgtttatccaattgaaggaacaatgttaaatgttgatggtattgctttagttaaaaatgcacaccctcatcctaagcgtaaaaagttagtgcaatatttaacaagccgctcagtacaacaacgattagttgcagagttcgatgccaagtcaattcgaaargatgttagtgaacaaagcgatcagtctatcgaaaatcttaagaacatacctttaataccgaaatctaaattaccggayattccrcatcataaatttttggagatgattcaatga

SEQ ID NO: 2070 - DNA, 573 bp, Staphylococcus aureus
atgattagatttgaaattcatggagataacctcactatcacagatgctattcgcaactatattgaggaaaaaattggtaagttggaacgttattttaatgacgtaccaaatgcagtggcgcatgttaaagttaaaacttattcaaattcagctactaaaattgaagtaacaattccattgaaaaatgttacgttaagagctgaagagcgaaacgatgatttatacgcaggtattgatttaattaataataaacttgaaagacaagttcgaaaatataaaacacgtattaatcgtaagagccgtgatcgaggagatcaagaagtgtttgttgccgaattacaagaaatgcaagaaacacaagttgataatgacgcttacgatgataacgagatagaaattattcgttcaaaagaattcagcttaaaaccaatggattcagaagaagcggtattacaaatgaatctattaggtcatgacttctttgtattcayagacagagaaactgatggaacaagtatcgtttaccgmcgtaaagacggtaaatatggcttgattcaaactagtgaacaataa

SEQ ID NO: 2071 - DNA, 102 bp, Staphylococcus aureus
atgggcggcgacttgatagtgaaagtccatatatgctttgtagtcaaaactgctagcggatattgttatcttaacaaacgtgaagctcaagcagcaatttag

SEQ ID NO: 2072 - DNA, 2532 bp, Staphylococcus aureus
atgggatttttatcaaaaattcttgatggcaataataaagaaattaaacagttaggtaaacttgctgataaagtaatcgctttagaagaaaaaacggcaattttaactgatgaagaaattcgtaataaaacgaaacaattccaaacagaattagctgacattgataatgtcaaaaagcaaaatgattatttagataaaattttaccagaagcatatgcacttgttagrgaaggctctaaacgtgtattcaatatgacaccatataaagttcaaattatgggtggtattgcaattcataaaggtgatatcgctgagatgagaacaggtgaaggtaaaacrttaacagcgacaatgccaacatacttaaatgcattagctggtagaggtgttcacgttattacagtcaatgaatacttatcaagtgttcaaagtgaagaaatggctgagttatataacttcttaggtttgactgtcggattaaacttaaacagtaagacgacwgargaaaaacgtgaagcataygcrcaagacattacttacagtactaayaatgagytaggttttgaytayttamgagataacatggtgaattattctgaagatagrgtaatgcgtccattacatttygcaatcattgatgargtkgactcaattttaatygaygaggcacgtacgccattaattatttctggtgaagctgaaaagtcaacgtcactttatacacaagcaaatgtttttgcraaaatgttaaaacaggacgawgattataaataygatgaaaaaacraaakchgtacatttaacagaacaaggtgcggataaagctgaacgtatgttcaaagttgaaaacttatatgatgtacaaaatgttgatgttattagtcatatcaacacagctttacgtgcgcacgttacattacaacgtgaygtagactatatggttgttgatggcgaagtaytaattgtcgatcaatttacaggacgtacaatgccaggmcgtcgtttctcrgaaggtttacaccaagctattgaagcgaaggaaggcgttcaaattcaaaatgaatctaaaactatggcgtctattacattccaaaactatttcagaatgtacaataaacttgcrggtatgacaggtacagctaaaactgaagaagaagaatttagaaatatttataacatgacagtaactcaaattccgacaaataaacctgtgcaacgtaacgataagtctgatttaatttacattagccaaaaaggtaaatttgatgcagtagtagaagatgttgtwgaaaaacacaaggcagggcaaccagtgctattaggtactgttgcagttgagacttcwgaatatatttcaaatttacttaaaaaacgyggtatccgtcatgatgtgttaaatgcgaaaaatcatgaacgtgaagctgaaattgttgcaggcgctggacaaaaaggtgccgttactattgccactaacatggctggtcgkggtacagatatyaaattaggtgaaggcgtagaggaattaggsggtttagcrgtaataggtacagarcgacatgaatctcgtcgtattgatgaccagttacgtggtcgttctggacgtcaaggtgataaaggggatagtcgcttctatttatcattacaagatgaattaatgattcgttttggttctgaacgtttacagaaaatgatgagccgactaggtttagatgactctacaccaattgaatcaaaaatggtatcaagagctgtwgaatcagcacaaaaacgtgtagaaggtaataacttcgacgcgcgtaaacgtatcttagartacgatgaagtattacgtaaacaacgtgaaattatctataacgaaagaaatagtattattgatgaagaagacagctctcaagttgtagatgcaatgctacgttcaacgttacaacgtagtatcaattactatatwaatacagcagatgacgagcctgaatatcaaccattcatcgactacattaatgacatyttcttacaagaaggtgacattacagaggatgatatcaaaggtaaagatgctgaagatattttcgaagtcgtttgggctaagattgaagcagcatatcaaagtcaaaaagatatcttagaagaacaaatgaatgagtttgagcgtatgattttacttcgttctattgatagccattggactgatcatatcgacacaatggatcaattacgtcaaggtattcacttacgttcttatgcacarcaaaatccattacgwgactatcaaaatgaaggtcatgaattatttgatatcatgatgcaaaatatygaagaagatacttgtaaattcattttaaaatctgtagtacaagttgaagataatattgaacgtgaaaaaacaacwgagtttggtgaagcgaagcacgtttcagctgaagatggtaaagaaaaagtgaaaccgaaaccaatcgttaaaggcgatcaagttggtcgtaacgatgattgtccatgtggtagtggtaaaaaattcaaaaattgccatggaaaataa

SEQ ID NO: 2073 - DNA, 1287 bp, Staphylococcus aureus
atgagatatacgaartcagaagaagcaatgaaggttgctgaaactttaatgcctggtggtgtaaatagtccagtacgcgcatttaaatcagtagatacaccagcaatttttatggatcacggtaaaggytcaaaaatttatgatatcgatggtaacgagtatatcgactatgtactaagttggggrccrcttattttaggacatagagaccctcaagttattagtcatttacatgaagcaattgataaaggtacaagttttggtgcatcaacattacttgaaaataaattggcgcagctcgttattgaccgagtaccttcaatagaaaaagtgcgtatggtgtcatctggtacagaagctacattggatactttaagattagcacgtggttatactggmagaaataaaattgtraaatttgaaggttgctatcatggtcatagtgattcgttattaatcaaagctggktcwggggtggcaacattaggattgccggattctcctggtgtgcctgaaggtattgctaaaaatacaattacagttccatacaatgatttagatgcacttaaaatcgctttcgaaaaatttggaracgatattgctggtgtaatcgtagaacctgttgctggtaatatgggtgtcgtmccrccgattgaaggttttttacagggattaagaratattacgactgaatacggcgcattgctaattttcgatgaagtaatgactggtttcagagtcggttatcattgtgcacaaggtyactttggtgtgacaccagatttaacttgcttaggaaaagttatcggtggaggactaccwgtaggtgcwtttggtggtaaaaaagaaatcatggatcatatagcaccattaggaaatatttatcaagckggtacgttatcaggaaatcctcttgcaatgacaagtggttatgaaacgttaagycaattaacgccagagacatatgagtattttaatatgttaggcgatatacttgaagacggtttaaarcgtgtatttgctaaacacaatgtaccaataactgtaaatagagcaggttcaatgattggttatttcttaaatgaaggacctgtaactaattttgaammagcgaataaaagtgatttgaaattatttgcagaaatgtatcgwgaaatggcaaaagaaggtgtgtttttaccaccatctcaatttgaaggtacattcytatctacggcacacacgaaagaagatattgaaaaaacgattcaagcatttgatacggctttaagtcgtattgtaaaataa

SEQ ID NO: 2074 - DNA, 975 bp, Staphylococcus aureus
atgaaatttgatagacatagaagattgagatcatcagcgacaatgagagatatggttagagagaatcatgtaagaaaagaagatttaatatatccaatttttgtagttgaaaaagacgatgtgaaaaaagaaattaagtcattgccaggtgtataccaaatcagtttgaatttacttgaaagtgaattaaargaagcttatgacttaggcatacgtgccattatgtttttcggtgttccaaactcaaaagatgatataggtactggtgcatacattcacgatggtgttattcaacaggcaacacgtattgctaaaaaaatgtatgatgacttattaattgttgcagacacttgtttatgtgaatatactgatcatggtcattgtggygtgattgatgaccatacacatgacgttgacaatgataaatcattgccactrcttgttaaaacagcaatttctcaagtrgaagctggtgctgatattattgcrccaagtaatatgatggatggttttgttgctgaaattcgtcgtggattagatgaagccggctattacaatattcctataatgagttatggtgtcaagtatgcatcaagtttcttyggaccttttagagatgcagcagattcagcgccatcatttggggatagaaaaacgtatcagatggaccctgctaaccgtttggaagcacttcgtgaattagaaagtgatcttaaagaagggtgcgacatgatgattgttaaacctgctctaagttatttagayatagttcgagaygttaaaaatcatacgaatgttccagttgttgcatataatgtgagtggagaatatagtatgactaaagcagcggcacaaaatggttggatwgatgaagaacgtgtcgttatggaacaaatggtttcaatgaaacgtgcaggtgctgatatgattattacgtattttgcaaaggacatttgtcgctatttagataawtaa

SEQ ID NO: 2075 - DNA, 669 bp, Staphylococcus aureus
atgaagccagttgtagttatgacacaaacaaatgacatgcaaagtgatttagtatcaattattcacaaaccytttattgatataaagccactaaattttgatattcatttgttaaatcaacgctatgactggcttattttttcatctaaaaatgctgtgaaattcttttataaatatctaaaaggaattaatgttgataacattgctgtgataggaagtaagacagcgcaatattgtgaatcacttggcattcgagttgattttatgccaaacgacttttctcaagaaggatttttaraatcatttaatcaaactaaccaaaaaatacttttgccttcgagtgaattggcgagaccattgttatyagcagcgttatctraagataatgaagttgttaaaatagatttatatacttcagtgcctaacaaacaaaatatacaagatgttaaagaaatgatagaacatcaacaaatcgatgcattaacattttcaagttcgtcggcagtacgttattattttaatgaaggatttgtaccaaaattcaagtcgtattttgctattggagaacaaacagcacggaccattaaawcatatcaacarccagtaacaattgcagaaattcaaacactcgaatcactaattgaaaagattttagaaagtaggggctaa

SEQ ID NO: 2076 - DNA, 876 bp, Staphylococcus aureus
atggatgctacttgggatttattacaagaagaatttgatgragaaatgaaagaagacttagagcaagaggtcattaattttaaggctaaagtggatgaatacgaattgcaattattattagatggrcctcacgatgccaataacgcaattctagagttacatcctggtgcaggtggcacggartctcaagattgggctaatatgctatttagaatgtatcaacgttattgtgagaagaaaggytttaaagttraaactgttgattatytacctggrgatgaagcrgggattaaaagtgtaacattgctcatcaaagggcataatgcttatggttatttaaaagctgaaaaaggtgtacaccgactagtacgaatttctccatttgattcatcaggacgtcgtcatacatcatttgcatcatgygacgtkattccagattttaataatgatgaaatagagattgaaatcaatccggatgatattacagttgatacattcagagcttctggtgcaggtggtcagcatattaacaaaactgaatcggcaatacgaattacccaycacccctcaggtatagttgttaataaccaaaatgaacgttctcaaattaaaaaccgtgaagcagctatgaaaatgttaaagtctaaattatatcaattaaaattggaagagcaggcacgtgaaatggctgaaattcgtggcgaacaaaaagaaatcggmtggggaagccaaattagatcatatgttttccatccatactcaatggtgaaagatcatcgtacgaacgaagaaacaggtaaggttgatgcagtgatggatggagacattggaccatttatcgaatcatatttaagacagacaatgtcgcacgattaa

SEQ ID NO: 2077 - DNA, 927 bp, Staphylococcus aureus
atgcgtaaattagtcgttggctccagaagaagtaaattagctttaacacaaagccagcaatttattrataaattaaaagctgtcgagccaaatctagaaattgaaattaaagaaattgtcacgaaaggcgatcgtatagtagataarcaattgtctaaagtcggaggcaaaggcttatttgttaaagaaatacaacatgaactttttgaaaaaaatatcgatatggcaatacactcgctkaaagaygtaccaagtgtaattccggaaggtttaacattaggttgtatccctgatagagaattaccttttgatgcgtatatttctaaaacacatacaccactatcccaattgccagaaggyagtattattggtactagttcattacgtcgtggtgcacaaatattatctaagtatcctaatttagagattaaatggattagaggtaatatagatacacgattagaaaagttacaaactgaagattatgatgcgattattttagctgcagctggtttaagaagaatgggctggtcagatgatattgtaacatcttatcttgatagagatacattgttacctgcaatyggacaaggtgctttagggatagaatgtcgtagtgacgatgaagaactattaacattattaagcaaagtacataatgatgaggttgcaaaatgtgtgactgctgaacgaacgtttttagcagaaatggatggtagttgtcaggtgccaatygcaggatatgctacaatctcagatcaaaamgaaatcgaatttacaggtttaattatgaccccagatggtaaagaacgatttgaatatacaatgaacggaacagatccggttgagttaggmaaaamagtgagtaacaaattaaaagagcaaggtgcttatgaaattataaaacgcttaaatgaacaacattaa

SEQ ID NO: 2078 - DNA, 132 bp, Staphylococcus aureus
gtggaattgtcattattactaaacatcattgaacaggctgataataagattattaataaaatraaagaaataaggcaaccgccgcatccttttaacatgccrcgtctttcagaatttttaacagatyggttt

SEQ ID NO: 2079 - DNA, 840 bp, Staphylococcus aureus
atgaaaaaawctcttacagtgacggtttcgtcagtgttagcttttttagctttaaataatgcagcacatgcacaacaacatggcacacaagtaaaaacacctgttcaacataaytatgtatcaaatgttcaagcacaaacgcaatcaccgacaacttatacagtagttgctggcgattcattatataagattgcwttagagcatcacttaacgttgaatcaattatattcatacaatcctggtgtaacacctttaatttttcctggtgacgtgatttcacttgtgcctcaaaataaagtgaaacaaactaaarcggttaaawcaccagtaagaaaagcaagccaagctaaaaaggtagtamaacaacctgtacaacaagcrtctaaaaaagtagtagttaagcaagcacctaagcaarcagtarctaagacagttaatgtagcatayaaacctgctcaagtacaaaaatcagtaccaactgtacctgttgcacataactacaataaatcagttgctaacagaggraacttatatgcttatggaaactgcacatattatgcyttcgatcgtcgtgcacaattaggtagaagtataggaagtttatggggcaatgcaaataactggaattacgcagcaaaagttgcaggatttaaagtagataaaacaccagaagttggcgctattttccaaacagctgctgghccatatggacatgttggtgttgttgaatctgtaaaycctaatggaacaattactgtttckgaaatgaactatgctggatttaatgttaaatcttcaagaacaattttaaatccaggaaaatataattacatccactaa

SEQ ID NO: 2080 - DNA, 816 bp, Staphylococcus aureus
atgcaagaaaacctgtttattcgattcaatgaaattatattattaatatacttaatcagtatcatttgctatttttatgattttgtmcaaaaaagtcataagattagaagtttaggcatatatttattggggattgtttgggttttacaaacaatctctttatctatttttattatacaaactaracatattccattagggtctatttcagatgtattctatactttaagttggytgattatttcaatctctttaattcttaaccttatcaaagtwttgaatttctctgtgtttttcttgaatttaatagggytaacacttttagggatgaatacatttcaaccgacacattatactaataaggttcagaaaattgctgttgtagacgagttactgttagtccatatyggtctagctgtgttaagttatgtcttctttgccttagcttttgtcaatgcattactgtatatcatgcaataccgtaatttgaaggaaaarcgttttgatcaaaaatactttagaatwggtagcgttgctacacttgaatcaattgtgttttaytcaacgttaagtgggtggataattctcatatttagtattattttaggtacacartggggtgtaatttcagttggtgaacgtatattcattgacccgaaggtaatactctcttcaattattacagtattatatggaagttatatwttrcttagaatcaacaaatggttgaattcaagrtatttaatatactataacattattttattttgcttaaatatgattaatttattttttgcaacacattttgtgaattra

SEQ ID NO: 2081 - DNA, 651 bp, Staphylococcus aureus
atgggtgtacatcaatattttaaaagattatcagatatggaaagacttataagattacctggaaaatttaaatattttgaacacaatgttgcagcrcactcctttaaagtaactaaaattgcwcaatatctagcaacagttgaagaatatcatggwcgaaagattaattggaaaagcttatatgaaaaagcattaaatcatgatttcgcygaagtgtttactggtgatataaaaacacctgttaaatatgcgagtagtgaattaaaaaaattattttcgcaagttgaagaagaaatggtagagacctttattgaagaagaaattccattacaatatagagatgtttataagcaacgactgcaagaaggtaaagatgattcattagaaggccaaatactttcagttgctgataaaattgatttgctttatgaaacatttggagaaatacaaaaacgtaatcccgaagaattatttttcgaaatttatgaaatgagtctagaaacaattattcaatttgaccatttagcatctgtacaagattttattaataatatcattccagaaatgttgactgaaaactttatacctagaacagaattaagagaaacaacyatgaacattttaaataaargaaaagaggaaaatgaatga

SEQ ID NO: 2082 - DNA, 1347 bp, Staphylococcus aureus
atgcattttattgcaattagtataaatcatcgcacagctgatgttgcactaagagagcaagttrcttttagagatgatgccttacgaattgcccatgaagatttatatgaaactaaatctattttagaaaatgtcatattatcaacatgtaatcgaactgaagtatatgctgttgttgatcaaattcacacaggtcgttactatattcaacgatttctagctcgtgcatttggatttgaagtagatgatattaaagcaatgtcagaagtaaaagtgggggacgaagcagtagaacatttattgcgtgtcacttctggtttagattcaatcgtacttggagaaactcaaattttaggtcaaataagagatgcatttttcttagcgcaaagcacaggtacgacaggaacaatttttaatcatctatttaaacaggcaattacttttgcaaaaagagcacataatgaaacagatatagctgataatgctgtaagtgtgtcttatgctgcggtcgagttggcgaaaaaagtatttggcaaattgaaaagtaagcaagctatcattattggtgcaggggaaatgagtgaattatcactattaaatcttcttggttctggaattactgatattacagtagtaaatagaacaattgaaaatgctatgaaattagcagcaaagcatcaagtgaaatatgatgaactatcatcattaccaaatttacttgaaagtgcagatattgtgattagttcracgagtgcacaatcttatatcattacaaatgaaatgatagaaagaattgcagaaaatagaaagcaagattcactagtattgattgatattgcagttcctcgagatattgaacctggtattagtgccatcacaaacatctttaattatgatgttgatgacttaaaaggtttagttgatgcaaacttacgtgagcgacaattagcggctgcaacaatttcggaacaaattcctrcagaaatacatgcacacaatgagtggrttagtatgttgggtgttgttccagtgattagagctttacgtgaaaaagctatggcaattcaagcrgaaacgatggacagtattgatcgtaaattgccagggttaagcgaaagagarcgtaaaattatatctaaacatacaaaaagtatcatcaatcaaatgttgaaagatcctattaaacaggccaaagaattaagtagtgataagaaaagtaatgaaaaattwgagctatttcaaaatatatttgatatcgaagctraatgtcctcatgagcaagcgaagcaacaaaaagaaagcaaggtcaaggaaatttcagcgcgacgtatctttagttttgaataa

SEQ ID NO: 2083 - DNA, 237 bp, Staphylococcus aureus
atgatatggtattttagcgcagcattctttccatgtgtcttggtagtattrtttagtgtaataacaagaagtaartgggtcggtactattctgacattaattttaattggtgcctcaatctataaagagtatttccataacgagtggattatttttattgatgtrgtgtcattattagctggttatttaattatagatcaactcgaatttcataaacatcaagatgaagatcgctaa

SEQ ID NO: 2084 - DNA, 591 bp, Staphylococcus aureus
atgaaagttaatcctaataatatwgaattaatcattagtgcagtaaargaagawcaatatccagaaacagaattgtctgaagttgcactgagcggtcgatctaatgtaggtaagtctacatttatcaatagtatgattggcagaaaaaatatggcacgtacatcacagcaacccggcaaaacgcaaacgttaaatttttataatatagatgaacaacttatttttgtggatgttccaggrtatggatatgctaaagtaagtaaaacacaacgtgaaaaatttgggaaaatgattgaggaatatataactaagagagagaatttrcaattagttattcaattagttgatttaagacatgatccaacacaagatgatatcttaatgtacaattatttgaaacattttgatattcctactttagttatatgcactaaagaagacaaaattccaaaaggyaargttcaaaagcatattaaaaatattaagacacaattagatatggacccagacgatacaattgtaagttattcatcaattcaaaataataaacaacaacaaatatggaatttaattgaaccgtatatttcatag

SEQ ID NO: 2085 - DNA, 1992 bp, Staphylococcus aureus
gtgacwatggttgaacattatccttttaaaatacattctgattttgagcctcaaggtgaccaaccgcaagcaattrargaaatcgtggawggtattaaagcggggaaaagacatcaaactttattaggtgcwactggcacagggaaaacatttacgatgagtaatgttattaaagaagttgggaaaccaacgttaattatcgcrcataacaaaacattagcaggrcaattatatagtgagtttaaagaattttttcctgaaaacagggtggaatactttgtaagttactatgattattatcaaccwgaggcatacgtaccgtctactgacacttttattgaaaaagatgcctcaatcaatgatgaaattgatcaactacgacattctgctacaagtgcattatttgaacgcgatgatgtaattattattgctagtgtaagttgtatatatggtttaggtaatcctgaagaatataaagatttagtagtaagtgttcgagttggtatggaaatggatagaagtgaattacttagaaaacttgtagatgtgcaatatacacgaaatgacatcgatttccaacgaggaacgtttcgagtgcgtggtgatgtwgtkgaaatattcccagcctctaaagaagaactttgtataagggttgagtttttcggcgatgagattgaccgtatycgagaagttaactacctaacwggtgaagtgttgaaagaaagagaacattttgcgatattcccagcttctcacttcgtaacacgtgaagaaaagttgaaagttgcgattgaacgtattgaaaaagaattggaagaacgattgaaagaattacgagatgagaataaattactagaagcgcaaaggttagaacagcgtaccaactatgatttagaaatgatgcgagagatgggattctgttcaggaattgaaaactattccgtacatttaactttgcgrccactgggttcgacaccrtatactttattggattactttggcgatgattggttagkaakgwkygawsaatcmcatgwgacattaccrcaagttcgaggcatgtataacggagacagagcgcgtaaacaagttttggtggatcatggrtttagattaccgagtgcattagataaccgtccwcttaaatttgaagaatttgaagaaaagacaaaacaacttgtgtatgtatctgcaacgcctggaccatacgaaattgaacatacggataagatggttgaacaaattattcgtcctactggtttactggatcctaarattgaggttagacctactgaaaatcaaattgacgatttattaagtgaaattcaaacaagrgttgagcgtaatgaacgcgtacttgttacaacgctcactaaaaagatgagtgaagatttaaccacatacatgaaagaagcgggtattaaagttaattatctgcattcagaaatcaagacattagaacgaatygaaataattagagacttacgaatgggtacatatgatgttatcgtaggtattaatttattaagagagggtattgatataccagaagtttctctagttgtcatattagatgcagataaagaaggrtttttacgttctaaccgctcattaattcaaacaataggtagagctgcgcgtaacgataaaggtgaagtcattatgtatgccgataaaatgactgattcgatgaagtatgcaattgatgagacacaacgtcgtcgagaaatacagatgaaacataatgaaaaacatggtattacacctaaaacaattaataaaaaaatacatgatttaattagtgctactgttgaaaatgacgaaaataatgacaaagcacaaactgtgatacctaagaagatgacgaaaaaagaacgtcaaaagacaatcgacaatatagaaaaagaaatgaaacaagcagcgaaagatttagatttcgagaaagctacagaattaagagatatgttatttgaattaaaagcagaagggtga

SEQ ID NO: 2086 - DNA, 1263 bp, Staphylococcus aureus
atgtttaaattcaatgaagatgaagaaaatttgaaatgctctttctgcggaaaagaccaagatcaagtaaaaaaacttgtagcaggaagtggtgtatatatttgtaatgagtgtattgaattatgctcagaaatcgtcgaagaagaattagctcaaaacacttctgaagcgatkacagaattacctactcctaaagaaattatggatcatttaaacgaatatgttattggtcaagaaaaagctaaaaaatctttagctgtrgctgtttataaccactataagcgtattcaacaattaggaccaaaagaagatgatgttgarttacaaaaaagtaacattgcmttaattgggccaacaggtagtggtaaaacattattagctcaaacmttagccaagacgttgaatgtaccatttgcaattgcagatgcgacaagtttaactgaagctggttatgtaggcgatgatgttgaaaatatcttgttgagattaattcaagcagctgactttgacattgataaagccgaaaaaggtattatttatgtagatgaaattgataaaattgcacgtaaatctgaaaacacatctataacacgtgacgtttcaggtgaaggtgttcaacaagcattgcttaaaatcttagaaggtacractgcaagtgttccgccacaaggtggacgcaaacatccaaaccaagaaatgattcaaattgatacaacaaatatcttatttattcttggtggtgcctttgatggtattgaagaagtgattaagcgccgtcttggtgaaaaagttattggtttctcaagcaatgaagctgataaatatgacgaacaagcattattagcacaaattcgcccagaagatttgcaagcctatggtttgattcctgaatttatcggacgtgtgccaattgtagctaatttagaaacattagatgtaactgcgttgaaaaacatcttaacgcaacctaaaaatgcacttgtgaaacaatatactaaaatgctggaattagatratgtrgatttagagttcactgaagaagctttatcagcaattagtgaaaaagcaattgaaagaaaaacaggtgcgcgtggtttacgttcaatcatagaagaatcgttaatcgatattatgtttgatgtgccttctaacgaaaatgtaacgaaggtagttattacagcacaaacaattaatgaagaaactgaaccagaaytatacgacgcagaaggyaatttaattaataatagtaaaacatcagcttaa

SEQ ID NO: 2087 - DNA, 2847 bp, Staphylococcus aureus
atgaaagaaccatccatagtagtaaaaggtgctcgtgcgcataacttgaaagatattgatatcgaactacctaaaaataaattaattgttatgacaggwttatctgggtcaggtaaatcgtcattagcattcgatactatatatgctgaaggacaacgacgttatgttgaatcattaagtgcctatgcgcgtcaatttttaggscaaatggacaaaccagatgttgatacwattgaaggattatcgccagcaatttcaatagatcaaaaaacaacaagtaaaaatccaagrtcaactgtwgcaacagtaacagaaatatatgattatatacgtttgttatatgcacgtgttggtaaaccttactgtccaaatcacaatatagaaattgaatcgcaaacagtacaacaaatggttgaccgcattatggaattagaggcacgtacaaagattcaattattagcacctgtcatcgctcatcgtaaaggtagtcatgaaaagctaatcgaagatattggtaaaaaaggttatgtacgtttaagaatcgatggcgaaattgttgatgtaaatgatgtacctacwttagataagaacaagaatcatacaatagaagttgttgtagaccgattagttgttaaagatggaattgaaacacgactagctgactctatagaaactgcsttagagctttcagaaggacaattaacagtygatgtcattgacggggaagaccttaagttttcagaaagccaygcttgtcctatatgtggattttcaatcggagarttagaaccaagaatgtttagctttaacagtccttttggtgcttgtccracatgtgatggcttaggycaaaagttaacagtcgatgtagacttggttgttcccgacaaagataagacgctaaacgaaggtgcaatagaaccwtggataccgacgagttctgatttttatccaacattgttaaaacgtgtttgtgaagtttataaaatcaatatggataaaccttttaaaaagttaacagaacgtcaacgtgatattttattgtatggttckggtgacaaagaaattgaatttacatttacacaacgtcarggtggtactagaaaacgaacaatggttttcgagggtgtagttcctaatataagtagacgattccatgaatctccttcagaatatacacgtgaaatgatgagtaaatatatgacygaactaccttgygaaacttgtcatggaaagcgattgagtcgtgaagcgttatctgtttatgtaggtggtttaaatattggtgaagtagtcgaataytcaatyagtcaagcgctgaactattataaaaacattratttgtcagaacaagatcaagcgattgcaaatcaaatattgaaagaaattatttcccgactcacttttttaaataatgtgggacttgaatatttaacgytaaacagagcttcaggtacactttcaggtggtgaagcacaacgtattcgattrgcaacgcaaattgggtcgcgtttgactggtgtcttatatgtattagatgagccatcaattggactgcatcaaagagataatgatcgattaattaatacacttaaagaaatgagagatttaggaaatactttaattgtagttgaacacgatgatgatacaatgcgtgcggctgattacttagtggayataggkcctggtgctggtgarcatggaggrcarattgtgtctagtggkacwcctcaaaaggtaatgaaagataaaaaatcwttaacaggacaatacttgagtggtaagaaacgtattgamgtacctgaatatcgcagaccggcttcagatcgtaaaatttctatacgtggagctagaagyaacaaycttaaagggrttgatgtggacataccactwtcaatcatgacggtygttacaggtgtatcaggttctggtaaaagctcattagtaaatgaagtattatacaaatcattagctcaaaaaatyaataaatctaaagtaaagccaggattgtacgataarattgaaggtattgatcaacttgataaaattattgatattgatcaatcaccrataggtagaacgccacgctctaatccagcaacatatactggygtgtttgatgatatacgtgatgtgtttgcgcaaacaaatgaagctaaaattcgaggatatcaaaaaggkcgttttagttttaatgtaaaaggtggacgctgtgaagcttgtaaaggtgacggtattattaaaattgaaatgcattttttacctgatgtttatgttccttgtgaagtgtgtgatggtaaacgatataatcgygagacactagaggttacttacaaaggtaaaaatattgctgacattttagaaatgactgttgaagaagcaacacaattttttgaaaatattcctaagattaagcgcaagytacaaacactagttgatgttggtcttggatacgtcacattaggtcaacaagctacaacrttatcaggtggtgaggctcaacgtgtgaaacttgcatctgaacttcataaacgttcaactggtaaatctatttatatcctagaygaacyracaacagggttacatgttgacgatattagyagattattaaaagtattaaaycgattagttgaaaatggtgayactgttgtaattattgaacataacctagatgttatcaaaacagcagactatattatmgacttaggtcctgaaggtggtagtggcggtggtactattgttgcgactggmacacccgaagatattgctcagacaaagtcatcatatacaggaaagtatttaaaagaagtacttgaacgagataaayaaaatactgaagataaataa

SEQ ID NO: 2088 - DNA, 1302 bp, Staphylococcus aureus
atgacagcaacttgggaaaaaaaggaaggtaacgaaggtttattaacwgttactgttcctgcagaaaaagtaaacaaagcgttagatcaagcattyaaaaaagtggttaaacaaattaacgtacctggattccgtaaaggtaaagtgccacgtccaattttygaacaacgctttggtgtagaagcattatatcaagatgctatcgacattttattaccagatgcttatggtgaagcaattgacgaaactgatattaaaccagttgcacaaccagaagtaagtgttactcaaattgaaaaaggtaaagatttcatttttgaagcaacagttacagttgagccagaagttaaattaggagactataaaggtcttgaaattgaaaaacaagaaactgaattatctgatgatgagttacaagaagcrattgaccacagcttaggacatttagctgaaatggtmgttaaagaagatggtgttgttgaaaatggcgacacagttaacatygactttagtggttcagttgacggagaagaattcgaaggtggacaagctgaaggttacgatttagaaatcggttcaggttcattcatwcctggtttcgaagagcaattagaaggtatgaaagttgacgaagaaaaagatgttgtcgtaacattcccagaagaataccatgctgaagaattagcyggtaaagaagcaactttcaaaacaaaagttaacgaaattaaatttaaagaagtyccagaattaacwgatgaaattgctaatgaattagatgcagaagcaaatacagtagacgagtacaaagaaaacttacgtaaacgtttagctgaacaaaaagctacagatgcwgaaaatgttgaaaaagaagaagcgattacwaaagctactgataatacaacaatcgatattcctgaagcaatggttaatactgaattagatcgtatggtgtctgaatttgcacaaagaattcaacaacaaggtttagatttacaaacgtacttccaaatctcaggtcaagatgaawctcaattaagagagcaaatgaaagacgatgcagaacaacgtgttaaaactaacttaactttaactgcratcgctgaagctgaaaaaatcgaagctactgatgaagatatcgataaagaattagaaaaaatgagtaaacaatttaatatctcagttgaagatatcaaaaatactttaggtaatactgatatcattaaaaatgatgttcgtatycaaaaagttatcgatttattaagagataacgcaaagttcgttgaaggaactaaagaagattaa

SEQ ID NO: 2089 - DNA, 1593 bp, Staphylococcus aureus
atgacactacttactgtaaatccattcgataatgtyggattatcagccttagttgcagcagtacctattattttatttttattatgcttaaccgtttttaaaatgaaaggcatttatgcagcattgacaactttggttgttacattgattgtggctttatttgtatttgaattaccagygcgtgtatcagcaggtgcgattacagaaggcgttgttgccggtattttcccaataggatatatcgttttaatggcagtttggttatataaagtttctattaaaacaggacaattttctattattcaagatagtattgcaagtatttcagwggaccaaagaatccaactattattaattggattttgtttcaacgcatttttagaaggtgcagcaggatttggtgtgccaattgcgatttgtgcagtattattaattcaacttggatttgaaccattaaaagcagcgatgttatgyttaattgctaatggtgcggcgggtgcctttggtgcaattggtttaccagttagtattattgatacgtttaacttaagtggaggcgttacaacattagatgttgcgagataytcagcattaacacttccaattttaaactttattatyccatttgttttagtattcrttrtagatggyatgaaaggtattaaagaaattttacctgtcattttaacagtgagtggtacatatactggattacaattattattaacaatattccatggtccagaactagcagacattatyccatcactagcaacaatggtggtgttagcatttgtttgtcgtaaatttaaaccgaaaaacattttcagrttgraagmrtcwgaacataaaattcaaaaacgaacgcctaaagaaattgtctttgcttggagtccgttcgtmattttaactgcctttgtwttagtatggagtgcaccattcttcaaaaaattattccaacctggaggtgcacttgaaagtttagtaataaaattgccaattccaaatactgtgagtgatttatcgcctaaaggaattgcgttgcgtctcgatttaattggtgcaactgggacagcgattttattaacagtaattattacaattttaattacgaagytaaaatggaaaagtgcaggtgctttattggtcgaagcaattaaagaattatggttaccgatccttacaatttcagctatcctagctattgctaaagttatgacatacggtggtttgactgtagcaattggacaaggtattgctaaagckggagcaattttcccattattctctccagtattaggttggattggtgtgtttatgactggttcagttgtaaataacaatactttattcgcacctattcaagcgacagtrgcacaacaaatttcaacaagcggttcattacttgtggcrgctaacactgcaggtggtgtagcagcgaaacttatttcaccacaatcaattgccattgcgactgcagctgttaaaaaagttggtgaagaatctgcattattaaaaatgacgytaaaatacagtattatatttgttgcytttatttgtgtttggacgtttatactaacgttaatattctaa

SEQ ID NO: 2090 - DNA, 345 bp, Staphylococcus aureus
atgacaacacaaatgaaaatcaaaacatatttagttgctggtattaaagcggcgctccttgatacgactggtattaaattagcaagcaaatctgaaactacatcacatacgtatcaacatcaagcgcttgtagatcaattacatgaattaatagcaaacactgacttaaataaattatcgyacctaaatttagatgcgtwtcaaaaacgcgatattttagctgcrcactatattgcwaaatcmgctatacgcactaaaaatttggatcaaatgactaaagcgaaacawagattagaaagtatttacrattcaatttctaaccctttgcattcacaaaacaattaa

SEQ ID NO: 2091 - DNA, 933 bp, Staphylococcus aureus
atgttaacgacagaaaaactagttgaaacattaaagttagatttaatcgctggtgaagaaggrytatcgaagccaattaaaaatgctgatatatcaagaccrggcttagagatggcaggttatttttcacattatgcgtcagatagaatacaactattaggaacaacggaactatcgttttacaatttattaccagataaggatcgcgcaggtcgtatgcgtaaactatgcagaccagaaacgcctgcaattattgtgacrcgtggattgcagccaccagaagaattagttgaagctgcaaaagaattaaatacsccacttatagttgctaaagatgcsactacaagtttaatgagtcgcttaacracgtttttagagcatgcacttgcaaagacgacatctttacatggwgttttagtagatgtttacggtgttggtgtactaattaccggtgattcaggaataggtaaaagtgagactgcgttrgaattagtkaarcgtgggcatagattagtagcagatgataatgtagaaatacgtcaaattaataaagatgaactaatagggaaaccaccaaagttaatagaacatctattagaaatacgtggactaggtattatcaatgttatgactttatttggcgcgggttcaatattaactgaaaaacgaattagattaaatattaatttggaaaactggaacaagcaaaagttatatgaccgcgtaggtcttaatgaagagacgytaagtattttagatactgaaatmactaaaaaaacaatacctgtaagacctggtagaaatgttgcggtaattattgaggtcgctgcaatgaactatcgattaaatatcatgggcattaacackgccgaagaatttagtgaaagattaaatgaagaaattatcaagaacagtcataagagtgaggagtag

SEQ ID NO: 2092 - DNA, 930 bp, Staphylococcus aureus
atgtcagatattattcagtttcctaactcttcgaaaaagttatataaagatataaaacgtgctgaacaagaccaaaactatgacctgatgtatgaatatattgtrcaatatgaacgtcaatttgaactcactgaagaaatagcaatgatgaaatgccgtatgttatatgagacggggtcatttcttgaattaagagaagaaacaattgtcttattgaaaactggcatacaacaatatgatgcattgatgatttattaygtgaaaagtttgatwggtttggracaatattttgaagcggtagaagtaattcatcaaattattgatgargtcaaagatcacaaaacaagaatggcattacatcctcttaaagaatttgctaagtcaaaattaattgaagatgaaaaacgattgacwcagtcattarctgattttgatacgttatcaatgagggaacagacgcacttgattttgaagttaatagacaatggtcattttcaatttcaagaaacggtattatatatattraaatctaataygtacagttataamctmattagtttaatgattgagtatttaaggttygcaaattgtacacaagaactgacaattgaaaagtatggtatggatrtaacttttgtaccagctaatttaaawgggctagaacatacaacactkaaagaaaaagttatacctaacgttatggaaacattaaatgawggtgcwttacatatcgctgaagaagcacaccatattatgaataatcactctatcatgatttatccaattgatattgaaactttgtttgaaacgaataaatggattaatgcatacgaatgttatttcaaaaatatgttaggacttaaatgtgaattacaaagtatcgatgcatttaattttattcagcaattagatttgaataataatagttaa

SEQ ID NO: 2093 - DNA, 840 bp, Staphylococcus aureus
atgggtattgtatttaactatatagatcctgtggcatttaacttaggaccactragtgtacgatggtatggaattatcattgctgtcggaataytacttggttactttgttgcacaacgtgcactagttaaagcaggattacataaagatactttagtagatattattttttatagtgcactatttggatttatcgcggcacgaatctattttgtrattttccaatggccatattacgyggaaaatccargtgaaattattaaaatatggcatggtggwatagcaatacatggyggtttaataggtggctttattgctggtgttattgtatgtaaagtgaaaaatttaaacccatttcaaattggtgatatcgttgcgccaagtataattttagcgcaaggaattggacgctggggtaactttatgaatcacgaggcacatggtggayckgtgtcacgcgcttttttagaamaattacatttgccwaattttataatagaaaatatgtatattaacggccaatattatcatccaacattcttatatgaatccatttgggatgtcgctggatttattatcttagttaatattcgtaaacatttaaaattaggagaaacattctttttatatttaacttggtattcaattggtcgattctttatagaaggattacgtacagatagcttaatgctcacaagtaatattagagttgcacaattagtatcaattcttttaattttaataagtataagtttaattgtatatagaaggattaagtataatccaccgttgtatagcaaagttggggcgcttccatggccaacaaraaaagtgaagtag

SEQ ID NO: 2094 - DNA, 609 bp, Staphylococcus aureus
atgtctaaatttgatgaacaaatcattgtagtacctagagaaattatttttaataatgaaaagaatamtttcaatgggtttttaaataagaataaacyagaaggtcaaaatatttttgatgcgctaagtcaatatgaagttaagcgacgcggcgatatggaagaggatccatcatataaacaactcatttcttattgtttacttgaaaatgagcatggcgagatattagtgtatgaacgattatctggcggtggagaagctcgattgcatggacaatcttcaataggtgtaggcggtcatatgaatgatgttccaggagcagaatctattaacgaagtattgagagttaatgcacagagagaattagaagaagaagtaggtttaagtgagcaagattcacaaaatatggaatatatcggttttattaatgacgataataaygaagtgggcaaggtacatattggtgttgtatttaaaatcactgtaagtacgaatgatgtagaagctaaagaaacagatactttacgaataaaatgggttgaaaaaggcaacatagagtcatatgatgatttcgaracgtggagygcattaatccttcaagatttataa

SEQ ID NO: 2095 - DNA, 486 bp, Staphylococcus aureus
ttgagraaatttttatcaaaarmayatcatcrtacaaaccctttatggcrtgtataccgtcttgttaaattttcgaaagtttttaagaatgtaatyatcattgaattttcgaaatttattccaagtatggtactgaaaagacatatatataaacaamttttaaatattaatatcggtaatcaatcrtcgatagcttataaagtaatgttagatattttttayccagaactgattacgattggtagtaacagtgttattggttacaatgtaacaattttgacgcatgaagcattagttgatgaatttcgttatggaccagtgacgataggatctaacactttgattggtgcaaatgctaccattttacccggtataacgattggtgacaatgtaaaagttgcagctggtacggttgtttcaaaagatataccggataatggatttgcatatggcaaccctatgtatataaaaatgattaggaggtga

SEQ ID NO: 2096 - DNA, 357 bp, Staphylococcus aureus
atgccacgagttaaaggtggaacagtaacaagagcgcgtcgtaaaaaaacgattaaattagctaaaggttacttcggttcaaaacatacattatacaaagtagctaagcaacaagtaatgaaatcaggtcaataygctttccgtgaccgtcgtcaacgtaaacgtgacttccgtaaattatggattacacgtatcaacgcagcagctcgtcaacatgaaatgagctactcacgtttaatgaacggtttgaaaaaagctggtatcgacattaaccgtaaaatgttatcagaaatygcaatttctgacgaaaaagcatttgctcaattagtaactaaagctaaagatgctttaaaataa

SEQ ID NO: 2097 - DNA, 1440 bp, Staphylococcus aureus
atggcgcaaaagaataataatgtaattccaatgacttttgatgatgcattttatcgtaaaatggctaawcagaagtttaaacaaagagaatataaacgagctgctgaatactttgaaaaagtgttagaattgtcacctgatgatmtggaaattcaaattgattatgcacaatgtctagtgcaacttggtattgctaaaaaagcagaacatttattttatgacaatattatttataataggcatctagaagatagcttttatgaattgagtcagctcaacattgaagttaacgaaccaaacaaggcattcttgtttggtattaattatgttattgttagcgacgaccaagattatagagatgaattagatcaaatgtttgatgtgaaatatcaaagygaagaacaaattgaacttgaagctcaattgtttgtagttcaaatactattccaatatcttttwtctcaaggtcgattaaaagatgcaaagaattatgtcttacatcaaccacaagaagttcaagatcatcgtgtmgtacgtaatttaytggcaatgtgttatttatatctcggygaatatgatasggctaaagcattgtacgaagcactattamaagaggatagtacagatatatatgcattatgccattatactttgctactttataacactaaggaaaatgaacaataycaaaartatttaaaaatattaaayaaagttgtacctatgaatgacgatgaaagttttaaattaggtattgtwttaagttatttaaagcagtatcgtgcwtcacaacaattgttgtaccctttatataaaaaagggaaatttttatcaattcaaatgtacaatgctttagcatataattattattatttaggtgaagaagacgaaagtcattactactgggataaattgaagcaaatttctaaagtggaaattggacatgckccttgggtaattgaaaatagcaaagaagtttttgaccaacatattttgccrttacttcaaagtgatgacagtcattatcgtttatatggtatttttttattggatcaattaaatggtaaagaaattgtgatgacggaaagtatttggcaggttytggaaaatctaaataattatgagaaattgtatttaacgtatttagttcaaggtttaacgctcaataaattagacttcattcatcgcggcttrttaacgctttaccawaatgaattatttgtaagtgaaaatgatktaatggttgcatggattaatcaaggtgaactcataattgctgaaaaagtagatttaactgatgttgagccatatatcggtgcgtttatttatttgtattttaaaaatcaacctcgaaacgttacaaagaagcaaattacaacatggttaggcataacacaatataaactgaacaaaatgattgaatttctcttgagcatatag

SEQ ID NO: 2098 - DNA, 201 bp, Staphylococcus aureus
atgccaaaaatgaaaactcaccgcggagcagctaaacgtgttaaaagaactgcttcaggtcaattaaaacgttcaagagctttcacatctcacttattcgcaaacaagagcactaaacaaaaacgtcaattacgtaaagctagattagtgtctaagagcgayatgaaacgtgtaaaacaattattagcatacaaaaaataa

SEQ ID NO: 2099 - DNA, 936 bp, Staphylococcus aureus
atgactgaaatagattttgatatagcaattatcggtgcaggtccagctggtatgactgctgcagtatacgcatcacgtgctaatttaaaaacagttatgattgaaagaggtattccaggcggtcaaatggctaatacagaagaagtagagaacttccctggtttcgaaatgattacaggtccagatttatctacaaaaatgtttgaacacgctaaaaagtttggtgcagtttatcaatatggagatattaaatctgtagaagataaaggcgaatataaagtgattaactttggtaayaaagaattaacagckaaagcggtyattattgctacaggtgcagratacaagaaaattggtgttccgggtgaacaagaacttggtggacgcggtgtaagttattgtgcagtatgtgatggtgcattctttaaaaataaacgcctattcgttatcggtggtggtgaytcagcagtagaagagggaacattcttaactaaatttgctgacaaagtaacaatcgttcaccgtcgtgatgagttacgtgcacarcgtattttacaagatagagcattcaaaaatgataaaatmgactttatttggagycatactttgaaatcaattaatgaaaaagacggcaaagtgggttctgtgacattaacgtctacaaaagatggttcagaagaaacacacgaggctgatggtgtattcatctatattggtatgaaaccattaacagcrccatttaaagacttaggtattacraatgatgttggttatattgtracaaaagatgatatgacaacatcagyaccaggtatttttgcagcaggagatgttcgygacaaaggtttacgccaaattgtcactgctactggcgatggtagtattgcagcrcaaagtrcagcggaatatattgaacatttaaacgatcaagcttaa

SEQ ID NO: 2100 - DNA, 528 bp, Staphylococcus aureus
gtgtcaacmatagcaaaagatcaaactcaaatcaatgacaaaattcgtgcaaaagaattacgtttaatcrgtcaagatggkgaacaaattggtgttaaatcaaagcgtgaagctttaraaatggctgaacgtgtagatttagacttagtggtcgttgcaccgaatgcgaaaccaccagttgcaagaattatggattacggtaaattcaaattcgaacaacagaaaaaagaaaaagaaatgaaaaagaaacaaaaaattatcaatgttaaagaaattcgtttaagtccaacaattgaggaacatgatttccaaackaagttgaaaaacggacgtaaattcttaactaaaggcgataaatgtaaagtatctattcgtttcagagggcgtgccattacgcataaggaaattggtcaacgtgtgctagaaaaatatgcagatgaatgyaaagatatagcaacagttgaacaaaaacctaaaatggacgggcgtcaaatgtttatyatgttagcgccaacagctgaaaaataa

SEQ ID NO: 2101 - DNA, 912 bp, Staphylococcus aureus
atggataataatgaaaaagaaaaaagtaaaagtgaaytattagttgtmacaggtttatctggmgcaggtaaatctttggttattcaatgtttagaagacatgggatatttttgtgtagataatctaccaccagtgttattrcctaaatttgtagagttgatggaacaaggaaatccatccttaagaaaagtggcaattgcaattgatttaagaggtaaggaactatttaattcattagttgcagtagtggataaagtyaaaagtgaaagtgacgtcatcattgatgttatgtttttagaagcwagtactgaaaaattaatttcaagatataargaaacgcgtcgtgcacatcctttgatggaacaaggtaaaaratcsttaatyaatgcaattaatgatgagcgagagcatttgtctcaaattagaagtatagctaattttgttatagatactacaaagttatcacctaaagaattaaaagaacgcattcgtcgatactatgaagatgaagagtttgaaacttttacaattaatgtcacaagtttcggttttaaacatggrattcagatggatgcagatttagtatttgatgtacgatttttaccaaatccatattatgtagtagatttaagacctttaacaggattagataaagacgtttataattatgttatgaaatggaaagagacrgagattttctttgaaaaattaactgatttgttagattttatgataccygggtataaaaaagaagggaaatctcaattagtaattgccatcggttgtacgggtggacaacatmgatctgtagcattagcagaacgactaggtaattatctaaatgaagtatttgaatataatgtttatgtgcatcatagggacgcacatattgaaagtggcgagaaaaaatga

SEQ ID NO: 2102 - DNA, 1494 bp, Staphylococcus aureus
atgtcaaaagttcaaaatgaaagtaacaatgttgtcaaaaggggacttaaagatcgtcatatttctatgattgcgattgggggttgtattggtacaggtttatttgtaacttctggtggagcaattcatgatgcaggtgctttgggtgcattaataggatacgcaattatcggaataatggtatttttcttaatgacgtcacttggygaaatggctacktatttrccagtatcaggytcatttagtacatatgctacaagatttgttgatccatctttagggtttgcgcttggttggaactattggtttaactgggtagtractgtagcagcagatattacgattgcagcacaagtcattcaatattggacaccattrcaaggcataccmgcttgggcatggagtgcgttgttyktagktrtaatttttagtctgaattcgttatcrgttcgcgtctatggkgaaagtgaatactggttggcattgataaaagtgrttacagttattgttttcattgcaattggtttattaacgattgtmggaatcatgggtggtcatgttgtaggattygaaatatttaataaaggtgaaggtccwattcttggtggmaayytaggmggaagtttrttatcwattytaggtgtattcttaatygctggtttytcattccaaggtacwgagttaatwggtattacrgctggkgaatcagaaaatcctgaacgtgctgtgccgaaagcrattaaacaagtattctggagaattttattattttacattttagccatttttgttatcggtatgttaattccttatgatagtagtgcattaatgggdggyrgtratraygtwgcaacstctccrttcacrytagtktttaaaaatgcwggatttgcktttgcagcmtcatttatgaatgcwgtyatyttaacrtcwgtkttatcagcaggtaactcwggwatgtatgcytcaacbcgwatgctwtattcaatgagtaaagataaattrgcgtttgaarcatttggkaaaacaaataaaaayggtgtgccatatatgtckttaytmgtwacwgcaatyattgtagtsathatwttygtrktacaaagysttacaraaggtgcwtaysaatayatcgttgcwgcaagtggkttaactggytttattgcytgggtaggtatmgcagtragtcattayckawttagwagrgcatttgataaacaaaattatgayaaatctaaattraaatatacwgctaaatkrttyccrttcggaccattatttgcwggctttttatgtattgtwgtaatyatyggtcaagatgttgactttattaaaacaggagattttaattttagtcgcttcttaattacgtatatgggaatyccagtatttttagcattctttatttatcataagcttcgatataaaacgaaraaaattccattagaacaagtagatttacgtcaagacgtgtcaatggatgaaataaaaggttaa

SEQ ID NO: 2103 - DNA, 996 bp, Staphylococcus aureus
atgagacaaataaaagttgtacttatcggtggtggcactggcttatcagttatggctaggggattaagagaattcccaattgatattacrgcgattgtaacagttgctgataatggtgggagtacagggaaaatcagagatgaaatggatataccagcaccaggagacatcagaaatgtgattgcagctttaagtgattctgagtcagttttaagccaactttttcagtatcgytttgaagaaaatcaaattagcggtcactcattaggtaatttattaatcgcaggtatgactaatattacgaatgatttcggacatgccattaaagcattaagtaaaattttaaatattaaaggtagagtcattccatctacaaatacaagtgtgcaattaaatgctgttatggaagatggagaaattgtttttggagaaacaaatattcctaaaaaacataaaaaaattgatcgtgtgtttttagaacctaacgatgtgcaaccaatggaagaagcaatcgatgctttaagggaagcagatttaatcgttcttggaccagggtcattatatacgagcgttatttctaacttatgtgtsaatggtatttcagatgcrttaattcattctgatgcgcctaagctatatgtwtctaatgtgatgacgcaacctggggaaacagatggttatagcgtgaaagatcatatcgaygcgattcatagacaagcyggacaaccgtttattgattatgtcatttgtagtacacaaactttcaatgctcaagttttgaaaaaatatgaaraaaaacattctaaaccagttgaagttaataaggctgaactwgaaaaagaaagcataaatgtwaaaacatcttcwaatttagttgaaatttctgaaaatcatttagtaagacataatactaaagtgttatcgacaatgatttatgayatagctttagaattaattagtactattcctttcgtaccaagtgataaacgtaaataa

SEQ ID NO: 2104 - DNA, 1938 bp, Staphylococcus aureus
atggaacaaattaatattcaatttccagatggtaataaaaaggcgtttgataaaggtactactactgaagatatagcacaatcaattagtcctggattacgtaaaaaagctgttgccggcaaatttaacgggcaacttgtagatttaacwaaaccgcttgaaactgatggatcaattgraattgtgacaccaggtagtgaagaagcgttagaggtattacgtcattctactgcacatttaatggcacacgcgattaaaaggttatatggtaatgttaaatttggtgtaggtcctgtaatagaaggtggmttctactatgacttcgacattgaccaaaacatctcatctgatgactttgaacaaattgaaaaracaatgaaacaaatcgttaacgaaaatatgaaaatcgaacgaaaagtggtttcacgagatgaagygaaagagttattcagcaatgatgaatacaaattagaattaatcgacgcgattcctgaagatgaaaatgtaacattatatagtcaaggtgattttactgatttatgtcgtggagttcacgttccatcaacagctaaaattaaagagtttaaactattatctacagcaggtgcatactggcgtggagatagtaacaacaaaatgttacaacgtatwtayggtactgctttctttgataaaaaagaattraaagcacatttacaaatgttagaagagcgtaaagaacgtgatcatcgtaaaattggtaaagagttagaaytattcacaaatagccaattagttggtgctggtttgccattatggttacctaacggtgcaacaattagacgtgaaattgaacgttacattgttgataaagargtkagcatgggdtatgaccacgtttatacaccmgtacttgctaatgttgatttatacaaaacatctggtcactgggatcactatcaagaagatatgttcccaccaatgcagttagatgaaactgaatctatggtattacgtccaatgaactgtccacatcatatgatgatttatgcgaataaaccacaytcatatcgtgaattacctatmcgtatcgctgagctaggaackatgcatagatatgaagcaagtggtgctgtatcaggattacaacgtgttcgwggtatgactttaaatgattcacatatctttgttcgacctgatcaaattaaagaagaattcaaacgcgttgtaaacatgattattgatgtrtataaagactttggtttcgaggattatagctttagattaagttatagagaccctgaagataaagaaaagtactttgatgatgatgayatgtggaataaagctgaaaatatgcttaaagaggcagcggatgagcttggcttatcgtacgaagaagcgattggtgaagcggcattctatggtccgaaactagatgttcaagttaaaacagcgatgggtaaagaagagacattatcaacagcacaacttgatttcttattaccagaacgttttgatttaacttatattggtcaagatggtgaacatcatcgtccagttgttattcatcgtggtgttgtatcaacaatggaacgatttgtagcatttttaactgaagaaactaaaggtgcattcccaacttggttagcgccaaaacaagttcaaatcattccagttaacgttgatttacattatgattatgcgcgccaattrcaagatgaattgaaatctcaaggygttcgtgtaagtattgatgaccgtaatgaaaaaatgggttataaaatyagagaagctcaaatgcaaaaaataccttatcaaatcgtagttggggataaggaagttgaaaataatcaagtgaatgtgcgtcaatatggatcrcaagaccaagaaacagttgaaaaagatgaatttatctggaatctagttgatgaaattcgtttraaaaaacatagatag

SEQ ID NO: 2105 - DNA, 945 bp, Staphylococcus aureus
atgagctttgcatcagaaatgaaaaatgaattaactagaatagacgtcgatgaaatgaatgcaaaagcagagctcagtgcrctgattcgaatgaatggtgcacttagtctttcaaatcaacaatttgttataaatgttcaaacggaaaatgcaacaacggcaagacgtatttattcgttgattaaacgtgtctttaatgtggaagttgaaatattagtccgtaaaaaaatgaarcttaaaaaaaataatatttatatttgtcgtacaaagatgaaagcgaaagaaattcttgatgaattaggaattttaaaagacggcatttttacgcatgaaattgatcattcaatgattcaagatgaygaaatgagacgyagttacttgagaggagcttttctggcaggtggctcagtgaataaccctgaaacatcttcrtaccatttggaaattttttctcaaaatgagagtcatgcagaaggcttaacgaaactaatgaatagttatgarttgaatgccaaacatttagagcgaaaaaaaggaagtattacgtatttaaaagaagcggaaaagatttcggattttcttagtttgataggtggctatcaagcgttattaaaatttgaagacgtacgtattgtaagagatatgcgtaattctgttaaccgactcgttaattgtgaaacggcmaatctaaataaaacagttagtgctgcgatgaaacaagttgagagcattaaattgattgataaagaaattggtattgaaaatttaccagacaggttgagagagattgctagaattcgagtagaacatcaagaaatttcgttgaaagagcttggagaaatggtatcaactggtccaatttcaaaatcaggtgtaaatcaycgattaagaaaactkaatgatttagccgataagattagaaatggtgaacaaatagaattataa

SEQ ID NO: 2106 - DNA, 120 bp, Staphylococcus aureus
ttgtttgatgagaatatggttaataaattagatgattactacttcatttatggtatttgtaatgaatacccggatcaagaccgttatcttaagcagagatatttaatacataaattgtat

SEQ ID NO: 2107 - DNA, 588 bp, Staphylococcus aureus
atgaatttaattcctacagttattgaaacaacaaaycgcggtgaacgtgcataygatatatactcacgtttattaaaagaccgtattattatgttaggttcacaaattgatgacaacgtagcaaattcaatcgtatcacagttattattcttacaagcrcaagactcagagaaagatatttatttatacattaattcaccmggtggaagtgtaacagctggttttgcgatttatgatacaattcaacacattaaacctgatgttcaaacaatttgtatcggtatggctgcatcaatgggatcattcttattagcagctggtgcwaaaggtaaacgtttygcgttaccaaatgcagaagtaatgattcaccaaccattaggtggtgctcaaggacaagcaactgaaatygaaattgctgcaaatcacattttaaaaacacgtgaaaaattaaaycgcattttatcagagcgtactggtcaaagtattgaaaaaatacaaaaagacacagatcgtgataacttcttaactgcagaagaagctaaagaatatggcttaattgatgaagtgatggtacctgaaacaaaataa

SEQ ID NO: 2108 - DNA, 921 bp, Staphylococcus aureus
atgaagcaatttaaaagtataattaacacgtcgcaggactttgaaaaaagaatagaaaagataaaaaaagaagtaatcaatgacccagatgttaagcaatttttggaagcgcatcgagctgaattaacgaatgctatgattgatgaagacttaaatgtgttacaagagtataaagatcaacaaaaacattatgacggtcataaatttgctgattgtccaaatttcgtaaaggggcatgtgcctgagttatatgttgataataaccgaattaaaatacgctatttacaatgyccatgtaaaatcaagtacgacgaagaacgctttgaagctgagctaattacatctcatcatatgcaacgagatactttaaaygccaaattgaaagatatttatatgaatcawcgagaccgtcttgatgtagctatggcagcagatgatatttgtacagcaataactaatggggaacaagtgaaaggcctttacctttatggtccatttgggacaggtaaatcttttattctaggtgcaattgcgaatcagctcaaatctaagaaggtacgttcgacaattatttatttaccggaatttattagaacattaaaaggtggctttaaagatggttcttttgaaaagaaattacatcgcgtaagagaagcaaacattttaatgcttgatgatattggggctgaagaagtgactccatgggtgagagatgaggtaattggacctttgctacaytatcgaatggttcatgaattaccaacattctttagttctaattttgactatagtgaattggaacatcatttagcgatgactcgtgatggtgaagagaagactaaagcagcacgtattattgaacgtgtcaaatctttgtcaacaccataytttttatcaggagaaaatttcagaaacaattga

SEQ ID NO: 2109 - DNA, 630 bp, Staphylococcus aureus
atgtcgaatcaaaattacgactacaataaaaatgaagatggaagtaagaagaaaatgagtacaacagcgaaagtagttagcattgcgacggtattgctattactcggaggattagtatttgcaatttttgcatatgtagatcattcgaataaagctaaagaacgtatgttgaacgaacaaaagcaggaacaaaaagaaaagcgtcaaaaagaaaatgcagaaaaagagagaaagaaaaagcaacaagaggaaaaagagcagaatgagctagattcacaagcaaaccaatatcagcaattgccacagcagaatcaatatcaatatgtgccacctcagcaacaagcacctacaaagcaacgtcctgctaaagaagagaatgatgataaagcatcaaaggatgagtcgaaagataaggatgacaawgcatctcaagataaaycagatgataatcagaagaaaactgatgataataaacaaccagctcagcctaaaccacagccgcaacaaccaacaccaaagccaaataataatcaacaaaayaatcaatcaaatcarcaagcraaaccacaagcaccacaacaaaatagccaatcaacaacaaataaacaaaataatgctaatgataagtag

SEQ ID NO: 2110 - DNA, 1185 bp, Staphylococcus aureus
atgcaagaagcatacattgtagcttatgggcgttcagccgcagcgaaagcaaagcaaggcgcattattccacgaaagacctgatgatgtcgcagccaaagtattacaaggcgtattgaaacgtattgacggaaaattcaataagaatatgattgaagatgtcattgttggtacggcttttccagaaggattacaaggmcaaaacattgcacgaacgattgcattgcktrcgggattatctgacackgtaccgggtcaaacagtgaatcgctactgctcatcaggattacaaaccatcgcgattgcagccaatcaaattatggckggtcaaggagatatacttgtagctggtggcgttgaattgatgagtgccgtaccaatgggtggcaacgagcccacaaacaatccwaccttacaatatgatgatataggtgcgtcatatcctatgggtttaactgctgaaaatgtagcatcccaatttgacgtatcacgcgaagatcaagatgcttatgctgtcagaagtcatcarcgtgcctatgamgcacaacgtgatggtcggttcaamgatgaaattatyccaatacrrgtaaactcagttgaatatacaaacgyaggaccaaaagtacacacaaatatctttgaccaagatgaatttatacgmcctgacaccacgatggaggcattagccaaattacgtacagtatttaaagctgacggcactrtgactgcrggaacatctgccccactttctgatggtgcaggatttgtagttttaatgtctggagataaagtgaaagaactmggcgtgacacctattgcacgattcgttggttwtaaggcagtaggcgttgacccgaaaattatgggtattgggcctgcatatgcgattcctgaagtattgtcactcagcaatctatctgttgaagacattgatttratcgaattgaacgaagcatttgcttctcaaacdattgcatctattaaagaagtaggtctagatatatcacgtacgaatgtgaatggtggcgctattgctttaggtcatccattaggtgctacaggsgcaatgttaaccgcgcgtttacttaatgaaatgggtagacgtcccgatagycgttacggcatggttacgatgtgtattggtgtcggyatgggtgcagctgctatatttgartatgtgcgttag

SEQ ID NO: 2111 - DNA, 1014 bp, Staphylococcus aureus
gtgaaagacttattgcaagcacagcaaaagcttataccggatctcatagataaaatgtataaacgtttttctattcttactactatctcaaaaaatcagcctgtcggacgtcgaagtttaagcgaacatatggatatgactgaacgtgtactgcgttctgaaacagatatgcttaagaaacaagatttgataaaagttaagcctaccggwatggaaattacagctgaaggtgagcaactgatttcgcaattgaaagrttactttgatatctatgcagatgayaatcgtctgtcagaaggtattaagaataaatttcaaattaaggaagttcatgttgttcctggtgatgctgataatagycaatctgttaaaacagaattaggtagrcaagcaggtcaattacttgaaggcatattacaagaagaygcgatagttgctgtaactggcggatccacgatggcatgtgttagtgaagcaattcatttattaccatataatgtattcttcgtaccagccagaggtggactaggcgaaaatgttgtctttcaggcaaacacaattgcagcyagtatggcacaacaagctggcggttattatacgacgatgtatgtacctgataatgtcagygaaacaacatataayacattgttgttagagccatcagtcataaacactttagacaaaattaaacaagcaaacgttatattacacggcattggtgatgcgctgaagatggcgcatcgacgtcaatcacctgaaaaggtcattgaacaacttcaacatcatcaagctgtcggagaggcatttggttattattttgatacacaaggtcaaattgtccataaggttaaaacaattggacttcaattagaagaccttgaatcaaaagactttatttttgcagttgcaggaggcaaatcgaaaggtgaagcaattaaagcatacttgacgattgcacccaagaatacagtgttaatcactgatgaagccgcagcaaagataatacttgaataa

SEQ ID NO: 2112 - DNA, 471 bp, Staphylococcus aureus
atgaaatgcccgaaatgtaattctacacaatctaaagttgtagattcaaggcatgccgatgaattaaatgccattcgaagacgaagagaatgtgaaaattgtggaacacgtttcactacatttgaacatatcgaagttagtcagcttatagttgtgaaaaaagatggcacaagagagcagttttcaagagaaaaratacttaatggacttgtgcgttcttgtgagaaacgaccagttagatatcaacaacttgaagacataacwaacaaggttgaatggcaattacgagatgaaggtcatacggaagtgtcttcacgagatataggtgaacacgttatgaacttgttaatgcatgttgatcaagtttcatatgttagatttgcatcagtctataaagaatttaaagatgttgatcaattgttagcatcgatgcaagggattttaagcgaaaacaaacggagtgatgcttaa

SEQ ID NO: 2113 - DNA, 1011 bp, Staphylococcus aureus
atggcagtaaaagtagcaattaatggttttggtagaattggtcgtttagcattcagaagaattcaagaagtagaaggtcttgaagttgtagcagtaaacgacttaacagatgacgacatgttagcgcatttattaaaatatgacactatgcaaggtcgtttcacaggtgaagtagaggtagttgatggtggtttccgcgtaaatggtaaagaagttaaatcattcagtgaaccagatgcaagcaaattaccttggaaagacttaaatatcgatgtagtrttagaatgtactggtttctacactgataaagataaagcacaagctcatattgaagcaggcgctaaaaaagtattaatctcagcaccagctactggtgacttaaaaacaatcgtattcaacactaaccaccaagagttagayggttctgaaacagttgtttcaggtgcttcatgtactacaaactcattagcaccagttgctaaagttttaaacgatgactttggtttagttgaaggtttaatgactacaattcacgcttayacaggtgatcaaaatacacaagacgcacctcacagaaaaggtgacaaacgtcgtgctcgtgcagcrgcagaaaacatcatccctaactcaacaggtgctgctaaagctatcggtaaagttattcctgaaatcgatggtaaattagatggtggtgcacaacgtgttcctgtagctacaggttcattaactgaattaacagtagtattagaaaaacaagacgtaacagttgaacaagttaacgaagctatgaaaaatgcttcaaacgaatcattcggttacactgaagacgaaatcgtttcttcagacgttgtaggtatgacttacggttcattattygacgctacacaaactcgtgtaatgtcagttggygaccgtcaattagttaaagttgcagcttggtatgataacgaaatgtcatatactgcacaattagttcgtacattagcatacttagctgaactttctaaataa

SEQ ID NO: 2114 - DNA, 1026 bp, Staphylococcus aureus
atgtcaacgaatattgcaattaatggtatgggtagaattggaagaatggtattacgtattgcattacaaaataaaaatttaaatgtagtagcgataaatgctagttatccacccgaaacaattgcacatttaatcaattacgatacracacatggaaaatataatctaaaagtwgaaccgattgaaaatggattgcaagttggwgatcayaaaattaaattggttgctgatcgcaatcctgaaaacttgccatggaaagaattagatatcgatattgctatagatgcaactggtaaatttaatcatggtgataaagccatcgcacatattaaagcaggtgccaaaaaagtwttgttaactggtccttcaaaaggtggacatgttcaaatggtagttaaaggcgtaaatgatraccaattagatatagaagcatttgacatttttagtaatgcttcatgtactactaattgcattggtccagttgcaaaagttttaaataatcagtttggaatagttaatggtttaatgactactgttcacgctattacaaatgaccaaaaaaatattgataatccacataaagayttaagacgtgcacgytcatgtaatgaaagcattattcctacttctactggtgcggcgaaagctttaaaagaagtattaccagaattagaaggtaaattacacggcatggcattacgtgtaccaacaaagaatgtatcgctcgttgatttagttgttgatttagaaaaagaagtaactgcagaagaagtaaaccaagcttttgaaaatgcaggtttagaaggtatcatwgaagtcgaacatcaaccactagtgtctgttgattttaatactaatccamattcagctattattgatgcaaaatcaacaatggtyatgtcrgggaataaagtaaaagttattgcttggtatgataatgaatggggttattcaaatagagttgtagatgtygctgagcaaattggagcacttttgacatcaaaagaaactgtaagtgcaagttaa

SEQ ID NO: 2115 - DNA, 1191 bp, Staphylococcus aureus
atggctaaaaaaattgtttctgatttagatcttaaaggtaaaacagtcctagtacgtgctgattttaacgtacctttaaaagacggtgaaattactaatgacaaccgtatcgttcaagctttacctacaattcaatacatcatcgaacaaggtggtaaaatcgtactattttcacatttaggtaaagtraaagaagaaagtgataaagcaaaattaactttacgtccagttgctgaagacttatctaagaaattagataaagaagttgttttcgtaccagaaacacgyggcgaaaaacttgaagcwgctattaaagaccttaaagaaggmgacgtattattagttgaaaatacacgttatgaagatttagacggtaaaaaagaatctaaaaatgatccagaattaggtaaatactgggcatctttaggtgatgtgtttgtaaatgatgcttttggtactgcgcatcgtgagcatgcatctaatgttggtatttctacacayttagaaactgcagctggattcttaatggataaagaaattaagtttatyggyggcgtagttaacgatccacataaaccagttgttgctattttaggtggagcaaaagtatctgacaaaattaatgtcatcaaaaacttagttaacathgcygataaaattatcatcggcggaggtatggcttatactttcttaaaagcgcaaggtaaagaaattggtatttcattattagaagaagataaaatcgacttcgcaaaagatttattagaaaaacatggtgataaaattgtattaccagtagacactaaagttgctaaagaattttctaatgatgccaaaatyactgtagtaccatctgattcaattccagcagaccaagaaggtatggatattggaccaaacactgtaaaattatttgcagatgaattagaaggtgcgcacactgttgtatggaatggacctatgggtgtattcgagttcagtaactttgcacaaggtacaattggtgtatgtaaagcaattgcaaaccttaaagatgcaattacgattatcggtggcggtgattcagctgcagcagcaatytctttaggttttgaaaatgacttcactcatatttcaactggtggcggmgcgtcattagagtacytagaaggtaaagaattgcctggtatcaaagcaatcaataataaataa

SEQ ID NO: 2116 - DNA, 624 bp, Staphylococcus aureus
atgccgaaagttattggtctaacaggtggaatcgcctcaggaaaatcaacagtatcagaactcttatccgtattcggttttaaagtagtagatgctgataaagcagccagggaagctgttaaaaaggggagtaaaggtttagctcaagtacgagaagtctttggtgatgaagcaattgatgaaaatggtgagatgaatcgtcgttatatgggtgatytagtgtttaaycatccagaaaaacgcttagaattaaatgctatcatacatcctatcgtgcgagatattatggaagaagaaaagcaagaatatttaaaacaaggatataatgtaatcatggatattccattattatttgaaaatgaattggaaaatrcagtagacgaagtgtgggttgtatacacttctgaaagtatacaaatggatcgtttaatgcaacgtaataatytgtcattagaagatgcraaagcwcgtgtctatagccaaatttctattgataaaaaaagccgaatggccgatcatgttatcgataatttaggggataaacttgaattaaaacaaaaccttgagagattgttagaagaagaaggttatattgaaaagccgaattacggagaagragattaa

SEQ ID NO: 2117 - DNA, 762 bp, Staphylococcus aureus
atgagaacaccaattatagctggtaactggaaaatgaacaaaacagtacaagaagcaaaagacttcgtcaatrcattrccaacaytaccagattcaaaagaagtagaatcagtaatttgtgcaccagcaattcaattagatgcattaactactgcagttaaagaaggaaaagcacaaggtttagaaatcggtgctcaaaatacgtatttcgaagataayggtgcgttcacaggtgaaacgtctccagttgcattagcagatttaggcgttaaatacgttgttatcggtcattctgaacgtcgtgaattattccacgaaacagatraagaaattaacaaaaaagcgcaygctattttcaaayatggwatgacwccaattatwtgtgttggtgaaacagacgaagagcgtgaaagtggtaaagctaacgatgttgtaggtgagcaagttaagaaagctgttgcaggtttatctgwarakcaactwaaatcagttrtaattgcttaygarccaatytgggcaatcggaactggtaaatcatcaacatctgaagatrcraatgaaatgtgtgcatttgtacgtcaaactattgctgrcttatcaagcaaagaagtatcagaagyaactcgtattcaatatggtggtagtgttaaacctaacaacattaaagaatacatggcacaaactgatattgatggggcattagtaggtggcgcatcacttaaagttgaagatttcgtacaattgttagaaggtgcaaaataa

SEQ ID NO: 2118 - DNA, 873 bp, Staphylococcus aureus
rtgcccgaattaccagaagtagaacatgtaaaaagaggaattgaaccctacgttataaatcaraaaattgaacacgttatattttcggataaagtaatcgaaggtaaagctcaaggcaaggaaacaattataaaaggaattgaattagatacttttaaaactttatcggaaggctataccattacwaatgtagaacgaagaagtaaatatatcgtttttcarctagataataaacgagaacaacgtacattaattagycatttaggtatggcgggyggttttttcattgtagatgaacttgaagatattatgatacctaattatcgtaagcattggcatgttatttttgagytgtcaaatgacaaaaagttaatttattcagatatacgtcgttttggagaaattagaaatgttgcgtctgtagcatcttatccttcatttytrgaaatagcgcctgaaccttttwcaaatgaagcattgacgtattatttaaatcgaattcatcaacagtctaataagaataaaccaatcaaacaagtgattttggatcataaagtaatcgcaggttgyggaaatatttacgcatgtgaagcgttgtttcgtgcaggtgttttaccagataaaaaagtaaaagacttaacacaccaacaacaagaaatggttttttattatgttagagaagtactagaagaaggtattaaryatggcggtacaagtatttcagattatcgtcatgctgatggaaaaactggtgagatgcaattgcayctyaatgtatataagcagccggtatgcaaagtgtgtggaagtcaaattgaaacaaaaatcatcgcgacaagaaatagtcattattgtccagtatgtcaaaaataa

SEQ ID NO: 2119 - DNA, 1518 bp, Staphylococcus aureus
atggctaagaaaccaactgcgttaattattttagatggttttgcgaaccgcgaaagcgaacatggtaatgcggtaaaattagcaaacaagcctaattttgatcgttattacaacaaatatccaacgactcaaatcgaagcgagtggcttagatgttggactacctgaaggacaaatgggtaactcagaagttggtcatatgaatatcggtgcaggacgtatcgtttatcaaagtttaactcgaatcaataaatcaattgaagacggtgatttctttgaaaatgatgttttaaataatgcaattgcacacgtgaattcacatgattcagcgttacacatctttggtttattgtctgacggtggtgtrcacagtcattacaaacatttatttgctttgttagaacttgctaaaaaacaaggtgttgaaaaagtttacgtacacgcatttttagatggycgtgacgtagatcaaaaatccgctttgaaatacatcgaagagactgaagctaaattcaatgaattaggyattggtcaatttgcatctgtgtctggycgttattatgcaatggaycgtgacaaacgttgggaacgtgaagaaaaagcttacaatgctattcgtaaytttgatgccccaacttatgcaactgccaaagaaggtgtrgaagcaagytataatgarggcttaactgacgaattcgtagtaccattcatcgttgagratcaaaatgacggtgttaatgatggagatrcagtgatcttctataatttccgacctgatagagcrgcrcaattatcggaaatttttgcgaacagagcattcgaaggmtttaaagttgaacaagttaaagacttattctatgcaacattcactaagtataaygacaatatcgatgcggctatcgtyttcgaaaaagtygatttaaataatacaatyggtgaaattgcacaaaataacaatttaacwcaattacgtattgcagaaactgaaaaataycctcacgttacttactttatgagtggtggacgtaaygaggaatttaaaggtgaacgycgtcgtttrattgattcacctaaagttgcaacgtatgacttgaaaccagaaatgagtgcttatgaagttaaagatgcattattagaagagttaaataaaggtgacttggacttaattattttaaactttgctaaccctgatatggttggacatagtggtatgcttgagccgacaatcaaagcaatcgaagcggttgatgaatgtttagghgaagtsgttgataagattttagacatggacggttatgcaattattactgctgaccatggtaactctgatcaagtattgacggatgatgatcaaccaatgackacgcatacaacgaacccagtaccagtgattgtaacaaaagaaggcgttacacttmgagaaactggtcgyttaggtgacttagcacctacattattagatttattaaatgtagaacaacctgaagayatgacaggtgaatctttaattaaacactaa

SEQ ID NO: 2120 - DNA, 2631 bp, Staphylococcus aureus
gtgaataaattagtattaatcgatggtaatagcttaagttttagagctttttatgcattacctttgttatcaaacaaagcaggcattcataccaatgcagtatatggttttgcaatgttactagagaagattttaaaagaagaaaagccaaatcattttttagtagcgtttgatgcaggtaaaacractttcagacatgaaaaatatagtgaatataaaggtggacgccagaaaacgccgcctgaactaagtgagcaatttccttatatwcgccaattattagatgcttatcatattaaacgttatgaattagataactatgaggcagatgatattatcggaactttaagtaaagaagcagataaagcgggmtttcagacaattattatwacgggagaccgagatttaacacaacttgcaacggataatgtaaccatttattacactaaaaaaggtgttactgatgttgatcattatacacctgactttattgckgaaaaatacaacgggttaacacctaatcaaattattgatatgaarggattaatgggagatacttctgataatataccaggtgttgcaggtgttggagagaaaacagcaataaaattgctraaccaatttgacacagtagaaggtgtytatgaacatttagatgaaatttcaggtaaaaagttaaaagaaaaacttcaaaayagcaaagaaratgcattaatgagtaaagaattagcaacgattaatgtagatagtccgattgaagtaaaacttgaagatacgttaatgactcatcaagatgaacaacaagaaaaaatcgaattgtttaagaagttagaattcaaacaattgttgkctgacattgatcaatcagcaagygktgaagatgcaatagaaaagacatttgaaattgaaacgtcttttgataatrttgattttacttcattgaaagaagcgrccatccatttcgaattagacggtggyaactatttgcgaaataatattttaaaattctctttatttacaggtgagaaacatattgtaattaatgcggatgacataawtaattatgyygaactagtttcatggttagaaaatccgaatwcgaaaaaagtcgtatatgatgctaaaaaaacatatgtagcatcacatagattgggrattgatattcaaaatatttcwttcgatattatgttggccagttatataattgatccatctcgtacgattagtgatgttcaatcagttgtttcattgtacggtcaaagttttgtgaaagacgatgtragtatatatggaaaaggtaagaaatttaaggtacctgaagatgatgttttaaatccatatgttgcttctattactgatgcaatttactttgcgaaaccaaatatggataaacaattagaagaatacaatcaggtagaactcttrgctgatttagagctaccgctagctaagattttaagtgaaatggaagaaattggtatatwtacagatgttcatgatttagaagaaatggaaaaagaaattcaagaaaaattagacgtcttgattcgaaatatccatgatgcagctggtgaagattttaatataaattctcctaarcaattaggtgttgtattgtttgagacattacaattacctgttattaaaaagacgaaaacaggatattctactgctgtagatgtcttagagcaattgcaaggtgaacatcctatcattgattatattttagaatatcgtcaattatctaagttrcagtctacttatgttgaaggattgcaaaaggtaattagtgatgatcaacgtatccatacacgttttaaycaaactttagcgcaaactggacgtttatcaagtgtagatcctaatttacaaaatattccggttagacttgaagaagggcgtaaaataagaaaagcctttaaaccaacttcaaaagatagcgttatattatcagcagattattctcaaattgaattgcgygtattagcacacattacacaagatgagagtatgaaagaagcatttatcaacggcgatgatattcatacagcaactgctatgaaagtatttggtgtagargctgatcaagtcgatagtttaatgcgtcgtcaagcaaaagcrgttaactttggaattgtttatgggataagtgattatggtttaagtcaaagtttaggtattactcgtaaaaaagcaaaagcattcattgatgattatttagctagtttcccaggtgtraaacaatatatgtctgatattgtaaaagatgccaaagctttaggttwcgtggaaacattgctacatcgtcgacgctatattcctgatattacgagtcgtaactttaatttacgyggctttgctgaacgtactgctatgaatacgccaatacarggcagtgctgcagatatcattaaactggcaatggttaaatttgcdcaaaaaatgaaagagacaacatatcaagctaaactattattacaagtacacgatgaattaatttttgaagtacctaagtcagaagtagattcatttagtgaatttgtagaagagataatggaaaatgcattgcaattagatgttccattaaaagtagactcaagttatggtgcaacytggtatgatgcaaaataa

SEQ ID NO: 2121 - DNA, 1305 bp, Staphylococcus aureus
atgccaattattacagatgtttacgctcgcgaagtcttagactctcgtggtaacccaactgttgaagtagaagtattaactgaaagtggcgcatttggtcgtgcattagtaccatcaggtgcttcaactggtgaacacgaagctgttgaattacgtgatggagayaaatcacgttatttaggtaaaggtgttactaaagcagttgaaaacgttaatgaaatcatcgcaccagaaattattgaaggtgaattttcagtattagatcaagtatctattgataaaatgatgatcgcattagacggtactccaaacaaaggtaaattaggtgcaaatgctattttaggtgtatctatygcagtagcacgtgcagcagctgacttattaggtcaaccactttacaaatatttaggtggatttaatggtaagcagttaccagtaccaatgatgaacatcgttaatggtggttctcactcagatgctccaattgcattccaagaattcatgattttacctgtaggtgctacaacgttcaaagaatcattacgttggggtactgaaattttccacaacttaaaatcaattttaagcmaacgtggtttagaaactgcmgtaggtgacgaaggtggtttcgctcctaaatttgaaggtactgaagatgctgttgaaacaattatccaagcaatcgaagcagctggttacaaaccaggtgaagaagtattcttaggatttgactgtgcatcatcagaattctatgaaaatggtgtatatgactacagtaagttcgaaggcgaacacggtgcaaaacgtacagctgcagaacaagttgactacttagaacaattagtagacaaatatcctatcattacaattgaagacggtatggacgaaaacgactgggatggttggaaacaacttacagaacgtatcggtgaccgtgtacaattagtaggtgacgatttattcgtaacaaacactgaaattttagcaaaaggtattgaaaacggaattggtaactcaatcttaattaaagttaaccaaatcggtacattaactgaaacatttgatgcaatcgaaatggctcaaaaagctggttacacagcagtagtttctcaccgttcaggtgaaacagaagatacaacaattgctgatatygctgttgctacaaacgctggtcaaattaaaactggttcattatcacgtactgaccgtattgctaaatacaatcaattattacgtatcgaagatgaattatttgaaactgctaaatatgacggtatcaaatcattctataacttagataaataa

SEQ ID NO: 2122 - DNA, 1488 bp, Staphylococcus aureus
gtgaaaacaattcaattacacaagacaactttgatattaattgcgatattattgttttatacttttatgggtatcttactaccamtcatgcacgatgatttacaatggtttagcaattataatactgatattttaaaagtaggatttgcatcacttaatggtcgctatatcggaaatatctttgaaattatagctgtacatgtaagctggttacgttggctttcatatggyctcattagtatgggyatcatttggatgattatgcacattacacgttgtaaagcgtggacaagctattatttgttagcattttctttratgttaattttaccaagtgctatttatgcagatacatatggctggtttgcaggattttataattatgcgacatcaacactaatttcactctttatyatttattattgtattaatgcaattatatataaagaaaagcarccggtaagtgttacwgtactattctatgttttawgcttcttcggtcaattatttatggagaatgtgacattattccactgtatcattttaattttagcttttctrtatgaatttactgcaaatcgaacacttaattataaattattgttttcatttatgattgctactataggtacaatcattatgttttccaatccaaattatcgcaaaattttatttgaaggatcagaatatcaacaagtttcwaataatcaaggtatcttttcaaaatttgcagaaatgatatcracrtcacttccatatggtgtcattttcagtcagrttataattttaagtatgattgcagcgcttattatttatctactgcttagaagtgatcggtatktacatttaacaatattaaagcgtcgtatcattatgataggatttatcactttaccgctttattatttactattttacaatcagtttttattaaataaaaatacagatattggattggttggttttgygaacrtaattgtatgtggttactttgcgttttcgatatttgtaggtatttatttgtctattaatgatcgtaaaacacaaatyactttatattccttacttattkcaatatgtgtttcggcgtcgacactagtcattgttactccaatwgaaccaggtaattttttgattgtttatacgatacatgtaatcattttaattattttattaaaagaatttcggaaatataagtcaatcaatgttaattttattaaaggtgcatcactagttttagctgtgatatatcttagtgcatttatttatgttcattatgaacatgaaaaaagagttcagttattaaaacaacaaattaaagatcatccacgacaagaggtttatacagtggaatcattgccgtttgaacattatatgcatcatccgtcaccaatcaataaaaattaccaagagtggtttaataattatgaagaattaccgaaaatgaccaaagttaaatatattccatttggttcwgacgattcataa

SEQ ID NO: 2123 - DNA, 459 bp, Staphylococcus aureus
atggctgatagaacgaataaagaaattaaaacaggacgctttattgcaactgcatcaatcgyattctcaatattrttgattattcattactttgtttcgttggataatgcgactgccaaagcattactyaatttaacgaatcaaaacacttcagataaagcgatwgattacattttaaacagctttagattcactggtattatgtatattttggcttatctagcaggcttcatcactttttggaatcgacatacttatgtgtggtggtttatgtttgcagtttatgtatcaaatagtttgtttacgttgattaatttatcaatcacaattcaagcaataaaagctgcacacggtgcgtacttaacattgccaattttaatygttattataggttcggttgcattagcgatttatatgcttgttgtttctatcaaacgtaaaagtacatttaatcgctag

SEQ ID NO: 2124 - DNA, 1662 bp, Staphylococcus aureus
atgaagtttcaccaccgcttaatgttattgataagcagtatattaattatcagttttgttacattaggcattattattcacgcttccatcacatatgttttatcagaaaaacacgaacaagctctagcaacagatgcaagatcatatatttatttagtccaagataatgagattgataaagttaaaraaattgtaaaacagcaaaatatwgatttattgataactaarmatgataaaaaggtgtttagtagtggcaaactgaaasctatcymaaawaktgatarytayaktcaaaaaarggacktttttatttttaataagaaggttaacggttatcatgtatggattaaaggttacaataacgatattacagaaatgcattggacgttgtggaaatatcttatwttgacatgtttagttgtactyatttgtctgtattttgcaagccgtagttttaagcgtacwttaatccgtcccattcaagaagttacttatgcaacacaattgttggcaaatggttattatcacatacgtgtacctgaaagtaatgttgtagaaackaaagcgctttttgtgtctaccaatgatttagcacgacgccttcaaaagcttaataatgagcaaaaaattcaatccaaccgtttaaaaacaacgattgaaaatattccaagtgctattttaatgatagatcgaaatggaaaaatcgttgttgcaaataaagcgtattatgaacagttcaacatctcgcataatattgaacaagtaggctatcacggytatgttaatactgaaattgagcaattaattttagaaagttttaaagttgaaaaacctatytatgaacaattggaagttgcaataaaccaagtccatgccaagtactttgatatttcwtgygttccgattttaactagrtctcaaaaaagtttgcaagggattttagttgtgatgcatgayataacaaatctgaaacaacttgaaaatctaagacgtgartttgtagcaaatgtttcacatgaattaaaaacacctattacttcaattaaggggtttgctgaaacrcttattgatggtgcaaaaaatgatgcggaatcattagacatgtttttraacataattttaaaagaatcaaatcgaatagaatctttagtaacagatctgttagatttatcgcatattgagcaacatacmgagttagatacagactatatgaatttatcagatttaacgcggcgtattattgataatatgatgactcaagccaatcaaaaaaatatttccattcatactgawattgaaaaagatgtcattgttaaagcacaagaaagtaaaattgctcaagttatcacgaatttgttaacgaatgcaattaactattcttatgaagatggagatattaacgttcgtgtgtatcgagatgactttcgtgtcattttcgaagtacaagattttggtataggtattaaattagaagaccaacaacgtatttttgaaagattttatagagtagataaagcacgaagtagagattctggtgggacaggtcttggattatcaattacaaagcatatagtagaggcccaccaaggcaatattgaagtgaatagtcaagttggcaaaggctcaacgttcaaagttattctaaaagattataaagaataa

SEQ ID NO: 2125 - DNA, 276 bp, Staphylococcus aureus
atgatatactacttgtcgtatataaggaacggaggacaatttatgcatacatttttaatcgtattattaatcattgattgtattgcattaataactgttgtactactccaagaaggtaaaagcagtggaytttcaggtgccatcagtggtggtgctgagcagttattcggtaaacaaaaacaacgtggcgtcgatttattcttaaatagattaacaattattttatcaatattattttttgtacttatgatttgcataagttatcttggtatgtaa

SEQ ID NO: 2126 - DNA, 705 bp, Staphylococcus aureus
atgtcgcaaaaagtgttggtagtagatgacgaacattcaatcgtaacattacttaaatataacttagaaacagctggttatgaagttgttgtcgcatttgatggtgatgaggctttagaraaggtagaaartgaacagccagatttaattattttagatgttatgctacctaaaaaagatggcattgacgtatgtaagactgtaagaacaaataaaaatttagtccctatattaatgttamcggcgaaaaatgatgartttgatcgggtattaggtttagaattaggtgccgatgactatatgactaagcctttttcacctagagaagttgttgcccgtgtgaaagccattttaagacgttctcaatttgtaaaagaagtagaagagrttgaygatgatattaccatcggatcgatacgtattagacccgattattttgaagtatataagcataatgagytattggagctaacaccgaaagaatttgaactsttgctttatttgatagaaagacaaggcagagtcattacgagagarcatatgttaaatacggtatggaattatgaatttgcaggagactcaagaattgtygatgtacatatcagtcatttaagagataaattagaagataatcctaagaarccacaacttattaaaactgtgcgtggcttaggctataaattggaaagacctaaagaayaatga

SEQ ID NO: 2127 - DNA, 1269 bp, Staphylococcus aureus
atgactgcagaaaaaattactcaaggaactgaaggattaaacgtacctaatgarccaattatcccatttattatcggtgatggaattggaccggatatttggaaggcagcaagccgagttatagatgctgctgttgagaaagcctataatggcgaaaaacgcattgaatggaaagaagtgctagctggycaaaaagcatttgatacaactggygaatggttacctcaagaaacacttgatacaattaaagaatatttaattgctgttaaaggacctttaacaacaccaattggtggtggtattagatcattaaatgtrgctttacgccaagaattagatttatttacttgyttaagaccggtacgttggtttaaaggagtaccatcacctgttaaacgtccacaagatgttgatatggttattttccgtgaaaatactgaagacatttatgctggtattgaatttaaagaaggwacaacagaagttaaaaaggtaattgayttcttacaaaacgaaatgggtgcgacaaayattcgattcccagaaacttcaggtattggtattaarccagtttctaaagaaggwactgagcgattagttagagcagcwatwcaatatgctatcgataataaccgtaaatcagttactttagttcataaaggtaatattatgaaatttacagaaggctcatttaagcagtggggttacgatttagcattawctgaatttggtgatcaagtattyacttggcaacaatatgacgaaattgttgaaaawgaaggcagagatgctgctaatgytgcwcaagaaaaagctgaaaaagaaggcaagattatcattaaagattctattgctgacattttcttacaacaaattttaactcgtccagctgagcatgatgttgtagcaactatgaacttgaatggtgactayatttcagatgcwttagctgcacaagttggtggtattggtattgcgccaggtgcaaacattaattatgaaacaggkcatgctatttttgaagcaacacatggtacagctccaaaatatgcaggtttaaataaagtgaatccatcttcagtaattttaagttctgtattaatgttagaacatttaggatggcaagaagcggcagataagattacagattcaattgaagatacaattgcttcaaaagttgttacttatgactttgcccgtttaatggatggtgctgaagaagtttctacatcagcatttgcagatgaattgattaaaaatttaaaataa

SEQ ID NO: 2128 - DNA, 2373 bp, Staphylococcus aureus
atgaatttaaagcaatcwatagaagagattattaatcaacctgaatatgaacctatgtcagtktcagattttcaagatgcattaggtttaagyagtgccgactcrtttagagatttaattaaggtgctygtrgarttagaacaatcaggattaatygaacgtwcraaaacagayagataycaaaaaaagcatagttmharaggtcawtcraaattgataaarggaacgttaagtcaaaayaaraaaggytttgcwttcytaagacctraagatgaggatatggaagatatatttattcccccracraaaattaatcgtgccttrgayggagatactgtwattgtagaaatmcatcaatcwaaaggtgaacataaaggtaaaatygaaggggaagttaagtcgattgagaagcattcwgtaactcaagttgttggtacgtatagtgaagctagacatttyggmtttgttattccrgatgataaacgtattatgcaagatattttcattcctaaaggwcaaagtttaggygcagtmgatggkcataaggtactwgtwcaaattactaartatgctgatggttcagataatccwgaaggrcatatttcwgcwatwttaggacataaaaatgatccwggygtagatattttatctattatytatcaacatggyatwgaaattgartttcctgatgaagtrttasaagaagctgaagcagtacctgatcatattgaaaatactgaaattaaaggccgtcatgatttacgtgatgaattgacaatcacaattgatggtgckgatgctaaagacttagatgacgcaatyagtgttaaaaagttagcgaacggtmatacgcarttractgtaagtattgctgatgtcagytattatgtaacdgaagrttcwgcwttrgataaagargcwtatgatagagcgacaagtgtatatcttgttgaccgtgtrattccratgattccacatcgattaagyaatggtatttgttcattraatcctmaygttgatcgtttaackytaagctgtcgcatggaaatygatgcwagtggtcgygttgttaaacatgaaatttttgatagtgttatacattctgattatcgaatgacgtatgatgcrgtwaaycagattattactgaaaaggatcctaacattcgcgarcaatataawgaaattacgcctatgytagatttagcacaagatttatctaatcgtttgattcaaatgagaaaacgwcgtggtgaaatygattttgatattarygaagcraaagtaytagttaacgaagwyggtataccwacagatgttcaattragacaacgtggygarggygaacgtctwattgartcatttatgttaattgcaaatgaaacagttgctgaacattttagtaagttaratgtaccwtttatttaccgagtgcatgagcaacctaaatcagatcgcttaagacaattctttgattttattacwaactttggcatyatgattaargghacwggcgaagatattcatccaacaacacttcaaaaggtycaagaagaagtagaaggtcgacctgaacaaatggtcatttcaacaatgatgttrcgttcaatgcaacaagcgcattatgatgatgtgaacttgggacattttggcttatcagctgaatattatacgcattttacatcaccaatwagacgttatcctgatttaacagttcatcgtttaatccgtaagtatttaattgagaaatcaatggataacaaagaagtgaagcgttgggaagacaaattgcctgagttagctgaacatacttctaaacgtgaacgtcgtgctattgagkcagaacgtgatactgatgaattgaaaaaagcagaatatatgattcaacatattggtgatgaatttgaaggtattgtcarstcartarctaactycggtatgtycattgaattgccaaatacgatagaaggtatggttcatattgcgaatatgactgatgattattaccgttttgaagagcgtcaaatggcattaattggtgagcgtcaagctaaagtatttagaattggtgacacagttaaggttaaagtgacgcatgttgatgtagatgaacgattaattgattttcaaattgtwggwatgcctttacckaaaaatgaycgmtcacagcgmccagcrmgaggtaaracrattcaagcyaaaacgcgtggyaaatcwttagataaatcraaatctgatgataarggwcrtaagaaaaarggtarkcaacgtaaaggtaaaaaysaacgyaawaatgayaaatcaggwaayagtaarcataagccattttataaagataaaagtgtgaaaaagaaagcacgtcgtaagaaaaaataa

SEQ ID NO: 2129 - DNA, 1122 bp, Staphylococcus aureus
atggcagaattacaaagaggtttagaaggggttatcgcagcggagactaaaataagttcaattattgaaagtcaattgacttatgccggctatgatattgatgatctagctgaaaatgcgcaatttgaagaagttattttcctattatggaactatagattgccaaaygaagaagagcttgctcatytaaargggaaattaaatcaatacatgacattaaatcctcgtgtgtatacacattttgaggagtatgttacagatcacgtgcatccaatgacagcattacgtacgtcattatcatatattgcacatttygatcctgatgctgaaaatgaatcagatgaaaatcgttatgaaagagcaatgcgtatacaggctaaagtagcatcattagttacagcgtttgctcgagtaagacaagataaagaaccamttaagcctaatcctgacttaagttatgcrgcaaacttcctatatatgttacgtggggaattaccaacagatatagaagtrgaagccttcaataaagcrcttattttacacgctgatcatgagttgaacgcatctgcatttacrgcacgttgtgcggtatcwtcattgtcagatatgtactcaggtattgtagcagcygtaggttctctgaaagggccattacatggtggtgcaaaygaacaagttatgacgatgttatctgagattgggtcaattgaaaatgttgatgcttacttagatgaaaaatttgctaataaagataaagtaatgggcttyggtcatcgtgtatataaagatggtgatcctagagcgaaatatttaagagaaatgagccgtcaaattacgaaagacgctggtcgtgaagaattatttgaaatgtcagtgaaaatggaaaaacgyatggcagaagaaaaaggattaattccwaatgttgatttttatagtgcgagtgtttatcactgtatggaaatacctcatgacttattcacgccaatctttgctgtaagtcgttctgcaggatggattgctcatattttagaacaatataaagataatagaattatgcgtcctagagcraaatatattggcgaaacgaatcgtaagtatatyccgcttgaagaaagaaaataa

SEQ ID NO: 2130 - DNA, 981 bp, Staphylococcus aureus
ttgattgaaaaaagtcaagcatgtcacgattcattgttagattctgtagggcaaacacctatggttcaacttcatcaactatttccgaaacatgaagtgtttgcaaagttagagtatatgaatcctggaggcagcatgaaagatcgacctgccaagtacatcattgaacatggtattaaacatggtttaatcactgagaatacacatttaattgaaagtacttctggtaatttaggcattgcgttggcaatgatagctaaaatcaagggattaaaactcacgtgtgttgttgatcctaaaatatcaccaacaaatttgaaaattattaaaagttatggtgccaatgtagaaatggttgaagaacctgatgcacatgggggttatttaatgactcgtattgcaaaggtgcaagaactgttagccactattgacgatgcatattggattaatcaatatgcgaatgagttaaattggcaatcccattatcatggtgcaggcacagagattgttgaaacaattaagcaacctatagattattttgtcgcgccagtcagcacgacaggtagcattatgggtatgagtagaaaaatwaaagaagkkcatccaaacgcacaaattgttgctgttgatgcgaaagggtcagtcatttttggtgacaaacctattaatagagaattacctggtatcggtgctagtcgtgtacccgaaatattgaatagatcagaaattaatcaagtgatccatgtagatgattatcaatctgctttgggctgtcgaaaactgattgattatgaaggyatatttgcyggaggttcaacaggytcgattattgcagcgattgagcagttgataacgtcaattgaagaaggtgcaacaattgtcacgattttaccagatcgaggcgatcgttacttagatttagtttattcagatacatggttagaaaaaatgaaatcaagacaaggagttaaatcagaatga

SEQ ID NO: 2131 - DNA, 2262 bp, Staphylococcus aureus
atgacaattaataaagtaaccgttcttggcgcaggcacratgggcgctcaactggcagcactytttgtgaatgctggacttaaagtaaaactattagatattgtagtggacaaaaacgatccaaatctcattgcgaaaaaatcttacgataaaattacagataagaaacgrccgctactattcgacttaaatctagygagtcatttaacatatggtaattttgatgatgacttggtaaatgatgatgctgatttatatatcgaagcagtyaaagaagatattgaaattaagcatgctgtttggcaacwagttctacaacatgctaaagaagatgctttattygctacaaatacatcaggtattccaattaatgcgattgctcaarcatttaacgagaaggatcaagaacgattctttggtctacatttctttaacccaccacgtattatgaaattagtggagttaatacctacgtcacacacgaaggaatctatyatattagatgtaaaaaatttcgcgcaaaatgtrttaggtaaaggtgtcattgtygtcaatgatgtgcctggctttgtcgcaaatagagtcggcacgcaaacaatgaatgatattatgtatcgcgccgagcaacacaagwtaagcattgtagatgtggatgctttaactgggcaagcgattggtcgtcctaaaacaggtacatatgcsctatcygacctagtcggtttagatattgcagtgtctgtaattaaaggcatgcaacaagtacctgaagaaacrccttattttcatgatgtcaaaattgtaaatacgttgtwtgamaatggcgcactcggacgtaaaacraaacaaggattttacaaaaaggataaagaaactaaagctcgacttgtttacgatgttgaaaaacaagattatgtacctgtatcgcaaccacaattaccaattttaaatgaatttaataaagacttagtgcataaccttgatrycatattcaatgcgcaagacgaagcgggactatttttatgggagacattacgtaataatttctattactctgctatcaatgtacctaaagctaccgatgatttccgagacatagaccgtgcgcttgtctgggggttcaactggaaacttggtccattccaattatgggatgcaatgggataygaacgtgttaaaacacgtatggaagacgaamttggagacttaccacaatggattagtgatttagayggtggcttttataaacaagatgagaccatygaatatgcaacrcctrtttctcacttcgtaaaagatgaactttgggataaaggtgatgccaaactttccgtaactcatratgatcaactgttactgaaattacaaagtaaaaataatgtcattaccgatgaattcaacgatgcgttagttgatgcsattgatttactggaaaatgamcattacacaagtatggtyatttatgcagatggtaayaatttcagtgtgggygctaaccttttcttaatgaaaaaggcgcatgaagacggtcttgtagatgatgtcgttgcacaatcaattgataaattacattatagctttaatcgtttgaagtatagtttgaaaccagtagtcacagctgttcaaggtcgtgccttaggcggtggytgtgagcttgtactttactcacctattgttgtcgctgcaagtgaaacdtatatmggtcttgttgaagcaggygttggcttattaccgagtggmggtggccttgcagaaatggctgatcgcatattacgcacatcgcataagtttgatgacaaacaagcttccatgacaaaagtactgacgaatatcgcatttgcgaaagtctctacaaatgcctttgaggcacgtcgttatggttatttacgtgatacagatacgattattttcaatacagcacaacgtgtcgaagttgcgctcaaacgtgcgaaatatgaagcagaaacaaactatattccgaatcctagacatcaatatatcgctttaggygaagacttcaaagcattgatccaaggacaattagatgcgcaaagacrsggkcattttattagcgaccatgattatcatatygccttaaatatcgccacaattttakcgggtggtgatttaccaagaaatacatttatmaatcaacgttacattcaatcgttggagaaaattggctttattgacttactaaaatctaaaaaatcatatgaaagaattgcrcatatgttaaaaactggtaagccattacgtaattaa

SEQ ID NO: 2132 - DNA, 465 bp, Staphylococcus aureus
atggctaagaagaaatcaccaggtacattagcggaaaatcgtaargcwagacatgattataatattgaagayacgattgaagcgggaatygtattrcaaggyacagaaataaaatcrattcgccgaggtagtgctaaccttaaagatagttaygcgcaagttaaaaacggtgaaatgtatttgaataatatgcatatagcaccatacgaagaagggaatcgttttaatcacgatcctcttcgttctcgaaaattattattgcayaarcgtgaaatcwttaaattrggtgawcaaacwcgwgarattggttattcgattgtgccrttaaagctttatttgaagcatggrcattgtaaagtattacttggtgtygcacgaggtaagaaaaaatatgataaacgtcaagctttgaaagaaaaagcagtcaaacgagatgttgcgcgcgatatgaaagcccgttattaa

SEQ ID NO: 2133 - DNA, 1758 bp, Staphylococcus aureus
atgagaaaaactaaaattgtatgtacaattggaccagcttcagaatcagaagaaatgattgagaaattaatcaatgctggtatgaacgttgcacgattaaacttttcacatggtagtcatgaagagcataaaggtagaattgatacaattcgtaaagtagctaaaagattagacaaaattgtagcaattttattagatacraaaggtccagaaattcgtacgcataatatgaaagacggtatcattgaacttgaacgtggyaacgaagttattgttagcatgaatgaagttgaaggaacacctgaaaagttctcwgtaacwtatgaaaacttaattaacgatgttcaagtaggttcatacattttacttgatgatggcttaattgaattacaagttaaagatattgaccatgctaaaaaagaagttaaatgtgatattttaaactctggtgagcttaaaaacaaaaaaggtgttaacttacctggygtaagagtwagtttacctggtattacagaaaaagatgctgaagatatccgtttcggtattaaagaaaatgttgacttcattgcagcaagtttcgtacgtcgtcctagtgatgttttagaaattcgtgaaattttagaagaacaaaaagctaacatttcagtattccctaaaattgaaaaccaagaaggtattgataatattgmggaaattcttgaagtgtctgatggtttaatggttgcacgtggtgacatgggtgttgaaatyccacctgaaaaagtaccaatggttcaaaaagatttaatcagacaatgtaacaaattaggtaaaccagttattacagctacacaaatgttagattctatgcaacgtaacccacgtgctacacgtgcagaagctagtgacgttgccaacgcaatctatgatggtacagatgcagtaatgttatctggtgaaactgctgctggtttatatcctgaagaagctgttaaaacaatgagaaatattgctgtatcagctgaagcagcccaagattayaaaaagttattgtcagatcgtactaaattagttgaaacttcattagtgaatgctatcggtatttcggttgcacatacagctttaaacttaaatgttaaagcaattgtagctgctactgaaagtggttcaacggcacgtactatctcyaaatatcgtccrcattcagacattattgcrgtgactccaagtgaagaaacwgcacgtcaatgttcaattgtttggggwgttcaacctgtagttaaaaaaggrcgtaagagtacagatgcattgttaaacaatgcagttgcaacagctgttgaaactggtagagtawctaatggtgatttaatcattattactgctggtgtaccaactggtgaaactggaactactaatatgatgaaaatccacctagttggtgacgaaattgctaatggtcaaggtattggacgtggatcagttgttggtactacgttagttgctgaaactgttaaagatttagaaggtaaagatttatctgacaaagttatcgttacwaactcaatcgatgaaacgtttgtaccttatgtagaaaaagckttaggmttaattacagaagaaaatggwattacatcaccaagtgcaattgttggtttagaaaaaggtattccaacagttgtaggtgtagaaaaagctgttaaaaacataagcaataacrtgttagttacgattgatgctgctcaaggtaaaatctttgaaggatatgcaaacgtactataa

SEQ ID NO: 2134 - DNA, 153 bp, Staphylococcus aureus
ttgatggttaaaaaattacttaaggctataaagcaaaactttttatatgagcagtcgaatataacgtttaaaatgattgtttttggatataaacgattaagtaaaatgctttttcagtttgaaattaatcatataaatttcttatgggarggt

SEQ ID NO: 2135 - DNA, 924 bp, Staphylococcus aureus
atgaatgctgccgtaagagcagttgttcgtacagcaatttacaatgaaattgaagtttatggtgtgtatcatggttaccaaggattgttaaatgatgatattcataaacttgaattaggatcagttggggatacgattcagcgtggaggtacattcttgtattcagcaagatgtccagagtttaaggagcaagaagtacgtaaagttgcaatcgaaaacttacgtaaaagagggattgagggccttgtagttattggtggtgacggtagttatcgcggtgcacaacgcatcagtgaggaatgyaaagaaattcaaactatcggtattcctggtacgattgacaatgatatcaatggtactgattttacaattggatttgacacagcwttaaatacgattattggcttagtcgacaaaattagagayactgcgtcaagtcacgcacgaacatttatcattgaagcaatgggccgtgattgtggagatctagcattatgggctggattatcagttggtgctgagacaattgtagttccagaagtgaaaacagatattaaagaaatagctgataaaattgaacaaggtattaaacgtggtaagaaacactcaatcgttcttgtagcagaaggttgyatgactgcgcaagattgtcaaaaagaattatcacaatwcatcaatgttgataatagagtgtctgtgttaggtcacgttcaacgtggtggtagcccaacaggtgcggatagagttttagcatcacgwttaggtggatatgcggtagacttattaatgcaaggtgaaacagctaarggtgttggaattaagaacaataaaattgtagcaacatcttttgatgaaatttttgatggtaaagatcataaatttgattatagtctatatgaacttgctaacaagttatctatataa

SEQ ID NO: 2136 - DNA, 522 bp, Staphylococcus aureus
atgattaayatyatttcagctataggatctattggaacatttattatggctttattttattttgtatcagtttcagttcaactttatcaaatgaaaattagctttctgccagctttaggttttaaccaaattttattagaaagggagrrggatcaacttaatataatgaattcsgcwacagaagagcatcatcataaagattatattaaactatataatttaggtggcggtgctgctaaaaaaattgcaatagaggttttattgggkaakgataaagtcattcagaaaaartacgtgmatattttacctagtaaagaagggtacatgttaycaattaataaaaatgtgtacgaagaattagaaagaacgattgagaayaatggtyatgaagctgatttgaatgtacgtatgacttattatcataatgtaagtcrcaaacaacaggaagttatattaaaaggtcaaatcgacygttttaatacttataataataaagaaatttatgatttgcagtttatctra

SEQ ID NO: 2137 - DNA, 945 bp, Staphylococcus aureus
atgttagattttgaaaaaccactttttgaaattcgaaataaaattgaatctttaaaagaatctcaagataaaaatgatgtggatttacaagaagaaattgacatgcttgaagcgtcattggaacgagaaactaaaaaaatatatacaaatctaaaaccatgggatcgtgtgcaaattgcgcgtttgcaagaaagacctacgacmctagattatattccatatatctttgattcgtttatggaactacatggtgatcgtaattttagagatgatccagcaatgattggtggtattggctttttaaatggtcgtgctgttacrgttattggacaacaacgtggaaaagatacaaaagataatatttatcgaaattttggtatggckcatccagaaggttatcgaaaagcaytacgtttaatgaaacaagctgaaaaattcaatcgtcctatctttacatttatagatacaaaaggtgcatatcctggtaaagctgckgaagaacgtggacaaagtgaatctatygcaacaaatttgattgagatggcttcaytaaaagtaccagttattgcgatwgtcattggtgaaggtggcagtggaggtgcyctaggtattggtattgccaataaagtattgatgttagagaatagtacytactctgttatatctcctgaaggtgcagcggcattattatggaaagacagtaatttggctaaaattgcagctgaaacaatgaaaattactgcccatgatattaagcaattaggtattatagatgatgtcatttctgaaccacttggcggtgcacataaagatrttgaacarcaagctttagctattaaatcagcgtttgttgmacarttagattcacttgagtcattatcacgtgatgaaattgctaatgatcgstttgaaaaattcagaaatatcggttcttatatagaataa

SEQ ID NO: 2138 - DNA, 531 bp, Staphylococcus aureus
atgcaaattagacaaatacatcaacatgactttgctcaagtkgaccagttaattagaacggcatttgaaaatagtgaacatggttatggtaatgaatcagarctagtagaccaaattcgtctaagtgatacgtatgacaatamcttagaawtagtagctgttcttcaaaaygaagttgtagggcacggtttactaagtgaagtttatcttgataacgrrgcacaacgggaaattggattagtgttagcacctgtatctgttgatattcatcatcaaaataaaggtattgggaagcgattgattcaagcattagaacgagaagcaatattaaaaggatataattttatcagtgtattaggatggccgamktattatgccaatctaggatatcaacgcgcaagtatgtacgacatttatccaccatatgatggtataccagaygaagcgtttttaattaaagaattaaaagtgaacagtttagcgggaaaaacaggtaccataaattacacatctgcttttgaaaaaatatga

SEQ ID NO: 2139 - DNA, 858 bp, Staphylococcus aureus
atgtttaaagatttttttaatcgaacaaagaaaaagaaatatcttacagtacaagactctaaaaataatgatgtgcctgcaggtattatgactaagtgtccaaagtgtaagaaaattatgtacacaaaagaattagctgaaaatttaaatgtgtgctttaattgtgatcatcatattgctttaactgcgtataaacgtatagaagcaatttctgatgaaggatcatttacagaattcgataagggaatgacctctgcgaatccattagattttccaagttatttagaaaaaattgaaaaggaccaacaaaagacaggtcttaaagaagcagtwgtgactggtacagcrcaactagatggtatgaaatttggcgttgctgtcatggattcacgttttagaatgggaagtatgggatcggttatyggtgaaaagatatgtcgcatcattgattactgcactgagaaccgtttaccatttatwcttttctctgcaagtggtggtgcacgtatgcaagaaggtattatttccttgatgcaaatgggtaaaaccagtgtatctttaaaacgtcattctgacgctggactattatatatatcatatttaacacatccaactactggtggtgtatctgcaagttttgcatcagttggtgatataaatytaagtgagccaaaagcrttgataggttttgcaggtcgtcgagttattgaacagacaataaacgaaaaattgccagatgatttccaaactgcagaatttttattagagcatggacaattggataaagttgtacatcgtaatratatgcgtcaaacattgtctgaaattctaaaaatccatcaagaggtgactaaataa

SEQ ID NO: 2140 - DNA, 1527 bp, Staphylococcus aureus
ttgaaaaataaattgctagttttatcattgggagcattatgtgtatcacaaatttgggaaagtaatcgtgcgagtgcagtggtttctggggagaagaatccatatgtatctgagtcgttgaaactgactaataataaaaataaatctagaacagtagaagagtataagaaaagcttggatgatttaatatggtcctttccaaacttagataatgaaagatttgataatcctgaatataaagaagctatgaaaaaatatcaacagagatttatggctgaagatgaggctttgaagaaattttttagtgaagagaaaaaaataaaaaatggaaatactgataatttagattatctaggattatctcatgaaagatatgaaagtgtatttaatactttgaaaaaacaaagtgaggagttcttaaaagaaattgaagatataaaaaaagataaccctgaattgaaagactttaatgaagaggagcaattaaagtgcgacttagaattaaacaaattagaaaatcagatattaatgttaggtaaaacattttatcaaaactatagagatgatgttgaaagtttatatagtaagttagatttaattatgggatataaagatgaagaaagagcaaataaaaaagcagttaacaaaaggatgttagaaaataaaaaagaagacttagaaaccataattgatgaattttttagtgatatagataaaacaagacctaataatattcctgttttagaagatgaaaaacaagaagagaaaaatcataaaaatatggctcaattaaaatctgacactgaagcagcaaaaagtgatgaatcaaaaagaagcaagagaagtaaaagaagtttaaatactcaaaatcacaaacctgcatctcaagaagtttctgaacaacaaaaagctgaatatgataaaagagcagaagaaagaaaagcgagatttttggataatcaaaaaattaagaaaacacctgtagtgtcattagaatatgattttgagcataaacaacgtattgacaacgaaaacgacaagaaacttgtggtttctgcaccaacaaagaaaccaacatcaccgactacatatactgaaacaacgacacaggtaccaatgcctacagttgagcgtcaaactcagcaacaaattatttataatgcaccaaaacaattggctggattaaatggtgaaagtcatgatttcacaacaacgcatcaatcaccaacaacttcaaatcacacgcataataatgttgttgaatttgaagaaacgtctgctttacctggtagaaaatcaggatcactggttggtataagtcaaattgattcttctcatctaactgaacgtgagaagcgtgtaattaagcgtgaacacgttagagaagctcaaaagttagttgataattataaagatacacatagttataaagaccgawtaaatgcacaacaaaaagtaaatactttaagtgaaggtcatcaaaaacgttttaataaacaaatcaataaagtatataatggcaaataa

SEQ ID NO: 2141 - DNA, 1230 bp, Staphylococcus aureus
atgtcattaagagatgaagcattggaaatgcacaaacgtaatcaaggtaaattagaagttaaaccaaatgtaaaagttactaataaagargaattaagtttagcatactcacctggcgttgctgaaccgtgtaaagatatwtatgaagayaaaagaaaagtatatgattacacaattaaaggaaatacagttgcagttattactgatggaacagcggtattaggtttaggtaacattggacctgaagcaagtattcctgtaatggaaggtaaagcagtattattcaaaagcttcgctggtatcaatggggtgcctattgcgttaaatacaactgataccgaagaaatcattaaaacagttaarttgttagaacctaattatggtggtattaatttagaggatatttcggcaccacgttgttttgaaattgaagaacgattgaaaaaagaaactaatattccggtattccatgacgatcaacatggtacagcaattgtaacawtggcaggtttggtaaatgcattgagagttgttaacaaagatattgctaaaataaaagttgtactaaatggtgctggtgcagcaggaatagccattgttaaattactatacgcgtatggtgtaagaaatatggttatgtgtgactcaagaggcgcaatttttgaaggacgttcatatggtatgaatcctacgaaagatgttgtagcwaartggacaaataaagayaagattgaagggtctytagaagaagtcgtaaaagacgcagatgtatttatyggrgtttctgtagctaatgcgctgtcacaagatatggttaagagtatggcagataatccaattatatttgcaatggctaatccaaatcctgaaataatacctgatgatgccaaagcrgcaggtgcacgmgttgttggtacaggacgttcagactatcctaaccaaattaataatgtattagctttccctggtatttttagaggtgcattagaggttgaagctacacatataaatgaagaaatgaaaaargcagctgtagaagcgattgctgatttaatygatagttctgaattaaatgaagactactgtatcccaggaccgtttgataaacgtgtagcgccatcagttgctcgtaatgttgctaaagcggcaatggaatctggagtagctaggattgaagttgatccgcaagatgtgtatgataaaacaatgaaacttacagatttacaataa

SEQ ID NO: 2142 - DNA, 1503 bp, Staphylococcus aureus
ttgaaaaataaattgctagttttatcattgggagcattatgtgtatcacaaatttgggaaagtaatcatgcgagtgcagtggtttctggggagaagaatccatatgtatcaaaagctttagaattgaaagataaaagtaataaatccaattcttacgaaaattatagagatagtttagaaagtttgatttcatcattatcttttgctgattatgaaaaatatgaagagccagaatatgaaaaggctgtaaaaaaatatcaacaaaaatttatggctgaagatgatgcattaaaaaattttttaaatgaagaaaagaagataaaaaatgcagatattagcagaaaatcgaataatttattaggtttaacacatgaaagatattcttatatttttgatacattaaagaaaaataaacaagagtttttaaaagatattgaagaaatacaactgaaaaatagtgatttaaaggactttaacaatacagagcaacataatgccgacgtagaaataaacaatttagaaaataaagtattaatggtagggtatacattctataatacaaataaggacgaagttgaagaattatatagtgagttagatttgattgttggagaagttcaagataagtcggataaaaaaagagcagtaaatcaaaggatgttaaatagaaaaaaagaggatttagaatttattatagataaattttttaaaaaaattcaacaagaacgtccagagagtataccagcattaactagtgaaaaaaatcataatcagactatggcattaaagttaaaagcagatacagaagctgctaaaaatgacgtatcaaaaagaagtaaaagaagtttaaatactcaaaataataaatctacaacacaagaaatttctgaagaacaaaaagctgaatatcaaagaaagtcagaggcattaaaagaaagatttataaacagacaaaaatctaaaaatgagtctgtggtttcactaatcgatgacgaagacgacaacgaaaacgacaggcaacttgtggtttctgcgccatcaaagaaaccaacaacaccgactacatatactgaaacaacgactcaggtaccaatgcctacagttgagcgtcaaactcagcaacaaatcgtttacaaaacaccaaaaccattagctggattaaatggtgaaagtcatgatttcacaacaacgcatcaatcaccaacaacttcaaatcatacgcataataatgttgttgaatttgaagaaacgtctgctttacctggtagaaaatcaggatcactggttggtataagtcaaattgattcttctcatctaactgaacgtgagaagcgtgtaatcaagcgtgaacacgttagagaagctcaaaagttagttgataattataaagatacacatagttataaagaccgattaaatgcacaacaaaaagtaaatactttaagtgaaggtcatcaaaaacgttttaataaacaaatcaataaagtatacaatggcaaataa

SEQ ID NO: 2143 - DNA, 321 bp, Staphylococcus aureus
ttgaaaaataaattgctagttttatcattgggagcattatgtgtatcacaaatttgggaaagcaatcgtgcgagtgcagtggtttctggggaggagaatccatataaatctgagtcattgaaattaaatgggaaaagaagtactacaataactagtgataaatatgaagaaaatttagatatgttaatatcgtcattatcatttgcagattatgaaaaatatgaggaaccagaatacaaagaagcagttaaaaagtatcaacaaaaatttatggctgaagatgatgcattaaaaaattttttagtgaagagaaaaaaataa

SEQ ID NO: 2144 - DNA, 3198 bp, Staphylococcus aureus
atggtggcatatttaaatattcatacggcttatgatttgttaaattcaagcttaaaaatagaagatgccgtaagacttgctgtgtctgaaaatgttgatgcacttgccataactgacaccaatgtattgtatggttttcctaaattttatgatrcatgtatwgcmaataayatwaarccgatttttggtatgacaatataygtgacaaatggattaaayamwrtygaaacmgttgttytagcwaaarataatkatggwytraargatttrtatcaactatcatcggaaataaaaatgaatkcawtrgaamatgtktcdtttgaaytattrmaacrrttttctawcaatwtgattatcatttttaaaaawgtygswgaysaacatcgtgayattgtwcragtktttgawwcscatrawgayacrtatwtrgaycaycdwagtrtttyrrttcarggtakaaarcaygtwtggattcaaratgtwtgttaycaaacacgwcawgatgcmgatacratttctgcaytmgcagckatwagagayaatrcaaaattagacttaatwcatgatcaagaagattttggtgcrcattttttaactgaaaakgaaattmahcaaytwgatrtkaaycmagaatatttmacrcargytgayrkkatagctcaaaagtgtratgcagaattaaaatatcatcaatctctacttcctcaatatsagacacctaaygatgaatcagctaaaaaatatttgtggcgtgtcttagttacacaattgaaaaaattagaacttaattatgacgtctatttagagcgattgaaatatgagtataaagttattactaatatgggttttgaagattatttcttaatagtaagtgatttaatccattatgcgaaaacgaatgatgtgatggtaggwccwggtcgtggttcwtcwgcwggstcwctggtcagttatttaytrggwattacaacgattgatcckattaaattcaatctattatttgaacgttttttaaacccagaacgtgtaacaatgcctgatatwgatattgactttgaagatacacgccgagaaarggtyattcagtacgtccaagaaaaatatggcgagctacatgtatctggaattgtgactttcggtcatctgcttgcaagagcrgttgctagrgatgttggamgaattatggggtttgatgaagttacattaaatgaaatttcaagtttaatcccacataaattaggaattacacttgatgaagcatatcaaattgacgattttaaarartttgtacatcgaaaccatcgacatgaacgctggttcagtatttgtaaaaagttagaaggtttaccaagacatacatctacacatgcggcaggaattattattaatgaccatccattatatgaatatgcccctttaacgaaaggggatacaggattattaacgcaatggacaatgactgaagccgaacgwattggkttattaaaaatagattttctaggkttrmgaaayttatcrattatycatcaaatyttraywcaagtcaaaaaagatttaggtattaatattgatatygaaaarattccrttygatgatcaaaaagtgtttgaattgttgtcgcaaggagatacgactggcatattycaattagagtcwgacggtgtaagaagtgtattaaaaaaattaaagccggaacactttgargatattgtkgctgtaacttctttgtatagaccaggtccaatggaagaaattccaacttacattacaagaagacatgatccaagcaaagttcaatatttacatccvcatttagaacckatattaaaaaatacttacggtgttattatttatcaagarcaaattatgcaaatagcgagcacwtttgcaaacttcagttatggtgaagcggatattttaagaagagcaatgagtaaaaaaaatagagctgttcttgaaagtgagcgtcaacattttatagaaggtrcaaagcaaaatggttatcacgaagacattagtaagcaaatatttgatttgattctgaaatttgcwgattatggttttcctagagcacatgctgtcagctattctaaaattgcatacattatgagctttttaaaagtccattatccaaattatttttacgcaaatattttaagtaatgttattggaagtgagaagaaaactgctcaaatgatagaagaagcaaaaaaacaaggtatcactatattgccaccgaacattaacgaaagtcattggttttataaaccttcccaagaaggcatttatttatcaattggtacaattaaaggtgtwggttatcaaagtgtgaaagtgattgttgawgaacgttatcagaacggcaaatttaaagatttctttgattttgctagacgtataccgaagagagtcaaaacgagaaagttacttgaagcactgattttagtgggagcgtttgatgcttttggtaaaacacgttcaacgttgttgcaagctattgatcaagtgttggatggygatttaaacattgaacaagatggttttttatttgatattttaacgccaaaacagatgtatgaagataaagaagaattgcctgatgcacttattagtcagtaygaaaaagaatatttaggattttatgtttcgcaacacccagtagataaraagtttgttgccaaacaatatttaacgatatttaaattgagtaacgcgcagaatwataarcctatattagtacagtttgataaagttaaacaaatycgaactaaaaatggtcaaaatatggcattcgtcacattaaatgatggcatygaaactttagatggtgtgattttccctaatcagtttaaaaagtacgaagagttgttatcacataatgacttrtttatagttagcgggaaatttgaccwtagaaagcaacaacgtcaaytaattataaatgagattcagacattagccacttttgaagaacaaaaattagcatttgccaaacaaattataattagaaataaatcacaaatagatatgtttgaagagatgattaaagctacgaaagagaatgctaatgatgttgtgttatccttttatgatgaaacgattaaacaaatgactactttaggctatattaatcaaaaagatagtatgtttaataattttatacaatcctttaaccctagtgatattaggcttatataa

SEQ ID NO: 2145 - DNA, 942 bp, Staphylococcus aureus
atgattagtackwtgaatgaaattatgaaatgtatcgaagacaacgatacaattattatacacagacatgttagaccagatccwgatgcatatggttcacaacttggtttaaaatactatattcagcagaaatttccgcaaaagcaagtwtttgcagtgggtgaagcggaatcatcattaagttttattggagagttrgataacattgatgataaaacatatcaagatgcgcttgtaatwgtatgtgatactgccaatgctccacgaattgacgatgaacgwtatagtacaggtmgtaaacttattaaaatagatcatcatcctgcagttgatcagtatggtgatattaatytagttaatacgaacgcgtcatctacaagtgaaatcatttaygatttaatctcacattttaatgatgaagcaattgttaataaagatatcgcgagygttttataycttggtatcgtcggtgatactgggcgattcctttttaacaatacctcagaacatactatggaaattgctggaaagttaattgggcatgatattgatcataatgcgctwttaaataaaatgatggaraaggayccaaaaatgttgccgtttcaaggttatgttttacaacatttcgaacttatggatgayggattytgccaagttaaaataactgaagatgtattggagcaattcggtattcagccaaatgaagcatctcagtttgttaatacaattgctgacatcaaaggyttgaaaatatgggtrtttgcagtygatgarggtartgaaatmagatgtcgmttacgytctaaagggcaattgattattaatgatattgcgcaagattttggtggcggtggycatccgaatgcgtcaggagtttcagtgracagctgggatgaatttgagcaacttgctamagctttacgcacraaacttaactaa

SEQ ID NO: 2146 - DNA, 687 bp, Staphylococcus aureus
atgacagaatacttattaagtgctggcatatgtatggcaatygtttcaatattacttatagggatggctatcagtaatrtktcgaaagrrcaatacgcaaagaggtttttctwtttcgctactagttgyttagtgttaactttagttgtagyttcaagtctaagtagctcagcaaatgcatcacaaacagataayggcgtaaatagaagtggttctgaabatccaacagtatatagtgcaacttcaactaaaaaattacataaagaacctgcgacwttaattaaagcgattgatggtgatackgttaaattaatgtacaaaggtcaaccaatgacattyagactattattrgtkgatacacctgaaacaaagcatcctaaaaaaggtgtagagaaatatggycctgaagcaagtgcatttacgaaaaaratggtagaaaatgcaaakaaaattgaagtcgagtttgacaaaggycaaagaactgataaatatggacgtggcttagcgtatatttatgctgatggaaaaatggtaaacgaagctttagttcgtcaaggcttggctaaagttgcttatgtttayaaacctaacaatacacatgaacaacwtttaagaaaaagtgaagcacaagcraaaaaagagaaattaaatatttggagcgaagacaacgctgattcaggtcaataa

SEQ ID NO: 2147 - DNA, 1299 bp, Staphylococcus aureus
atgacaaaacatgaacaaattttagattatattgaatcgttatctataggctctaaaatttcggtgcgtaaaatcgctaaatttttaaacgtatctgaagggacagcatatcgtgcaattaaagatgctgataaaatgggcatggtcgcaacgatagatcgtgttggtacggttcgaatcgaaaaacgtaatcgtaatgaaattgaacatttaacttttaatgaaattgtcaatattattgatggccaagtgttaggtggcaayaaaggtatcactaagatggtatctaaatttgcaattggagcaatggaactcaaagatattttaaartatattggkccaaagacattattgattgtcggaaatcgygaagatgtgcagattgaagctttaaaaagaggyacggctatattaattactggtggatttaagccatctaataaagttattrattttgcgaatgaacatgatttacctgttctatcatcaagttatgatacattyctagttgcaaatattatcaacaaagcactttttaatcagaaaatacgaaaagatatcttaatagttcaagatataatgacgccattagatgatttrtctgtgctgtttgatacgatgaaaatagcagattataagcgtatggcgaatcraactggccatacaagatttccggtagtcaatgagtcktataaattagtaggtattgtaacaagtcgagagatgattaatacraaggacgacgacgaaatagataaagtgatgacgcgaaaycctatttatgtaaatgctatgagtacagtagcaagttgtgcgcatatgatgatttgggaaggtattgaattgattcctgtcgtttcgagtaataaaaagacagtgggtgtgattaatagacaagatgttttraagtctatgcaacttttaggaagacarcctcaratgggtgaaacaattaacgatcaaatcgccaaatatataacaatgaatcaagatggaattacagtagaagtttcaccactkttaatcaatcaytacggaacagtaagtaaagcrgcatttgtaagtattatagaagaaacaatacaatatgaaatgcgtaaatttaaaaaaggtaatgtyatgatagagaacttaaatatcgtgtatattaaaacagtacctattgaatcacatataacagtgcgctttggcatactagacgtcggaagaaacttcgccaaaatagaagtgaacatgcatagtcaaaacgacaaagtagcgagcgctctcgtgatatgccaaatgtttgacgaagtatag

SEQ ID NO: 2148 - DNA, 201 bp, Staphylococcus aureus
atgaataacggtacagttaaatggtttaatgcagaaaaaggttttggtttcatcgaaagagaagatggtagcgacgtattcgtacacttctcagcaatcgctgaagatggatacaaatcattagaagaaggccaaaaagttgaattcgacatcgttgaaggcgaccgtggcgagcaagctgcaaacgtagttaaaatgtaa

SEQ ID NO: 2149 - DNA, 591 bp, Staphylococcus aureus
ttgaatattgaaacagtgcaggtagactatatcgttttaacgcacggtcattttgatcattttggtgatgttgtrgaactagcaaagaaaacagragcaacagtaattggaagtgcagaaatggctgactatctttcttcatatcacggtgttgaaaatgttcatggtatgaatattggtggtaaagcaaactttgatttcggaagcgttaaatttgttcaagcatttcatagttcaagttttacacatgaaaatggtattccagtttatttaggtatgccaatgggtatcgtgtttgaagttgaaggaaaaacaatttatcatactggtgatacaggtctgtttagtgacatgtcacttattgcgaaacgtcatccagttgatgtatgttttgtaccaattggagataattttacgatgggtattgatgatgcaagttatgctattaatgaatttattaaaccaaaaatttctgtaccgattcattatgatacattcccattaatcgaacaagatccacaacaatttaaagatgctgttaatgtaggggacgtgcaaattttaaaaccaggtgaatctgttcagttttaa

SEQ ID NO: 2150 - DNA, 1011 bp, Staphylococcus aureus
atgaatagagagatgttgtatttaaatagatcagatattgaacaagcgggaggwaatcattcacaagtttatgtkgacgcattaacagaagcattaacagcscatgcgcacaatgattttgtacaaccgcttaagccgtatttaagacaggatcctgaaaatggacacatcgcagatcgaatwattgcaatgccaagtcatatcggtggtgaacacgcaatttcaggtattaagtggataggtagtaagcacgacaatccatcgaaacgtaatatggagcgtgcaagtggygtcattattttgaatgatccagaaacgaattatccaattgcagttatggaagcaagtttrattagtagtatgcgtactgcagcagtttcagtgattgcagcwaagcatttggctaaaaaaggatttaaagacttaacaatcattggwtgcgggctaatcggagacaagcaattacaaagtatgttagagcaattcgatcatattraacgcgtktttgtttacgatcaattctctgaagcrtgtgcacgctttgttgatagatggcaacaacagcgtccggaaattaattttattgcgacagaaaatgctaaagaagcagtatcaaatggtgaagtagtcattacatgtaccgtaacggatcaaccatayattgaatatgattggttacaaaagggtgcatttattagcaacatttctatcatggatgtgcataaagaagtctttattaaagctgacaaagtcgtagtagaygactggtcacaatgtaatcgagaaaagaaaactattaaccaattggtgttagaaggtaaattcagcaaagaagcwcttcatgctgaactaggrcaacttgtgacaggtgacayaccaggacgtgaagacgatgatgaratcatattacttaatccgatgggtatggctatcgaagatatttcaagtgcttaytttatttatcaacaggcacaacaacaaaatattgggacaacattgaacctatattaa

SEQ ID NO: 2151 - DNA, 1212 bp, Staphylococcus aureus
atgacatttgaaaaagaaacrgtcttaaaaacattatttcctgaagatgtacttagtattgctaaaggtttaacagacggtgaagtcgaatttttacaacaagtagattcattgctagaaagtaaktaccgtgaaaatattaatcaacattggatagacgctactgtacccgaggactattttaaagatctgggagaattaaattattttaacaatccattactwtacaaggatcgtccaaacgccaaaatgcctagtcaactatttcagtttttcatgtcttacctactcgcgcgatttgatatttccttagctaccctactcggtgttcaccaaggtttagggcataacactttctatttcggaggtagcaaagaacaaattgcgaaatatgtacctaaattacwgtcacatgaactgcgtacatgctttgctttaactgaaccagaacacggttcggacgttgcgggaggtcttgaaacagtcgctgaacgccarggcgatacttgggttatcaatggtgaaaagaaatggattggtggtgcacatgtatctgatgtcattccagtattcgcagtaaataaaraaactggcaaaccccattgctttgtagtcagaccagaacaagatggcgtcgatattgaagtcattgataataaaatcgcacttcgcattgttcctaacgcmctaattaaattaactaatgtcaaagtagatgaagcggatcgcttacaaaacataacaagctttaaagatattgccaaaattctttattcaacragagcaggcgttgcttatatggctacaggtggtatggctggcgctttacgtgccacattagattatgtcactgagcgtaagcaattcggcaaaccaattagtaaatatcagttaatacaagaaaagctagcaatgatgcaaggtaatttagctcaagcaatggcaacatgtgctcaattagctaatatgcaagcacatggtgaatatgaygaggttgcaacttcaacsgcgaagatgatgaatgccttacgtttgcgtgaracagtagctatgggccgyggtattacaggtggtaatggcatactagctgacgattatgatattgcacgtttcttctctgatgcagaagcgatttacacrtacgaaggyacacatgaaattaatgccttagtaattggacgcgctttgactggagattctgctttcgtataa

SEQ ID NO: 2152 - DNA, 147 bp, Staphylococcus aureus
ttggccgaacacgttagtgaagataaagcattccctcgattagaagaaagacaccaagtaattagagcatatgtgatgtctaattacacagatcatcaattaattgaaactacaaatagagctattagcttatatatggcaaattaa

SEQ ID NO: 2153 - DNA, 96 bp, Staphylococcus aureus
atgaatgatattgatttgattcattacatgttactgatgaacatacctgcatatgtgtttctagcttgtttgttacatattgcatttagacttgga

SEQ ID NO: 2154 - DNA, 591 bp, Staphylococcus aureus
gtgttattgttggctaaaacgttatatttaatgcgccacggacaaactttgtttaattttaagggactaattcagggatttggagattcgccgctaacagaacttggaattgctcaagctcaaaaggcacgtagytattatgaaactaaggggataaacttcgatttatatgcatcatcaacgcaagaacgygcaagtgacacacttgaaaatgttgcacctaaycaatcgtatcaacgttttaagggactgaaggaatggcattttggawtatttgaaggtgagtcagtctatctatttgataatctatacaagcctgargacttattcggagatcgaattgttcctttcaaaggagaggcaaggcaacaagttgaagawcgcattgtgaaaactttacatgacattatgtctcaaacaaagaataatgcattagtcgtgagtcatggaacaataatgggagtatttttaagatattgccttaaactagatgaagcattaaagcataatatcggtaattgtaatatcytgaaatttgaatatgacaatggaacatttaaatttgttgagttaattgatccaaatttataa

SEQ ID NO: 2155 - DNA, 1119 bp, Staphylococcus aureus
atgaaaattggtataccaagggagattaaaaataatgaaaatcgtgttggtttatcaccragtggtgtgcacgctttagtagaaagtggrcatactgttttagtggaaacaaatgcgggttcaggatcrttctttgaagatgtagattacaaagaagcaggtgctgagattgttgctgaacaagcaaaagtttgggatgtggatatggttattaaagttaaagaaccwcttgaatcwgaatatmcatattttaaagaaggrctwgtattattyacttatcttcatytagcraatgaagaaaaattaacacaagctttgatagatagaaaagtaattagtattgcatatgagactgtgcagttaccagaccgatcttyaccattrttatcaccaatgagtgaggtagcaggaagaatgtcagctcaagttggcgcagagttcctacaaaaacttaatggtggtatgggaattctactaggtggygtyccaggagtacctaarggtaaagtaactattatcggtggtggtcaagcaggaacaaatgcagctaaaattgcactaggactaggtgcagatgttacgattttagatgttaatccaaagcgtttacaacaattagatgatttattcggtggacgtgtacatacaattatgtcaaatccgttgaatattgagttgtatgttaaacaaagtgatttagtaataggtgcagttttaattccaggtgctaaagcgccaagacttgtaacagaagacatgattaaacaaatgaaaaatgggtcagttattattgacattgctattgatcaaggcggtatttttgaaacaactgataaaattacgacacatgatgatcctacatatatyaarcatggtgtggttcattatgcagttgcaaatatgccrggtgcagtaccgcgtacttcgacgttagctttaaataatgctacgctaccttatgcgctcatgctagctaataaagggtatagagaagcatttaaatcaaatcaaccattatcattaggtttaaatacttacaaaggtcacgtaaccaataaaggcgttgcagaggcatttgaaatggaatataaatctgtagaagaagcattacamttataa

SEQ ID NO: 2156 - DNA, 717 bp, Staphylococcus aureus
atgacacatgtggaagtagtagcgactatcrcgccacaattatmtatcgaagaaactttaattcaaaaaattaatcatcgtattgatgcaatagacgtattagaattacgaattgatcaawttgaaaatgtcacagttgatcaagtggcagaaatgattacaaagctgaaggttatgcaagattcattcaaattattrgttacgtatcgtacaaagttacaaggtggctatgggcaatttayaaatgactygtatcttaatttaatatcagacttagcaaatatcaatggcatagatatgattgatatagaatggcaagcagatattgacattgaaaaacatcaacgaatcattamacayttgcaacagtataataaagaggtgrttatatcacatcataatttcgaaagtacgcctccattagatgaattgcaatttatattttttaaaatgcaaaaattcaacccagaatacgttaaattagcagtaatgccacataataaaaatgatgtgytaaatttattgcaggcaatgtctacattttcagatactatggactgcaaagttgttggtatttcaatgtctaaacttggactaataagtagaacggctcaaggcgtttttggtggtgcrttgacttatggttgtatcggagwaccacaagctccaggacagattgatgttactgatttaaaagcacaagtgactttatactaa

SEQ ID NO: 2157 - DNA, 1203 bp, Staphylococcus aureus
atgtcaaaattaatcttggctatcaaygctggtagttcatcattaaartttcaattaatyagaatgcctgaagaggaattagtaacaaaaggwttartagaaagaatcggattraargattcwatttttacaattgaagtmracggggaaaaagttaaaacagtacaagatatcaaggatcaygttgargcagttgatatcatgttrgaygcwtttaaarmrcayaatatyattaatgatattaacgatatcgwtggaacwggtcaccgtgttgtacatggtggtgaaaaattccctgaatcagyagcwattactgatgargttgaaaargaaattgaagaattaagcgaattagcaccgcttcacaacccagctaacttgatgggtattcgtgctttccgtaarttattaccraatatccctcatgtggcratttttgatacagcattccatcaaacaatgcctgaaaaagcatatctatatagcttgccatatcattattataaagattayggyattcgtaagtatggyttccatggtacaagycataaatttgtrtcacaaagagcggcagaaatgttagataarccaattgaagatttacgyattatttcwtgtcayattggtaayggwgcatcaattgcagctatcgatggcggtaaatctattgatacatcaatgggcttcacaccacttgctggtgtaacaatgggtactcgttctggtaatattgaccctgctttaattccatttattatggaaaaaacwggyaaaactgctgaacaagtattggaaatyttaaacaaagaatcaggtttattaggattatcaggtacatctagtgatttacgtgacttatcagaagaagctgaatcaggtaaagcacgttcacaaatggctttagatgtatttgcttctaaaattcacaaatatattggatcatatgctgcgagaatgcatggtgttgatgtwatcgtatttacwgcaggtatyggtgaaaaytcagtrgaaattcgtgcraaagttcttgaaggyttagaatttatgggygtttactgggatcctaagaaaaatgaaaacttacwacgtggtaaagaaggatttattaactatcckcattcaccwgttaaagttgtcgttatwccracagaygaagaaagtatgattgcycgtgatgttatgacatwcggtggtytaaaataa

SEQ ID NO: 2158 - DNA, 540 bp, Staphylococcus aureus
atggaattacaacaagcaatagctaatagaagaagtgtgaaaaaatttaaaagagatatgcacatagatgacgcattgctatatcaagcaattgagaaagctgctgatgctccaaatcacggaatgagggaaccatggagagttgtgcatgttccgaaagacagattaggagatatgagtaaggatatttctaaatttgcatttcctaatgaattagataagcaacaatgtcattatgatgcagtwacgaaactaggtggcatgttattgcttattttaaaaacagatccaagacaacgtcaaaatgatgaaaactactttgcatttggtgcatatgcacaaaatcttatgttgttactttatgaagcgggrataggtacatgttggaaatcgccattatatatctatgatcctaaagtaagaaaaacacttggtataaagaaagatgaagttcttkctggattcttatatttaacggatttagaagragatatgcctaaagcaccacgtaaaaatagaaacttaattacattatattaa

SEQ ID NO: 2159 - DNA, 948 bp, Staphylococcus aureus
atggcagaacaacaaacaattatggaacgcttgtttcatwcattagatgaaaaagctaaaacattaaataatgaaaatggccaaagttttattgaaaatcttgggctagcaatggaacaagtwtatacmaatgaamgaggattgttagaacaatcgacgttacaagatcgacgtaaagcattccaatttgcatatttaagtttaatgcaggaagaaaagatacaagcaaatcatcaaattacaccagattcaattggattgataytaggatttttagttgagcgwtttatgaacaaycaagaagaattacatattgttgatattgcaagtggtrccggtcatttaagtgctactgtaaaagaagtgttacctgaaattgcggttatgcatcatttaattgaagttgatccagttttatcacgtgttagtgtacatttagcaaacttcttagaaattcctttcgatgtgtatcctcaagatgccatyatgccactaccrttagaagaagcagatatcgttattggtgattttccagtaggctattatccaattgatgaaagaagyarggastttaagctaggtttygaagaaggacatagttattcacattatttattaatagaacaagcaataaatgcattaaaagatgctggatatgcctttctagtggtaccaagtaatatttttacaggtgaacatgtaaaacagcttgaaaaatatattgcaacagagacagaratgcaagcatttttaaatttaccaccaactttatttaaaaatgaaaaagcgcgaaaatctatattaattttacaaaagaaaaaatcgggtgaaacaaagycagttgaagtattattggcaaatattcctgatttcaaaawtccttcacaatttcaaggatttatgacagagttaaatcagtggatggacacaaatcgtcctaaaaaataa

SEQ ID NO: 2160 - DNA, 357 bp, Staphylococcus aureus
atgattaaattttaccaatataagaattgtacaacttgtaaaaaggcagcaaagtttttagatgaatatggcgtaagttatgaaccaattgatatcgttcaacatacacctacaataaatgaatttaaaacaataattgcaaatacaggcgtagaaattaataaattgtttaatacacacggygcgaaatatcgtgagcttgatttgaaaaataaattacaaactttatcagatgatgaaaagttagagttgttatcatctgatggtatgttagtaaagcgtcctctagcagtaatgggcgataagataacrttaggatttaaagaagatcaatataaagagacttggttagcgtaa

SEQ ID NO: 2161 - DNA, 495 bp, Staphylococcus aureus
atgactgaaataacattcaaaggtggaccaatccacttaaaaggtcaacaaattaatgaaggtgattttgcacctgattttacagtgttagataatgacttaaatcaagtaacattagcagattatgctggtaaaaagaaattaattagtgtggtaccatcaattgatacaggtgtttgtgatcagcagactcgcaaattcaactctgawgcttctaaagaagaggggattgtgcttacaatytcagcagacttaccattcgcacaaaaaagatggtgcgcttcagcaggtttagacaatgtcattacattaagtgaccaccgtgacttatcatttggtgaaaactatggcgttgttatggaagaacttcgcttattagctcgtgcagtatttgtattagatgyagataataaagttgtttataaagaaatcgttagtgaaggtactgatttcccagattttgatgctgctttagctgcatacaaaaatatttaa

SEQ ID NO: 2162 - DNA, 381 bp, Staphylococcus aureus
ttggcagtaccaaatgaattgaaatattcaaaagagcatgaatgggttaaagttgaaggtaatgtagcaayaattggaatcacagaatacgcacaaagcgagttaggtgatattgttttygttgaattaccagaaacagatgatgaaattaatgaaggggatacgtttggtagcgtagaatcagttaaaactgtatcagaattatatgcaccaatctctggtaaagtagttgaagtcaacgaagaactagaagatagtcccgaatttgtaaatgaatctccatacgaaaaagcatggatggtaaaagtagaaattagtgatgaaagtcagmttgaagctttattaacagctgaaaaatattcagaaatgattggtgaataa

SEQ ID NO: 2163 - DNA, 771 bp, Staphylococcus aureus
atggatttgaayttaacgatgattataatcataattttatttggttttatcgcggcgtttatagattcggttgtagggggtggyggtttaatttctacgccagcattattagcaatcggtctaccaccatctgtggctttaggtacaaataaattggcaagttcrtttggttctttaactagtrygataaagtttataaggtccggtaaagtggacttatwtgttgttgccaaattatttggttttgtatttttggcatctgcatgtggcgcatatattgcaacsatggttccgtcacaaatattgaaacctytaatcatyattgcactttcgtcggtgtttatattcacattacttaaaaaagattggggcaatacacgyacgtttactcaatttacatttaagaaagccatamtatttgcagcactttttatwttaatcggcttttatgatggatttgtaggtggrggaacaggttcatttatgctttttgtattgttartctttggttttgattttttaagygcwgcaggaaatgctaaagttttgaaytttgcttctaatataggtgcgcttgtattatttatggtattaggacaagtagattatgtaataggtttartwatggctryragyatgattgywgggtcatatrctggrgcwcattttgctatyaaacaaggtgttggytatgtraaagtattatttattattattactgckattttaattttaaaaaatgcttttgattatattcaacaatttgtataa

SEQ ID NO: 2164 - DNA, 1224 bp, Staphylococcus aureus
atgaagtatgatcacttgcttgttagatacggggagttaacattaaagggttcaaatagaaaraaatttgtaaatcaattaagaaataatgtaaataagtcattaaaaggacttgatggrtttgtcgttaaaggcaaacgagatcgtatgtatattgaacttgaagaccatgcagatataaatgaaataacawatcgattatcaaaaattttcggtattaaatctattagtccagtattaaaagtagaaaaawcaatagaggcaatragtgcagmgrcaattaaatttgcgcagcaatttgaagaaaacagcacwtttaaaattgatgtgaagcgtgccgataaaaatttcccaatggatacgtatgaattacarcgtgaattgggtggtrcmrtattgaarcamwtygamaatrtttcwgtkaatgtcaaacgtscagatcatgaaattcgagtggaagttagattagatgcaatttatatgtatgaagaagttgttccgggttcaggyggattaccagttggtactggtggtaagacgttactaatgctttcaggcggtatagactcaccagttgctggratggaagtgatgagacgtggcgtaacaattgaagcgattcatttccatagtccaccatttacaagtgatcaagcaaaagaaaaagttattgaattgacacgtattttagctgaacgtgttggaccaattaaattgcatattgtaccatttacagaattgcaaaaacaggtaaataaagttgtacatccaagatatacaatgacttcaacgagacgtatgatgatgcgtgttgctgataaattagtacatcaaataggsgcttwwgcyatygtwaatggtgaaaayytaggkcargtwgccagtcaaacacttcatagyatgtatgcaattaataatgtaacttctacycctgtattacgtcctttattaacttacgataaagaagaaattattattaaatcgaaagaaattggtacatttgaaacatctattcaaccwtttgaagattgttgyacaattttcacccctaaaaatccagtaaccgaaccaaactttgawaaggtagtycaatatgaaagygtctttgattttgaagagatgattaatcgtgctgttgaaaatattgaaacacttgaaataactagtgattataaaactattaaagaacagcaaacaaaccaattaataaaygactttttataa

SEQ ID NO: 2165 - DNA, 93 bp, Staphylococcus aureus
ttgttagttgtatttttcacatatcaacatcacaaattatttaaaaagcgcaaatatctttataatttttattggcctaaccaactaattaat

SEQ ID NO: 2166 - DNA, 1140 bp, Staphylococcus aureus
ttgatatatctagataatgcggcaacgacgaaagcatttgaagaagtgttagatacttatttaaaagtaaatcaatcaatgtattataatccgaatagtccgcataaagctggtttgcargcaratcaattaytacarcaagcaaaaryycaaatwaatgmwatgrtyaatwcwaawayramwtatgatgttgtwttcactagtggtgcaackgaatcyaayaatmtygckytwaaaggtrtkgcytatcgtaaatttgatacagcgaaggaaataattacatcygtkttagarcatccgtcygtwttagargttgtmagatatttggaagmrcrcgaaggmtttaaagttaaatatgttgatgtaamraaagatggcaskattrayttrsaacayttyaamgawttartgtcmgayaaagtcggtttagtaacatgtatgtatgtaaataatgtaacwggwcaaatwcarccyattccacaaatggctraagttataaaaaattatcctaaggcacattttcatgtagatgcggttcaagcattcggcaaaatttcaatggatytcaataacrtagatagtattagtttaagtggmcacaartttaatggkttaaaagghcaaggcgtcttacttgtwaatcayattcaaaatrttgarccaayyrtycawggtggyggtcaagartatggygttagaagtggwacagtyaatttrccmaatgatattgcwatggttaaagcgatgaaratrgctaatgaaaacyttgaagcattgaatgcatttgttactgwgttaaataatgacgtccgtcaatttttaarymaatatcawggwgtttatattaattcwtcaacttcwggttcaccattcgttttaaatattagttttcctggcgtaaaaggtgaagtattagttaatgctttttcaaaatatgacattatgatatctacgacragtgcttgttcatctaaacgtaataaattaaatgaagtattggctgcaatgggattatcagacaaatctattgaaggtagtataagattatcatttggrgctactacaactaaagaagatatagcraggtttaaagaaatatttatcatcatttatgaggaaattaaggagttgctaaaataa

SEQ ID NO: 2167 - DNA, 387 bp, Staphylococcus aureus
atggctattgtaaataaagtgataattgttgaaggraaatctgataaaaaaagggtgcaacaggttattgcagaaccagtcaatattatttgtactcatggaacaatgagtatagataagcttgatgatatgatagaatcactrtatgataaacaagtttttgtattagccgattctratgacgaaggagatcgaattagaaattggtttaaacgttatttgagtgaaagtgaacatatatttattgataaaacttactgtcaagttgcgaattgccccaaacaatatttggcgcatgtactttcaaaacatggctttacttgtaagaaagaaacacctytyttaccgaatataaataatgaaaggttagttttagtaaatgaataa

SEQ ID NO: 2168 - DNA, 1695 bp, Staphylococcus aureus
atggtgttatatatcattttggcaataattgtgattatattgattgctgtaggtgtattattctatttacgttcaaataaamgacaaatwatwgaaaaagcaatcgaacgtaaaaatgaaattgaracgttaccttttgatcaaaaccttgcacaattatytaagttgaatttaaaaggtgaaacaaaaacgaaatacgatgcaatgaaaaaggacamcgtagaaagtacaaataagtatctagctcctgtggaagaaaaaatccataatgctgaggctttattagataaatttagtttcaacgcatctcaawgtgaaattgatgatgcaaatgagttgatggatagttacgaacaaagctatcagcaacaattagaagatgtaaatgaaattattgcgttatacaaagataatgatgaattatatgacaaatgtaaggttgattatcgtgaaatgaaacgtgatgttttagcaaatcgtcatcaatttggtgaggcagcaagtctwcttgaaactgaaattgaaaarttygagccaaggttagagcaatatgaagtactaaaagctgatggtaattatgtacaagcgcacaaccatatagctgccttgaatgaacaaatgaaacagctaagatcttatatggaagaaataccagaattaattagagaaactcaaaaagaattacctggtcaattccaagatttaaaatatggttgccgtgatcttaaagttgaagggtatgatctggatcacgtraaagtagacagtacattacaaagcttaaaaacagagcttagtttcgttgaaccattaattagycgcttagaattagaagaagctaatgataaactagctaatatcaatgataagttagatgacatgtatgatttaattgaacatgaagttaaagctaaaaatgatgtcgaagaaacaaaagatatcattacggataacttattcaaagcwaaagacatgaattatacattgcaaacagaaattgaatatgtacgtgaaaactactatataaatgaatctgatgctcaragtgttcgtcaatttgaaaatgaaattcaaagtttaatttctgtatatgatgatattttaaaagaaatgtctaaatctgctgtrcgatatagcgaggttcaggataatttacaatatttagaagatcatgtcacagttattaatgacaaacaagaaaagctacaaaatcatctgattcaattgcgtgaagatgaagcagaagcagaagacaatctgytacgagtmcaatcgaagaaagaagaagtgtatcgtcgattacttgcttctaacttaacaagcgttcctgaaaggtttatcatcatgaaaaatgaaattgatcatgaagttcgtgatgttaacgaacaatttagtgaacgtccaatacacgttaaacagttaaaagataaagtgtctaaaattgtgattcaaatgaatacatttgaagatgaagcaaatgatgttcttgttaatgctgtttatgcagagaaattaattcaatatggaaatagatatcgtaaggactatagcaatgttgataagagcttaaatgaagctgaacgattatttaaaaataatcgctataagcgtgcgattgaaattgcagagcaagytcttgaaagtgttgagccaggtgtyactaaacatattgaagaagaagttattaagcaatag

SEQ ID NO: 2169 - DNA, 297 bp, Staphylococcus aureus
atgaataattcattagacatcaaagatgtaactacattttatgaggaagryaaacatttaatctwtggttatacaccaacktgtggtacktgtaaggtttcagaaagaatgttagacattrctaatgaaatattgcagttrccattattgaaaatagatttaaacttttatcctcagttttgtaaagatatgcaaatcatgtctacgccgattttattgttgatgaataaagataaagaagtaaaacgaatttatgcatttmaatcggtgactgatttgttagaaaatttaaaatag

SEQ ID NO: 2170 - DNA, 1755 bp, Staphylococcus aureus
ttgcagaatcatacagcagtcaatacagcacaarcgataatattaagrgatttagttgatgcattattatttgaagatatagccggwattgtatcgaatagtgakattactaaagaaaayggacaaacsmttttgatatacraacgtgaaacacaacaaataaagatacctgtttattttagtgctttaaatatgtttcgttaygaaagytcacaaccaattacgatagagggaagggygtctaagcaacctttaacrgcagctgaattttggcaaacaatygctaatatgaattgtgatytaagtcatgaatgggaagtggctcgmgttgaagaaggactgactactgctgccacacagcttgctaaacaattatcagaattagatttagcgtcrcatccttttgtgatgtcmgarcagtttgcaagtttaaaagatcgtccatttcatccattagctaaagaaaaaagaggattaagagaagcggattatcaagtgtatcaagctgaattaaatcaatcatttcctttaatggttgcagcagttaaaaagacacawatgattcatggcgatactgcaaatatygatgaattagaawmwttgacagyacctataaaagaacaagcgacagayatgttamatgatcaagggttatcaatagatgactatgtactatttcckgtacatccttggcaatatcarcatattytgccgaacgtctttgcgamagagattagkgaaaarttggttgtacyattaccrttaaaatttggagattatctrtcgkcttcaagtatgcgttcattaattratatygsmgcrccgtataaccatgtyaaagtrccatttgcaatgcagtcattaggsgcattaaggctaacgcctacgcgttacatgaaaaacggagaacaagcmgaacrattattacgtcarcttatagaaaaagatgmmryrytagctaagtatgtcayrgtttgtgatgaaacagcttggtggtcatatatgggtcaagataatgatattttcaaagatcaattaggtcatytaactgttcagctaagaaartatcccgaagtgctagccaaaaatgatacgcaacagctagtgtcaatggcagcactcgcggcaaatgatcgcacyttatatcaaatgatttgtggaaaagataatatttctaaaaawgatgtcatgacgttatttgaagatatcgcrcaagtctttttaaaggtaacactatcatttatgcaatacggcgcattaccagagttgcatggtcaaaatatattgttgtcatttgaagatggacgtgtacaaaaatgcgtgttacgtgatcatgatactgtcagaatttataaaccatggctaacagcacatcagctttcattgccgaagtatgtcgtcagagaagatacacctaatacgctaattaatgargatttggaaacattctttgcttattttcaaacattagctgtatcggtaaatctatatgccattattgatgcaattcaagatttatttggtgtaagtgagcatgaacttatgtcgttgttaaaacaaattttaaaraatgaagtggcaactatttcctgggttacaactgatcagctagctgtcagacayattttatttgataaacagacgtggccattyaaacaaattttattaccattgctatatcaacgtgatagtggtggaggtagtatgccttcaggtttaactaccgtaccaaatccaatggtgacatatgattaa

SEQ ID NO: 2171 - DNA, 1506 bp, Staphylococcus aureus
atgaatttcgattggataaaaacgcgytcagacttcgatgatgacaagcctgccgttattgatcacgcaaaacaaacatcttggacataccaacaactcaatgcacgcgctgataatatggcacattatttaacatctcaaggtgttaaaaaaggcgatgttatcggtatttttgcgccaaatgatattgcaatattagatttattrtttgcttgttttaaaacaggtgcggtttttttaccattgaattggcggcttaacccaaaagaaattgcagccattgtggaagatgcacaattaaaactgctcttctatgctgaaaaacatttaagttcactcaccgatattgaccaaaacttattgcatatggatattgatgtrgcgcaatatgatgaaatcgtaaatccagattatcaccaaccttttcaagcaacacctgtygaaccacaagatcttgcagcattaatttatacaagtggtacaaccggatcacctaaaggtgtgatgttctcatatgaatcatttgttcataacggygcaaacytagagctracgtayaagttcaattcaaactatattacgattgtatcaacaccaatgttccatgttttagggtttaacgatactgtattaccagtattratgtcaggtggmacacttattcttcaacgttactttaacggcgaagaattgaatgacatgattgcacaatatcaccctacatttattatcatgattccgacaatgtattatagtacgctacgtgctagtaattttaatcctgaaaattttaragctatggattatatcatccaaggtggttcacaaccattaccaagtatccaagcagcttttaarcaatatggcataaacattattaayggctatggyttaactgaagcacckcttgtacttgttaatacaccggaaaattcaaaacgtaarccaatgagtattggtaaagcagtcatgttygttgatgcacgtatccttgatgataacggtgargaagtacctactggtgagattggcgaacttgcaattaaggctaaaaatgtcacgccaggatattggaataaaccagcagagactgcyaaagcrtttcatggtcgwtayttattracwggwgayttagcgaagatggacracgatggcgatatatttattattgamcgcaaaaaagaattaatcataactggtggcgaaaatgtcttaccatcygaagtcgaaaatgctttagckgagcatccactagtagaccggtgtgtggtcgttggctatgatcatccaaaatatggtgartcaattgctgcagccattatacttcgygaagatgaacctcattacgctgaaattttaratcaacatatgcgaagtcgtttagcaggttataaagtyccaagaatgtatgtaccagtgacacatatgccgttaaacagtacgcagaaaccagataaacttgcgattcgacaaatgatgaatgacaaagtctcrcaaacactttaa

SEQ ID NO: 2172 - DNA, 1026 bp, Staphylococcus aureus
gtgattgaattaaaagaagttgttaaagaatatcggactaaaaataaagaagtccttgctgtagatcacgttaatttatcgattcgagcaggatcgatttatggcgtcattggtttttctggagcaggaaaaagtactttgattcgaatgtttaatcatttagaagcgcctacatcaggtgaagttattatagatggagaccatataggycaattgtccaaaaatggattaagagcaaaaagacaaaaagtaartatgatcttccaacattttaatttgttatggtcaaggactgtgttaaaaaatattatgtttccgcttgaaattgcaggtgtccctagaaggagagcwaagcaaaaagcattagaacttgtcgaactcgtcggtttaaaaggtagagaaaaggcttatccatcagagttatcaggyggacaaaagcaacgygttgggattgcacgagcgttagctaatgatccaacrgtcttgctttgtgatgaggcaacaagtgcacttgatccgcaaacaacagatgaaattttagatctactactaaaaattagagaacaacaaaatttaacaattrtactaattacgcatgaaatgcatgtcattcgtcgtatttgtgatgaagttgcagttatggaaagtggtaaagtgatagaacawggaccggtgacacaggtttttgaaaatccgcaacacrctgtgacaaaacgatttgtgaaagamgatttaaatgatgatttcgaaacatctttaacagaattagagccattagaaaaagatgcwtatatcgttagattagttttcgctggttcaacaacaaccgagcctattgtatcgagtctatcaactgcctatgatattaaaattaatattttagaagcaaatattaaaaatacaaaaaatggaacagtcggctttttagttctgcatattccatatatttcaagtrtagatttcggaaaattcgaaaaagagttaattgagcgacaagttaaaatggaggtgttaagacatgggtaa

SEQ ID NO: 2173 - DNA, 1131 bp, Staphylococcus aureus
gtgaagaaaattttatttgatgttgatggcrtttttttaagtgaagaacgttgtttcgatgtctctgcattaacggtatatgaattattaatggataagtgttatttaggtcttcattcacatatagattgggaaactttgactgataacgatatacaagacattaggaatcgaatttttcaaaaagataagattttaaacaaattaaaatcgctagggctraattcaaattgggatatgttatttatcgtttttagtattcatttaattgatattttgaaaaagttatcacatgatgaaattgaggcattcatgtatcragatgagcctgtcgaattgaagttgcaaaatataagcacaaacwtagcagacygttttaatttaaatgaacaactacctttacaatttttggataatgtaaaagttggtaaaaataatatttatgctgctttggaagagtttgcaacaacagagttacatgtttcggatgctamtttatttagtttgaagggtgcattatggacgttagcgcaagaagtttatcaagaatggtatttaggatcgaagttgtatgaagakgttgaaaagaaaatagcacgaactacttttaagacaggttatatttatcaagaaattattttgagaccrgtagatgaagttaaggtacttctgaatgatttaaaaggtgctggtttcgaattaggtatwgcaacaggtcgtccttatactgagactgttgtgccatttgaaaatttaggattgttaccrtattttgaagctgattttattgcaacagcaagtgatgttttagaagcagagaatatgtatccgcaagcacgaccattaggaaagccgaatccttttagttatatcgcagctttawatggtaataawcgcgataaatatgaatcttatatcaataagcaagataacattgtaaataaagatgacgtatttatagtaggcgattcgttagctgacttattaagtgctcaaaaaataggtgcaacgtttattggaacattawcaggtttaaaaggwaaggatgctgcaggtgagttagaagcgcatcatgccgactatgttattaatcatttaggtgaacttagaggtgtactagataatttgtaa

SEQ ID NO: 2174 - DNA, 696 bp, Staphylococcus aureus
atgggtaaatcatttagtgaaattataaatgaaatgattacaatgcctaatattcagtggccagaagtttggactgcaatagtcgaaacactatacatgacagtcgtctcaactatatttgcatttatactyggtcttattttaggtgtgttattattcttgtctgctaaaggtaagtctatyggtgcaaggttattttattctatcgtttctttcattgttaacttatttagagcgataccatttattattttaattttattattaattccatttacaagtttgatacttggaacgataagtggtccgacaggtgcgttaccagcmttgatyattggcgcagcrccgttttatgcaaggctcgtagaaattgcttttaaagaaattgataaaggtgtcatcgaagcggcytggtcaatgggygcyaatacttggayagtaattcgtaaagtcctyttacctgaagcyatgccagcgctagtgtctggcattacagttacagcaatcgctttagttggttcaacrgcagttgcaggtgtaattggtgccggtggtttaggaaatttagcatacttaacaggtttcactcgaaatcaaaatgatgtcattttagtatcaacwgtttttattttaattattgtatttataatccaattcattggggattggcttacaaataaacttgataaacgataa

SEQ ID NO: 2175 - DNA, 96 bp, Staphylococcus aureus
ttgcctatcccaaatagtatagttgcccctactattactgatgtggtacctactgtaaaacgtctaatcgaatacttattctgcttattcgacaaa

SEQ ID NO: 2176 - DNA, 822 bp, Staphylococcus aureus
atgaaaaaattatttggtcttattttagtattaacatttgcagttgtattagcagcttgcggtaatggaarcaaaagtggcagtgacgayaagaaaataacagtaggtgcttcaccagcaccacatgmtgaaattttagaaaaagcaaaaccattattagagaaaaaaggttatgamctagatattaaaacaattaacgattacactacrcctaataaattactagayaaaggtgaaattgacgcaaactatttccaacatacaccatatttaaacacagagaaaaaggataaaggttacaaaatcgtaagtgccggtratgttcacttagaacctatggctgtatactctaaaaagtataaaagtttaaaagaattaccaaaaggtgcracagtytatgtgtctaataatccagctgaacaaggacgyttcttaaaattcttcgttgatgcaggtttaattaarrtcaaaaaaggcgtaaaaattgaagatgctaagtttagtgatattacagagaataaaaaagatattaagtttaataataaacaatcagcagaattcttacctaaaatttatcaaaatgaagacgckgatgctgttatcattaattcraactttgcaatcgaacaaaaactaaatcctaaaaaagattctattgctgtagaaagtgcgaaagataatccttatgcaaacttaattgctgttaaagaaggacatcaagatgataagaaaatcaaagcattaattgaagtattacaatctaaagatattcaagacttcattaatgaaaaatacaayggtgcagttattcctgctaaataa

SEQ ID NO: 2177 - DNA, 618 bp, Staphylococcus aureus
atgtattcagtgattagtaagattttgaatttcattttagttaaaatgtcaaaatcattatacgtaatcggtaaagataatattcctaaggatagtaaatatgtcgtaacttgtacgcatgaaagttataacgaagtyattatgctaggtatggcattatatcctaatcaaattcattatatggctaaaaaagaattattcaaaaataaatggattggtaaatttttaacgtctttaaatgcatttcctgtagatcgtgaaaatccaggacctagtactttaaaacgcccaatcaatttgttgaaagataataagacagttggtatcttcccaacaggttctcgcacatcgcaagaaggtgcaccwttgaaacgtggtgcttcaacaattgcaatgttaagtaagtcaccaatattacctgttgcttatgttggtcctactaagattcayggtcttwtaacwggacaagcatacataaatattggyaaaccaatcgatattaacgatttacctaaagatttaaaacgaaacgagcgtatcgattayattacaaaagagattgaaacacgaacagcaaagttacaacaagaattgcatgaaattgtaaaaagtttataa

SEQ ID NO: 2178 - DNA, 264 bp, Staphylococcus aureus
gtggtactaaatttaaaaagattgagagcggaaagaatagcttgtggtattacgcaagatgaaatggctcacaaaatggggtggaaaacaagaacgccttatgcaaagagagaaaatggaatagtagatattggagcgaatgaatttattaaaatggcaaaaatattaggttatgaaacaaataacctagatattttttttaccaataacgttcccagaaaagaacgtaaaaacatcttaaaaggaggtgaattaaatgtctag

SEQ ID NO: 2179 - DNA, 1263 bp, Staphylococcus aureus
atgacgaatgtattaattgaagatttaaaatggagaggtcttatttatcaacaaactgatgaacaaggtattgaagatttattaaataaagaacaagtgacgttatactgcggtgcygatccaacggcagatagyttacayattggtcacttactaccattyttaacattaagamgwtttcaagaacatggacatcgtcctatcgttttaattggcggtggtacaggtatgattggtgatccatcaggtaaatcagaagaacgtgtgctacaaacagaagaacaagtagataaaaatatcgaaggtattagtaagcaaatkcayaatatttttgaatttggaacagaccatggtgcagtgcttgttaataatagagactggttaggacaaatytcattaattagytttttacgtgactatggtaaacacgtcggcgttaattacatgttaggtaaagattcaatccaaagtcgtttagaacatggtatttcatatacagaattcacatacacgattttacaagctattgatttcggtcatttgaatagagaattgaattgtaagattcaagtaggtggatcagatcaatggggtaatatcacaagtggtattgaattaatgcgtcgtatgtatggtcaaacagacgcatacggtttaactattccgcttgtaactaaatcagatggtaagaaatttggtaartctgagtcaggtgctgtttggttagatgctgaaaaracragtccttatgaattttatcaattctggattaatcaatcagacgaagatgtaattaaattcttaaaatactttactttcttaggaaaagaagaaattgatcgcttagaacaatctaaaaatgaagcaccrcatttacgtgaagctcaaaaaacattagctgaagaagtaactaaatttattcatggtgaagatgcattaaatgatgcaatccgtatttcacaagcattatttagtggtgatttaaaatcattatcagcgaaagaattaaaagatggatttaaagatgtgcctcaagtgacattatcaaatgacacaacaaatatcgttgaagtccttattgaaacaggcatttctccttctaaacgacaagcrcgtgaagatgttaacaatggtgcgatttatattaatggtgagagacaacaagatgttaattatgctttagcaccagaagataaaattgatggcgaatttacgattattcgtcgcggtaagaaaaaatacttcatggttaactatcaataa

SEQ ID NO: 2180 - DNA, 273 bp, Staphylococcus aureus
atgtctagaacaaaattgcatgatgtaccagctaaagaaaatacaattacagaaccaaagcaagttgtagtgaatcctttgtttgcgaaacctaatgcactagctagtatttttggaatttcatatagttcggtgaatcgcattttaaaagaatgggaaaaagattctaaaggtgttgatgatttatattactcgttatcatcaacaatgattgttataagtattccacgattcgaggagtacatgaaggcacgtcataaaaaatggatgtag

SEQ ID NO: 2181 - DNA, 90 bp, Staphylococcus aureus
ttgaaaataatcttactgctgtttttaatatttggattcattgttgtggttactttaaaaagtgagcatcaattaacgcttttttcgatt

SEQ ID NO: 2182 - DNA, 2676 bp, Staphylococcus aureus
atgaacaaacatcacccaaaattaaggtctttctattctattagaaaatcaaytctaggcgttgcatcggtcattgtcagtacactatttttaattacttctcaacatcaagcrcaagcagcagaaaatacaaatacttcagataaaatctcggaaaatcaaaataataatgcaactacaactcagcmaccwaaggatacaaatcaaacacaacctgctacgcaaccaryaawcactgcgaaaamctatcctgcagcggatgaatcacttaaagatgcaattaaaratcctgcaktagaaaataaagaacatgatataggtccaagagaacaagtyaatttycarttattagataaaaacaatgaaacgcartactatcactttttcagcatcaaagatccagcagatgtrtattacactaaaaagaaagcwgargttgaattagacatcaatactgcttcaacatggaaraagtttgaagtytatgaaaacaatcaaaaattrccagtgagacttgtatcrtatagtcctgtwccagaagaccatgcctatattcgattcccwgtttcagatggyacacaagarytgaaaattgtytcttcractcaaattgatgatggagmwgaaacaaattatgattatactaaattagtatttgctaaacctatttataacgatccttcacttgtraaatcagatacaaatgatgcagtagyaacgaatgatcaatcaagttcagwcgcaagtaatcaaacaaacacgaatacatctaatcaaaatayatcaacgaycaacaatrctaatratcaaccgcaggcaacgammaatatgagtyaacctgcacaaccaaaatcgtcarcgaatgcagatcaagcgtcaagccaaccagctcatgaaacaaattctaatggtaatactaacgataaaacgaatgagtcaagtaatcagtcggatgttaatcaacagtatccaccagcagatgaatcactacaagatgcaattaaaaacccggctatcatcgataaagaacatacagctgataattggcgaccaattgattttcaaatgaaaaatgataaaggtgaragacagttytatcattatgctagtactgttgaaccagcaactgtyatttttacaaaaacaggwccartaattgarttaggtttaaagacwgcttcaacatggaagaaatttgaagtttatgaaggtgacaaaaagttaccagtcgaattagtatcatatgattctgataaagattatgcctatattcgtttyccagtwtctaatggkrcgagagamgttaaaawtgtgtcatctattgaatatggtgagaacwtccatgaagaytatgattatacrytaatggtctttgcacagcctattactaataacccagacgactatgtggatgargaaacatacaatttacaaaaattattagctccgtatcacaaagctaaaacrttagaaagacaagtttatgaattagaaaaattacaagakaaattgccrgaaaaatataargcrgaatataaaaagaaattagatcaaactagagtagagttagcygatcargttaartcwgcagtgacrgaatttgaaaatgttacacctacaaatgatcaattaacagatktacaagargckcattttgttgtttttgaaagtgaagaaaatagtgagtcagtyatggayggmtttgttgaacatccattctatacagcaactttaaatggtcaaaaatatgtagtgatgaaaacaaaggatgacagttactggaaagatttaattgtagaaggtaaacgtgtcactactgtttctaaagatcctaaaaataattctagaacgytgattttcccatatrtacctgacaaagcartttayaatgcgattgttaaagtcgttgtggcaaacattggttatgaaggtcaatatcatgtcagaattrtaaatcaggatatcaakacaaaagatgatgayacatcacaaaataacacgaktgaacckctaaatgtacaaacaggacaagaagrtaaggttrctgmwacrgatryagctgaaaatagcagcactgcaacaaatccwaaagatgcgtctgataaagcagatgtgatagaaccagaktctgacgtggttaaagatgctgatartartrttgayaaagatgtgcaamatgatgttgatcatttatccgatatgtcggataayamtcacytcgataartatgatttmaaagaaatggatactcaaattgcyaaagayactgatarrrrtgtkgataatagcsttggwatgwcatckaatgtcgatactgayaaagactctaataaaaatraagrcaaagtyatacarctdrmwcatawtrccgataaaaataatcatamtggaaaagcagcaaagcttgaygkmgtgaracaaaattataataatacagacaaagttactgayaaaaaaacaactgaacatctgccgagtgatattcataaaactgtagayaaaacagtgaaaacaaaagaaaargccggcacaccatcgaaagaaaacaaacttagtcaatctaaaatgctaccaaaaactggagaaacaacttcaagccaatcatggtggggyttatatgcgttattaggtatgttagctttattcattcctaaattcagaaaagaatctaartaa

SEQ ID NO: 2183 - DNA, 381 bp, Staphylococcus aureus
atgaaattagatcatgattgtgttagacatcttttgttagaaattgaaactaataaaaagattggtgaaccgctcaccgaatacaatttcaaagataatgttgtatttggaaaatatgattttgaaactgtaatgtatgcattattaaaactggaagaagcaaagtatgttagtgttaaattcggttgggaagatggacatatttatggttatacaattaacgatataacttggtcagggcatgaatttttagataatatccgagacaatcacacttggaaagaagttaaaaaagtcgcaaacaaaaccactagtatgtccgtaacattgctaagcaaattagcttttaattatctaacacaaaaatttaatctaacttaa

SEQ ID NO: 2184 - DNA, 900 bp, Staphylococcus aureus
atgactcgacataatgaaattattaaatgtgcagaaaaatatcaattacacatccaacctcaaacaatctcattgaatgaatcgggacttgatttycaagttgcatttggaaaagataaacatggagtagaatgggttttgagactrccaagaagacctgaygtttataaacgaacaaaacccgaaaaacaaacggtagacttcttacagaagaatgtttcatttgaartaccgaartggaaagtacaygmaaragaccttattgcktayccaaaacttacaggtaaacccgcagccacaatagatccagaaatacaaaattatgtatgggaaattgaacacaaaccattaccagaaaactttattaacacattagctgaaacactcgtagatttacacaacataccagaagaaaacattaacgttcagcatataaatatcaaaaccatacaagaaataaaaaatgactttcaaagaagaatgaataaagttaaagaaacttatggygtatcagatgaattatggaacagatggaaacaatggttagaaaacgacgaactatggcctcgacatgcgaccatgatacatggggacttacatccaggacatataatggtagataaccaagcaaacgtcacaggtctcatagactggactgaagcaacccactccgacccatcaatggactttatrggacaccatcgtgtattcgacgacgaaggattagagcaactyataacagcatayggtaaagctggaggtgaaatatggccacgaatgaaagagcatataatagaactcaatgcagtattcccaatgtttatcgctgagtttgctatggaatcaggagaatcggcgtatgaaacgatggcattgaaagagttaggtatgaaagagtag

SEQ ID NO: 2185 - DNA, 1701 bp, Staphylococcus aureus
atgcataaattaaacaaaaaggggcgaaaaaagttgactcatttatcagatttagatattgcgaatcaatcaacactacaaccaattaaggatattgctgcatcagtaggtatttcagaggatgcattagaaccttatggtcattacaaagctaaaatcgacattaataaaattacgccaagagaaaacaaagggaaagttgttttagtaactgcgatgagcccaacaccagctggtgaaggtaaatcaacggttacagttggtttagctgatgcattccatgagttaaataaaaacgttatggttgcattaagagagcctgctttaggaccaacatttggtatyaaaggtggtgcractggtggtggttatgcgcaagtcttacctatggaagatatcaacttacatttyaayggrgatttccatgcgattacaactgcwaataatgcattgtctgcgtttatmgataatcatattcaccaaggtaaygaattaggaatcgatcaaagacgtattgartggaaacgtgtattagatatgaatgatcgtgcacttagacatgtaaaygttgggttaggtggacctacaaatggtgtaccacgtgaagatggctttaatattacagtagcgtctgaaattatggcgattttatgyttaagtagaagtattaaagacttaaaagataaaattagtcgtattactattggttayactagagatcgcaagccagttacagttgcagatttaaaagtgsaaggtgcacttgcaatgattttaaaagatgcaatwaaaccaaacttagtacaatcaattgaagggacaccwrcattagttcatggtggaccatttgcgaatatcgcacacggttgtaactcaattttagcaactgaaacagcacgtgatttagctgatatcgttgtaacggaagctggatttggttcagacttaggcgctgaaaaattcatggacattaargygcgtgaagcwggattygaycyrgcagcwgtygtwgttgtwgcracrattcgtgcrttaaaaatgcatggtggtgtagcraaagataatttaaaagaagaaaatgtagaagcagtaaaagcaggaattgttaatttagagcgtcatgttaataatattaaaaaattcggtgtagaaccggttgttgcaattaatgcatttatacatgataccgatgcagaagtagaatatgtaaaatcttgggctaaagaaaataacgtacgaattgccttaactgaagtttggraaaaaggtggtaaaggtggcgttgacttagcaaatgaagtattagaagtcattgatcaacctaattcatttaaacctttatatgaattagaattaccattagagcaaaagattgaaaagattgtgactgaaatctatggcggttcaaaagtaacgtttagyagtaaagcgcaaaaacaattaaaacaatttaaagaaaatggttgggataattacccagtatgtatggcgaaaacacaatattcattctcagatgatcaaacgttgttaggtgcaccatcaggatttgaaattacaattcgtgaattagaagcgaaaacaggtgcaggatttatcgtagcgttgacaggtgcaatcatgactatgcctggtttacctaaaaaaccagcagcattaaacatggatgttactgatgatggtcatgcaattgggttattctaa

SEQ ID NO: 2186 - DNA, 573 bp, Staphylococcus aureus
gtgtttagattaaaaaaatggtatttaaaacaaaaaggctatttttgccgtgtcggtgaaaagtgggacaatagtaatttatcccatgaaaatatacatagttatgtagatagagtacttgaatatgagactgaaacacgtagaaacggccaaccaactgaagaatatatattagctagtagtggggaaaaaataaatgaagatttaagaagtggtactaatgatcacaaagaaattctagaggtatttgataaatataaagtaaaagaggatataactacttatagaacggttagtcctcggatatacaaattaatggagaaaaatgctaaaaacttaaatggagtagatttgtttgaacttggaattttacacacttcattaataaaagggtacgaatcaagagaagaaggttacaaattacgggtaaaagtaaaaaaaggaacaccagctttctatgtaggtaatttaacaggcgaagaaagccattattatgaggtgattgtagttaataatttaaaattaaaaatcatatctattgaagattactatataaattgtgaagtagtataa

SEQ ID NO: 2187 - DNA, 1050 bp, Staphylococcus aureus
atgatacctacgatagaagaaattattgacaagtatggcagtttagtagattgtctaaagtttgatatatcaggtgaggtttatgaagacttattgttattaagaagtttaagcgatttaaatgaacaccaaaagatgcatagagtttcatttatacaaaaacactttaaccctaattttgattatttgttagatgactcagaatttagaagtatgaataaaatttatagaaatttaaatactatgacgtatatcaatagtcaaaacaatgaatttaaacttaaaccatttataaatgaagaacaattaaaatcactacttgcgataaagaaagtagatgaacatttgagttatgacccatctattacctcaaaagcattagcagatataaacaagacgcaaaaaagattggttacaaagccaaatattctctataatcgatccaaaaaagaaaatgagtatgtacggttaggaggaaaaatatcatatacaaagatggagaagcattgggaatatttacataatgagattcagtattataatcttactaatcaattaattagttatgttgctttagaaaaggaatatgcatgggcttttttaaatgaattattttatttaatagaattatatttgaaggcatttaaaggacaaaagaaaactggccatgaatttgaagaaggattgaacgcatttattcaatcatatgtcattattttacttatagatataagattaccgactgttaggttatatattattaggcgtattgtggatgaatgcgaaaaagaatcagataatcaaaaaagaattaaactgatagaggaatccattaaaaagtacagatatgtaaaagaacagattgaaagatttggaaatgcgttgaaagaagaattatcaatcgcgactttgtctattgaacagaatatgttagaagctaaaattgattattataagaattactactatcctagaaaaaaaacaaagcataacaatattgagtacaacgtatcaatgttttttaaagctgtagattctttaaagaaatag

SEQ ID NO: 2188 - DNA, 390 bp, Staphylococcus aureus
gtgcctttaggttgtagatcgtactgtgtttcacaaatgatttcatccgcctgcgactgtgtaatttcttttgaaagatatggttcatctaatgaaatgacgacacctttatcagtatttaacacaccgacacccgtatacaacgatgacagaggcagtgattggcgcattaattgtagtgcattgcttaatgatttaatgtacttctcattgatgctgaagccatacatgattagtgaaggtaacttttgcgatgttaaaatatctgatgtttcaatacgtccaatattttgtccgttggaaataactagtttctcaaccccagatttggggtcaagaaacttgtttttaattaaaattggactagataagcgtatggacttttgctga

SEQ ID NO: 2189 - DNA, 345 bp, Staphylococcus aureus
atggttaatatgtctccacttgggtggttatggccaataatcatacccgttgcgttacttaatatggctgttttaaatatttctcgaggatgtataaccgcaaaattaatggttcctatagagacggtttcaatatgtgtaggttcatttttgctattcaagcaaattaaaatgaagtgttctcggtcagcatttcctatgaagtcacgcataatatcagcagcgtcttttggttcttcaatacgtctttttaaataccaaagtgtatcttctttaaccatttggactttgacaacatctattctttttctactcattatggataagctctatactttctattaa

SEQ ID NO: 2190 - DNA, 1707 bp, Staphylococcus aureus
atgaaagtcgaagtttataaaggagcgcaaggyaaacataaccttaaagattatgaagaaayatataatacttttgattggaaagacgtagaacaagcattttcttggagtgaaactggaaaaatgaacatggcatatgaatgyatagatcgscatgtagatcaargattaggggataaaatagcrttaaattacaaagatgaryacagaaaagaatcgtatacttataaagatatgcaacggttatctaataaagcrgcgaatgttttgtctgaacatgcagaagttgacaaaggtgacagagtatttatatttatgtcgcgtacacctgaactatattttgcgttgttaggtgttttaaaaattggtgcaattgttgggccgttatttgaagcatttatggaaaaggcrgttgcggatagattagagaacagtgaagctaaagtgttaattactaataaggcattgttacctcgagtacctgtagataaattaccraacttgaaaaaaattgttgtcgtagatgaggatgtagaagacaattacatagacttcattagtttgatggaaactgctagcgatgaatttgacattgaatggttaaagtcggatgatggtttgattttacattatacatcaggttctactrggcaacctaaaggtgtattgcatgttcaacaagcratgttagtgcactatatttctggaaaatatgtattagatttacaagaagatgatgtttattggtgtacagcagatccaggttgggttacaggaacatcttatggtatttttgcaccatggttaaatggcgctacaaattgtatagctggtggtcgcttttcrccagaacartggtatagtatgattgaagattttaaagtgacgatttggtatacggcaccaacagctttaagaatgttaatgagtgctggtgacgatattgttgagaaatatgacttgtcatcgttacgttcgattctatcagtaggtgagcctttaaatcctgaagttataaaatgggcgaaaaaagtatacggtttaacggtgttagatacttggtggatgacagaaacaggtggacatatgattgttaactatccaacgatggacgtcaagcttggctcaatgggcaaaccattacctggtattcaagctgcaattatcgatgatgcaggkaatgaattaccaccaaatcgaatgggcaaccttgctataaaaaaaggctggccatcaatgatgtatcgtatctggaagaatccagaaaaatataartcatattttattggagactggtatgtatctggtgattcggcatataaagatgaagatggttacttytggttccaaggacgtgttgatgatgtaattatgacagctggygaacgagttggrccatttgaggttgagtctaaattggttgaacacgaagcagttgccgaagcaggaattattggtaaacctgatccggttcgcggtgaaataattaaggcgtttgttgcactgagaaaaggatatgaaccaacagacgaattaaaagaagaaattcgtwtatttgttaaagaaggtttgtcggcrcatgcagcaccacgtgaaatcgaatttaaagataaattacctaaaacacgstcaggtaaaattatgagacgtgtattaaaagcttgggaattaaatttagatgcwggggatttaagtacaatggaataa

SEQ ID NO: 2191 - DNA, 771 bp, Staphylococcus aureus
atgggcactttaattaagcwagaatgttttaaattgtttaaaaagaaatcgacgtttattataccaattatcattatgttattaatggttgttcaagctataatatctaaaaactatgatgatgttttttctccacaatcatctattgaatcagcatttagtggtttttcatggtttatctttttattaattattcaagccagcaccattatttcaatggagttttatcatggtacaattaaaaatcttctctatcgaaaatatacgagaacaagcattattattagtaaaattattacattaatacttttttcactactgtattttattgttagtattgttgtaggaattattctatgggctattttcttcaacgatatcaatctccttgaaagtaagggtgatgcgttatcgttattaagtaaaatgttattaactggactaggtacatatgttggaacatggttagtcttaagtatcaccttattaatttcatgtgcaatgaaaagtcccggtgtctctattgctgtcggtattgtattgtattttgccacttcaattttgtcagggatattaacaattgttgtagataaatgggaatggttaaaatggaaccctattagtatgatgaatattatggttcaaattgttgataaaaacatgaaaaaattcacaaaattagaactgcatgaattatttattggtaatattgtttatattattattttcttaatcatcgtagtatttgtctttaaaaagaaaaatgtctaa

SEQ ID NO: 2192 - DNA, 696 bp, Staphylococcus aureus
atggatgttttaacagtagaacatttaacaaaaaagataggtaataagactattctcaaagatatttctttaaatttaaaacgaggacagattgtcggtcttgttggagcaaatggggcaggaaaaacatctttgatgaaagttatattaggctactcgatttatcaagaaggtaactttgaagttattgaaaataagcataaaaaaagtaacgttggtgcattgatcgaaaatccaggagtatatccctttatgtcaggctatgacaatcttaaactactaaatgaaactaaaaatactcaagatattgatacaattgtctctcaacttaaaatggatgagtatatacataataaagccaaaacatattccttgggtatgaaacaaaaattaggtattgcaatagctttcttaaatcaaccccaattaattattttagatgaacctatgaatgggttagatcctagggctgtaagagatgttagagaactcattgtaaaaaaagcggaagagggcgttacctttttaatttctagccatatattaagtgagttagtaaaaatcaccaattctatccttatcattaacaaaggtaaaattgttactgaaactaccgaagaagaattaaaccaatataaagataacgatttagaaaatgtattattaagtatcattgataaggaggatcaatcgtaa

SEQ ID NO: 2193 - DNA, 1467 bp, Staphylococcus aureus
atggaacaatatacaattaaatttaaccaaatcaatcataaattgacagatttacgatcacttaacatcgrtcatctttaygcttaccaatttgaaaaaatagcacttattgrgggtaatggtactggcaaaaccacattactaaatatgattgctcaaaaaacaaaaccagaatctggaacagttgaaacgrwtggcgaaattcaatattttgaacagcttaacatggatgtggaaaatgattttaacacgttagacggtagtttaatgagtgaactccatatacctatgcatacaaccgacagtatgagtggtggtgraaaagcaaaatataaattagctaatgtcatatcaaattatagtccgatattacttttagatgaacctacaaatcacttggataaaattggtaaagattatctgaawaatattttaaaatattactatggtactttaattatagtaagtcaygatagagcacttatagaccaaattgctgacacaatttgggatatacaagaagatggcacaataagagtgtttaaaggtaattacacacagtatcaaaatcaatatgaacaagaacagttagaacaacaacgtmaatatgaacagtatataagtgaaaaacaaagattgtcccaagccagtaaagctaaacgaaatcaagcgcaacaaatggcacaagcatcatcaaaacaaaaaaayaaaagtatagcaccagatcgtttaagtgcatcaaaacaaaaaggcacggttgagaaggctgctcaaaaacaagctaagcatattgaaaaaagaatggaacatttggaagaagttgaaaaaccacaaagttatcatgaattcaatttyccacaaaataaaatttatgatatccataataattatccaatcattgcacaaaatctaacattggttaaaggaagtcaaaaactgctaacacaagtacgattccaaataccatatggcaaaaatatagcgctcgtaggtgcaaatggtgtaggtaagacaactttacttgaagctatttaccaccaaatagagggaattgattgttctcctaaagtgcaaatggcatactatcgtcaacttgcttatgaagacatgcgtgacgtttcattattgcaatatttaatggatgaaacggattcatcagaatcattcagtagagctattttaaataacttgggtttaaatgaagcacttgakcgttcttgtaatgttttgagtggtggggaaagaacgaaattatcgttagcagtattattttcaacgaaagcgaatatgttaattttggatgaaccaactaattttttagatattaaaacattagaagcattagaaatgtttatgaataaatatcctggaatcattttgtttacatcacatgatacaaggtttgttaaacatgtatcagataaaaaatgggaattaacaggacaatctmttcatgatataacttaa

SEQ ID NO: 2194 - DNA, 784 bp, Staphylococcus aureus
awrcctaaatggagtaagttrrttaataaactgtctgtgcctatagaagcaaattataagtatgcacgtggtgttgctgtwtayggtgatattaaarayrrtrcaaatgatcatggtgaaattatcaaaaagcatcgmaaygayrwwaatgtcrtatayagaratgtgattgtacttgattacgatgaaataaatgatkwaaarcaaytacatgamgcaatcagctcagytttaagcartgttgcatggtwttggcacacawcgttwmkcgcayasaactgaacaagctagaatacgcytgtatatccctctaaatgagcgaataagtgcagatgattatcgtaaatatwcaaargtattagcaaayaaaattggycataaagtkgatgaaggttcrtatcagccaagtagatgttttgcrttaccagttattcaaaaaggrcacatatttattaagcgagtgaatgactgtccaattatsgatgttgatatgctcgaacagtggtcraaggarywtraacaatcaaatgstagtcctaatrtyawagggtacacrcgacgtgatagtgcgtattggcgagatatagcttttggtgtaagtgagggagagcgcaattcaacattggcttcaattacaggttatcttttgcgtaggtatgtagatccaaacttagtttatgggttagtgagtgcgtgggcragtgtatgcaaaccacctattaatcaaagtgaagtaaayaatacttttaaaagtattttgaaaaaagatagtaaaarcagttag

SEQ ID NO: 2195 - DNA, 990 bp, Staphylococcus aureus
atgacagttactatatatgatgtagcaagagaagcgcgtgtctctatggccacagtgtcgcgtgttgttaatgggaaccaaaatgttaaagcagaaactaaaaataaagttaacgaagtcattaagcgtttgaattatcgtccaaatgctgttgctagaggtttagctagtaaaaagacaacaacagtaggtgtgatcattccagatatatctaatatctattattcacaacttgctcgtggacttgaagatattgcaayaatgtataaatatcactcaattatttcaaattcagataacgatcctgaaaargaaaaagaaatttttaataacttattaagtaaacargttgatggtattattttccttggtggtacaattactgaagaaatgaaagaattgataaatcaatcatctgtacctgtagtagtatcaggaacaaatggtaaggatgcacatatagcatcwgttaatattgattttactgaagctgcgaaagaaattacgggaraattaattgaaaaaggcgctaaatcatttgctttagtaggtggagaacattctaaaaaagctcaagaagatgtwttagmaggtttaactgaagtgttaaataaaaatrgycttcaattaggtgatacattgaattgttctggtgctgaaagttataaagaaggcgtaaaagcttttgcyaaaatgaaaggyaayytkccagatgcyatwttatgtatcagygacgaagaagcwattggtatyatgcatagtgcaatggatgctggtattaaagttccagaggaattacaaattattagtttcaataatacacgmttagttgagatggttagaccacaactttctagtgttattcarccattatatgatatcggtgcagtagggatgcgcttattaacaaaatatatgaacgatgaaaagatagaagaaccmaatgtagttttaccwcacagaattgaataccgaggaactacaaaataa

SEQ ID NO: 2196 - DNA, 879 bp, Staphylococcus aureus
gtgcaaaaaatgaatgaaattaaattagaatatgacacacatgtttcagtggtacattatgaaagtttagactcacgttcatttaagagcttttcaaaacctaaatggagtaagttrrttaataaactgtctgtrcctatagaagcraattataagtatgcacgtggtgttgctgtttacggtgatattaaaaacggtgcaaatgatcatggtgaaattatcaaaaagcatcgmaaygayrwwaatgtcrtatacagagatgtgattgtacttgattaygatgaaataaatgatttaaagcaattacatgaagcaatcagctcagctttaakcaatgttgcatggttttggcacacamgttmmkcgcayasaactgaacaagctagaatacgcctgtatatccctctraatgagcgaataagtgcaratgattatcgtaawtatwcaaargtattagcaaataaaattggtcrtaaagtggatgaaggttcatatcagccaagtagatgttttgcactaccagttattcaaaaaggacacatatttattaaacgagtgaatgactgtccaattatggatgttgatatgcttgaacagtggttaaaggagtatgarcaatcaaatgytagtcckartgtcatagsatacacscgacgmgatagtaagtaytggcgmgagttatgctttggaacaaccgaaggcaatcgtaacaatgcactagctagcttagttgggcatttattaagatgtcacgttaatgattatattgtktattcattygctttattatggggrcaattcgcatgtaaaccacctatgaaagaacaagaaatcaacgccacttttcaatcgatattaaataaacactataacaattag

SEQ ID NO: 2197 - DNA, 1471 bp, Staphylococcus aureus
ttggaaratgtwacaaaygawgaagtrtttgaaatgattgatagyagaaccggtgttttaaatgctaatgattggaaaagtcaattaaggcgttctgcyactacacaagcattgaaaaaaacgactacaaatgcygaaatcatattgtgtaatgatgagagtttaaaagggctagtacaatatgacgcttttgaaaaagtaaccaarctgaaacgtctaccgtattggaggtcaaaaggrgatrcgaattattattgggctgatatagataccacacatgtgatttcacatattgataaattgtataatgtgcagtttagccgygatcttattgatactgtaattgaaaaggaagcwtatcaaaatagattycaccctattaaatcgatgattgaatctaaatcatgggayggaatcaaaagaattgaaacgctcttcattgattatttaggtgctgaagataaycactayaatmgagaagttacaaaraaatggatgatgggygcagttgctagaatctatcagccaggtattaaatatgattccatgattattttatatggtggtcaaggtgttggraaatctacggcagtgagtaaattgggaggtcattggtataaccaaagtattaaaacgtttaaaggtgatgaggtytataagaaattgcagggttcttggatatgtgaaattgaagaactgtcggcatttcaaaagtctactattgaagatattaagggktttataagtgcyattgtagatatttatagagcttcgtatggtaaacgmacagagcgtcatcctagacagtgtgtgtttgtagggacaaccaataactatgagtttttaaaagaccaaacaggcaatcgtcgttttttccctattacgacagataaaaataaagcaactaaaagcccrtttgacgatctaacaccagwtgttgtgcaacaaatgtttgcygaagctaaagtatattttgatgagratccgacggataaagcattgttrytagataaagaagcgagtgaratggctttaawagtccaagaagctcattctgaaaaagatgctttagttggagaaatagaagaattycttgaacgtcctattccgtcagactattggtatagaacgttagragaaaaaagagtgtctgcgcatgatgttatagaccaagactatattaaattatatggtgatggtaaattgattgaattaccgaatrcaaaaccaggtgcttatgtatggcgtgacaaggtatgtagcatggaaatttggaaagtgatgatgaaacgagatgaccaaccacaacaacaccatttaagaaaaattgataaagcgttaagaaatacaarttattgtgrrcamwgtgaarwmgcrwmmkmgatwtggtgaaggtattggtarrcaatatggytttrgtrtwratttarywtcytattatcaagrwtywwarwkywaagaacaaaaataa

SEQ ID NO: 2198 - DNA, 1092 bp, Staphylococcus aureus
atgagtaataaattagaatcatacagaagtgagattgtmtcactgaatcatcaaattttagayttattatctaaacgtggtgaactagcacaaaaaattggggargaaaaattaaaacaaggtacacgtatytatgatccacaacgygaaaaagaaatgcttaacgacttaatygatagyaacaaaggaccattyaacgataatacwattaagcaattatttaaagaaattttyaaagcctctacagatttacaaaaatctgaaaatgaaaaacayttataygtatcacgtaagttgaaacctgaagatacgattgtaacatttgataatgggggcattatwggagacggcaataaatcatttgtatttgggccatgttcagttgaatcatttgaacaagttgaagctgttgctaaaaacttacatgctaaaggtgaaaaatttattcgtggcggtgcatttaarccacgtacatcaccatatgayttccaaggyytaggtgtygaaggwcttaaaatacttaaacarattaaagataaatatgatttaaatgttgtcagcgaaatcgtaaatccaaatgattttgaagtggctgatgagtatttagacgtattccaaattggtgcacgtaatatgcaaaacttcgagttattaaaagaagctggccgtacgaaaaagcctattctattaaaacgtggtttatctgctacaatcgaagagtttgtttatgcagctgaatacattgcttcacaaggtaatcaaaacattattttatgtgaacgtggaatccgaacttatgaaaaggcgacacgtaacactttagatatttcagcagtaccaattttaaaacaaggtacacacttaccagtcatggtagatgtwacgcatagtacaggtcgtaaagatatcatgttaccaactgcgaaagcagcattagcagtwggtgctgatggmgttatggctgaggtgcatccagatccatctgttgcacttagtgatgcgggtcaacaaatggatttagatgaattccaagcattttatgatgaattaaagcctttrkctgatttatataacgctaaaaagttaaaataa

SEQ ID NO: 2199 - DNA, 1257 bp, Staphylococcus aureus
atgattaatcagtctatatggcgcagtaactttcgcattttatggctcagtcagtttatagcgattgctggactgacagtacttgtgccattattgccaatttatatggcatcactacaaaatctatcagtcgtagaaatacagttgtggagtggtatagcgattgctgctccagctgtaacgacgatgatagcttcgccgatatgggggaagctaggtgataagatyagycgraaatggatggtsytamgagcgttacttggtttggcggtatgyttatttttaatggcattgtgtackacaccattacagtttgtacttgtgaggttattgcagggactatttggtggtgttgttgatgcatcaagtgcgtttgcgagtgcagaggcgccagctgaagatcgtggaaaggtattaggaagactgcaaagttcagtcagcgcagggtctcttgtgggrccattaattggcggtgttacagcttcgatattaggttttagtgcgttactgatgagtattgccgttattacttttattgtctgtattttcggtgcattaaaattgattgaaacgacacatatgccaaaatcacaaacaccaaatattaataaaggtattcgccgttcatttcaatgtctattatgcacacaacaaacatgtcgatttattatcgttggcgttttagcaaactttgctatgtatggcatgctaactgcattatcaccacttgcttcatcagtgaatcatacagcgatagatgaccgtagtgtgattggatttttacagtccgcattttggacggcttcgatattaagcgcgcctttatggggwcgctttaatgataaatcatatgttaaatcagtatatatatttgccacgattgcatgtggttgtagtgcgatactgcaaggtttagcgacgaatrtagartttttaatggctgcaagaatacttcaaggattaacatatagtgcattgattcaaagtgtcatgtttgtygtcgtgaatgcgtgtcatcaacaacttaaaggcacatttgttggwacgacraayagtatgttagttrttggtcaaattattggyagtcttagtggcgctgccattacaagttatactacaccagctactacgtttatcgttatgggcrtagtatttgcwgtaagtagtttatttttaatttgttcaaccatcactaatcaaatcaacgatcacacattaatgaaattatgggagttgaaacaaaaaagtgcaaaataa

SEQ ID NO: 2200 - DNA, 1572 bp, Staphylococcus aureus
gtgacttgcttgaaacaaatcacatggcacgacttacaacatatcattaaagatgrtgatgtgattggtttaccagcattagctgtagccaacttacccgccgaagttctacgtgctgtgttagcgcaacatgacacatatcatacgcccaawgatttaacrtttatattagcgaatgatatycatagtttaggtgycgcaccggatttagatgattttatagaacgtcgcatgattaaacgtgtcattatgagyattttaacggcttcttccaaaacggcacaagcaatgaaaaataatgacattgaagcttattttttrccacaaggtatcattgcaactcattatcgtcagagtaatcaattattacckggagttattactaaaatcggattaaacacagctgttgatcctagatacggtggcggtaaagtaaatacacgaacaackgatgatttagtttcattagtaacyatcracgatgaaacatacttacaytacacattccctagcgttgatgtggcactactgagaggaacatacgcagatcaacaaggtaacatttatttaactcaagaakcktacttgagcgagtgttatcatgtcgcattaaacgcgaaagccaatcatgggaaagttattgtacaagttaaagmtttagttgacgrmtatcaactaaarccgaatgaagttgttatcccaggaaatcttgtcgattatgtatacgtcacagaagatgaaaagaatcaccgccaagtaattcaragtcattatttaccagccttgtctggagaagaacgrattgatggaatacctgaacccgcattaccttttaatagtcgcaarttgattctccgacgtgctgctcagtttttaacttatggcgatacaattagcatcggttatggcatcaataatgaactctctaatttattgcaygaagaatgtgttgaacatgatgtgcaaccgattytagatgttggcattttcggtggattcgttgggagtcgtgaacattttggtatgaattacaatgcagatgtgcgcatgcctcatgatcgagcatgggattttatttataacaatggtgtatcagttgcctatcttagctttgctgaggttgatcaatacggcaatgtcaacgtgtcttacttcaatgaccgactaaatggatgtggyggctttatagacattacrcaatctgtaaataaaattatcttttcaggtacttttgtagctggcagtcatgtctcatgycataatcaacgattaaacattgaaactgaaggacaaaaccagaaatttgtatcagatgtgagccatatcgactttaatgcacaatattcacaatyactcgagcaagaartctattttgttactgakcgtgcagtattcgarctcaccaatcaaggcttgaaactaattgaaattgcaccaggtcttgatttgcataaagatattttgaatcaaatggcttttaaaccaattattgctgatcatttaaaattaattgataccagcatttacaaagaaaaatggggasaacttaaacaatcaattcataaagtatga

SEQ ID NO: 2201 - DNA, 363 bp, Staphylococcus aureus
atgaataaaaatcaattaaagtcagaaattttagaatatataaaggcgcatgctggtacatcatttgtagaaatagaacgtgtatttgaagaaaataactttgattataaaggtgacggcgcatatacaagtggtcaacatcccaatgttgtgttttggattgggtggaatcaagaagcgtttgatgttatcgctgaacttaaaaaagacagacgtattgagatggatatttgtgagccaattgtttatatggttgatggtaaaggtttggatttgcctattgtaagktcgaaaaacattaaaacagatcattggctacctgtcacgtttactattagtaagaaagaaacggagtgtgtctaa

SEQ ID NO: 2202 - DNA, 1518 bp, Staphylococcus aureus
atgacgcagcaacaaaatgataaaagaacattaaaaaataaacacacttatcaaaatgaaccactaccaaaccgtaaagattttgttgttagttttataactggcgcgcttgttggttcagctttaggtttgtattttaaaaataaagtttatcaaaaagcagatgatttaaaagtcaaagaacaagaactgtcgcaaaagtttgaagaaagaaaaacgcaacttgaagaaacggttgcctatacaaaagaacgtgttgaaggatttttaaacaaatctaaaaatgagcaagcggcattaaaggcacaacaagcagcgataaaagaagaagcaagtgcaaataatttaagtgatacatcacaagaagcacaagagattcaagaagctaaaagagaagcacaagcagaagcggataaaagtgtggctgtatcaaataaagaatcaaaagcagtggcattgaaagcacaacaagcagcgataaaagaagaagcaagtgcaaataatttgagtgatacatcacaagaggcacaagagattcaagaagctaaaaaagaagcacaagcagaaacagataaaagtgcagctgtatcaaatgaagaaccaaaagcagtggcattgaaagcacaacaagcagcgataaaagaagaagcaagtgcaaataatttaagtgatacatcacaagaggcacaagaggttcaagaagctaaaaaagaagcacaagcagaaacagataaaagtgcagctgtatcaaatgaagaaccaaaagcagtggcattgaaagcacaacaagcagcgataaaagaagaagcaagtgcaaataatttaagtgatayatcacaagaggcacaagaggttcaagaagctaaaaaagaagcacaagcagagaaagacagtgacacatyaactaaagatgcaagtgcagcaaaggtagaagtatcaaaaccagagtcacaagctgaaagattagcaaacgctgcaaaacagaagcaagctaaattaacaccaggttcaaaagagagtcaattaactgaagcgttatttgcagaaaaaccagttgctaaaaatgacttgaaagaaattcctcaattagttactaaaaagaatgatgtatcagagacagagacggttaatatagataataaagacactgttaaacaaaaagaagctaaatttgaaaatggtgttattacacgtaaagctgatgaaaaaacaactaataatacagctgttgacaagaaatcaggtaaacaatctaaaaaaacaacaccttcaaataaacgaaatgcatcaaaagcatctacaaataaaacttcaggtcagaaaaagcaacataataagaaatcatcacaaggtgcaaagaaacaaagtagttcaagtaagtyaactcaaaagaataatcaaactagtaataagaattcaaaaacaacaaatgctaaatcatccaatgcatcaaaaacgccaaatgctaaagttgaraaagctaawagtaaaatagagaaacgtacattcaatgactaa

SEQ ID NO: 2203 - DNA, 1359 bp, Staphylococcus aureus
atgacgcagcaacaaaatgataaaagaacattaaaaaataaacacacttatcaaaatgaaccactaccaaaccgtaaagattttgttgttagttttataactggcgcgcttgttggttcagctttaggtttgtattttaaaaataaagtttatcaaaaagcagatgatttaaaagtcaaagaacaagaactgtcgcaaaagtttgaagaaagaaaaacgcaacttgaagaaacggttgcctatacaaaagaacgtgttgaaggatttttaaacaaatctaaaaatgagcaagcggcattaaaggcacaacaagcagcgataaaagaagaagcaagtgcaaataatttaagtgatacatcacaagaagcacaagagattcaagaagctaaaagagaagcacaagcagaagcggataaaagtgtggctgtatcaaatgaagagtcaaaagcatcggcattaaaagtacaacaagcagcaataaaagaagaagcaagtgcaaataatttaagtgacacgtcacaagaggcacaagagattcaagaagctaaaaaagaagcacaagcagaaacagataaaagtgcagctgtatcaaatgaagaaccaaaagcagtggcattgaaagcacaacaagcagcgataaaagaagaagcaagtgcaaataatttaagtgatacatcacaagaggcacaagaggttcaagaagctaaaaaagaagcacaagcagagaaagacagtgacacatcaactaaagatgcaagtgcagcaaaggtagaagtatcaaaaccagagtcacaagctgaaagattagcaaacgctgcaaaacagaagcaagctaaattaacaccaggttcaaaagagagtcaattaactgaagcgttatttgcagaaaaaccagttgctaaaaatgacttgaaagaaattcctcaattagttactaaaaagaatgatgtatcagagacagagacggttaatatagataataaagacactgttaaacaaaaagaagctaaatttgaaaatggtgttattacacgtaaagctgatgaaaaaacaactaataatacagctgttgacaagaaatcaggtaaacaatctaaaaaaacaacaccttcaaataaacgaaatgcatcaaaagcatctacaaataaaacttcaggtcagaaaaagcaacataataagaaatcatcacaaggtgcaaagaaacaaagtagttcaagtaagttaactcaaaagaataatcaaactagtaataagaattcaaaaacaacaaatgctaaatcatccaatgcatcaaaaacgccaaatgctaaagttgaaaaagctaatagtaaaatagagaaacgtacattcaatgactaa

SEQ ID NO: 2204 - DNA, 1191 bp, Staphylococcus aureus
atgacgcaacaacaaaataataaaagaacattaaaaaataaacacacttatcaaaatgaaccattaccaaaccgtaaagattttgttgttagttttataactggcgcgcttgttggttcagctttaggcttatattttaaaaataaagtttatcaaaaagcagatgatttaaaagtcaaagaacaagaactgtcgcaaaagtttgaagaaagaaaaacgcaacttgaagaaacggttgcctttacaaaagaacgtgttgaaggatttttaaacaaatctaaaaatgaacaagcggcattgaaggcacaacaagcagcaataaaagaagaagcaagtgcaaataatttaagcgatacatcacaagaggcacaagagattcaagaagctaaaagagaagcacaaacagaaacggataaaagtgcggctgtatcaaatgaagagtcaaaggcatcggcattgaaggcacaacaagcagcgataaaagaagaagcaagtgcaaataatttaagtgatacatcacaagaagcacaagcgattcaagaagtgaagaaagaagcgcaagcagaaacagataaaagtgcagatgtatcaaatgaagaatcaaaagcatcgacattaaacgtatcgaaagaagagtcacaagctgaaagattagcaaacgctgcaaaacagaagcaagctaaattaacaccaggctcaaaagagagtcaattaactgaagcgttatttgcagaaaaaccagttgctaaaaatgacttgaaagaaattcctctattagttactaaaaagaatgatgtatcagaaacagttaatacagataataaagacactgttaaacaaaaagaagctaaatttgaaaatggtgttattacacgtaaagctgatgaaaaaacacctaataatacagctgttgacaagaaatcaggtaaacaatctaaaaaaacaacaccttcaaataaacgaaatgcatcaaaagcatcgacaaataaaacttcaggtcagaaaaagcaacataataagaaagcatcacaaggtgcaaagaaacaaagtagttcaagtaactcaacgacaaagactaatcaaaaaaattcaaaagcaacaaatgctaaatcatccaatgcatcaaaaaaatcaaatgctaaagttgaaaaagctaaaagtaaaatagagaaacgtacatttaatgactaa

SEQ ID NO: 2205 - DNA, 1047 bp, Staphylococcus aureus
atgacgcaacaacaaaataataaaagaacattaaaaaataaacacacttatcaaaatgaaccattacccaaccgtaaagattttgttgttagttttataactggcgcgcttgttggttcagctttaggtttgtattttaaaaataaagtttatcaaaaagcagatgatttaaaagtcaaagaacaagaactgtcgcaaaaatttgaagaaagaaaaacgcaacttgaagaaacggttgcctttacaaaagaacgtgttgaaggatttttaaacaaatctaaaaatgagcaagcagcattaaaagcacaacaagcagcaataaaagaagaagtaagtgcaaataatttaagtgatacatcacaagaggcacaagagattcaagaagctaaaagagaagcacaagcagaaacagataaaagtgtagctgtatcaaatgaagaatcaaaagcagtggcattaaaggtatcgaaagaagagtcacaagctgaaagattagcaaacgctgcaaaacagaagcaagctaaattaacaccaggttcaaaagagagtcaattaactgaagcgttatttgcagaaaaaccagttgctaaaaatgacttgaaagaaattcctcaattagttactaaaaagaatgatgtatcagagtcagagacagttaatatagataataaagacactgttaaacaaaaagaagctaaatttgaaaatggtgttattacacgtaaagctgatgaaaaaacaactaataatacagctgttgacaagaaatcaggtaaacaatctaaaaaaacaacaccttcaaataaacgaaatgcatcaaaagcatctacaaataaaacttcaggtcagaaaaagcaacataataagaaatcatcacaaggtgcaaagaaacaaagtagttcaagtaagtcaactcaaaagaataatcaaactagtaataagaattcaaaaacaacaaatgctaaatcatccaatgcatcaaaaacgccaaatgctaaagttgaaaaagctaatagtaaaatagagaaacgtacattcaatgactaa

SEQ ID NO: 2206 - DNA, 492 bp, Staphylococcus aureus
atggattggattttaccaattgctggaattatcgctgcgattgcattcttaattttatgtatcggtatcgtagctgtattaaattctgttaagaaaaacttagattatgttgcaaaaacacttgacggtgtagaaggtcaagttcaaggtattactcgtgaaacaacagatttacttcataaagtaaaccgtttaactgaggatatccaaggtaaagtagatcgtttaaactcagtwgtagatgctgttaaaggtatcggtgactcagtacaaacgttaaacagctctgtagatcgtgtaacaaattcaattacacataatatttctcaaaatgaagataaaatctcacaagttgttcaatggtcaaatgttgcaatggaaattgcagacaaatggcaaaatagacactaccgtcgtggaagtgcaaattacaaagctaataatgtagcaactgatgcaaatcatagctatacttctmgagtagataaataa

SEQ ID NO: 2207 - DNA, 642 bp, Staphylococcus aureus
atgaacatagaaactrtmgtaaatsaatttgaracrcgagcaggcacgytaytaaggtaytacacdggwttattagaamrtagtaragtrcaaccrtdtygctttaarwtatayaatgatccrtttgatatggtwtaygtgrtgatgaahrrbaarttrtwyrgwcatgtatatattaaagattgtaargtraggmartcrtttgaattagcgtcacctaagcacactgaggggcttataagaagyatagarggkcattatgtaggttatgaattacatgayggtaaacakctttctattagygatatgatggcyagtcawttrtttgaagatgagtattttatgtatggrytacaaacatatgyagaatcaaataatagtgatgtgtttragtrcytagaaaatggatttgatacmgatacacttgagggcattcaatcragtaatactgatgtgatagcgaatattgaaatgttgtatcagttagctacgggaatcaatgaaccagyacsagagttagttgagggrttaaaattagtaactgagtttgtacaagatgagaatgcgacacaagaggattacaaggckttagaacgtaaattgaatgatctaaaagcgtcttactatagcttgagtaaataa

SEQ ID NO: 2208 - DNA, 1314 bp, Staphylococcus aureus
atgacacactatcattttgtcggaattaaaggttctggcatgagttcattagcacaaatcatgcatgatttaggacatgaagttcaaggatcggatattgagaactacgtatttacagaagttgctcttagaaataaggggataaaaatattaccatttgatgctaataacataaaagaagatatggtagttatacaaggtaatgcattcgcgagtagccatgaagaaawagyacgtgcacatcaawtgaaattagatgttgtaagttataatgattttttaggacagattattgatcaatatacttcagtagctgtaactggtgcacatggtaaaacttctacaacaggtttattatcacatgttatgaatggtgataaaaagacttcatttttaattggtgatggcacaggtatgggattgcctgaaagtgattatttcgcttttgaggcatgtgaatatagacgtcactttttaagttataaacctgattacgcaattatgacaaatattgatttcgatcatcctgattattttaaagatattaatgatgtttttgatgcattccaagaaatggcacataatgttaaaaaaggtattattgcttggggtgatgatgaacatctacgtaaaattgaagcagatgttccaatttattaytatggatttaaagaktcggatgacatttatgctcaaaatattcaaattacggataaaggtactgcttttgatgtgtatgtggatggtgagttttatgatcacttcctrtctccacaatatggtgaccatacagttttaaatgcattagctgtaattgcgattagttatttagagaagctagatgttacaaatattaaagaagcattagaaacgtttggtggtgttaaacgtcgtttcaatgaaactacaattgcaaatcaagttattgtagatgattatgcacaccatccaagagarattagtgctacaattgaaacagcacgaaagaaatatccacataaagaagttgttgcagtatttcaaccacacactttctctagaacacargcatttttaaatgaatttgcagaaagtttaagtaaagcagatcgtgtattcttatgtgaaatttttggatcaattagagaaaatactggcgcattaacgatacaagatttaattgataaaattgaaggtgcatcgttaattaatgaagattcyattaatgtattagaacaatttgataatgctgttrttttatttawgggtgcaggtgatattcaaaaattacaaaatgcatatttagataaattaggcatgaaaaatgcgttttaa

SEQ ID NO: 2209 - DNA, 3825 bp, Staphylococcus aureus
atgagctggtttgataaattattcggcgaagataatgattcaaatgatgacttgattcatagaaagaaaaaaagacgtcaagaatcacaaaatatagataacgatcatgactcattactgcctcaaaataatgatatttatagtcgtccgaggggaaaattccgttttcctatgagcgtagcttatgaaaatgaaaatgttgaacaatctgcagatactatttcagatgaaaaagaacaataccatcgagactatcgcaaacaaagccacgattctcgttcacaaaaacgacatcgccgtagaagaaatcaaacaactgaagaacaaaattatagtgaacaacgtgggaattctaaaatatcacagcaaagtataaaatataaagatcattcacattaccatacgaataagccaggtacatatgtttctgcaattaatggtattgagaaggaaacgcacaagycaaaaacacayaatatrtattctaataatacaaatcatcgtgctaaagattcaactmcagattatcacaaagaaagtttcaagacttcagaggtaccgtcagctatttttggcacaatgaaacctaaaaagttagaaaatggtcgtatccctgtaagtaaaycttcagaaaaagttgagtcagataaacaaaaatatgataaatatgtagctaagacgcaaacgtctcaaaataaacawttagaacaagaraaacaaaawgatagtgttgtcaarcaaggaactgcatctaaatcatctgatgaaaatgtatcatcaacaacaaaatcaayrcctaattattcaaaagttgataatactatcaaaattgaaaayatttatgcttcacaaattgttgaagaaattagacgtgaacgagaacgtaaagtgcttcaaaagcgtcgatttaaaaaagcgttgcaacaaaagcgtgaagaacataaaaacgaagagcaagatgcaatacaacgtgcaattgatgaaatgtatgctaaacaagcggaacgctatgttggtgatagttcattaaatgatgatagtgacttaacagataatagtacagakgctagtcagcttcatacaaatgrmatagagratgaarctgtatcaaatgatgaaaataaamaagcgtcaatacaaaatgaagacactratgacactcatgtagatgaaagtccatacaattatgaggaagttagtttgaatcaagtatcgacaacaaaacaattgtcagatgatgaagttacggtttcgratgtaacgtctcaacrtcaatcagcactrcaacataacgttgaagtaaatratmaagatgaactaaaaaatcaatccagattaattgctgattcagaagaagatggagcaacgaatraagaagaatattcaggaagtcaaatcgatgatgcagaattttatgaattaaatgatacagaagyagatgaggatactacttcaaatakcgaagataataccaatagaracgcgtctgaaatgcatgtagacgctcctaaaacgcaagagyacgcagtaactgaatctcaagtwaataatatcgataaaacggttgataatgaaattgaattagcrccrcgtcataaaaaagatgaccaaacaaacttaartgtcaactcattgaaaacgaatgatgtgaatgatrrtcatgttgtggaagattcaagcatgaatgaaatagaaaagmawaacgcagaaattacagaaaatgtgcaaaacgaagcagctgaaagtraacaaaatgtcgaagagaaaactattgaaaacgtaaatccaaagaaacagactgaaaaggtttcaactttaagtaaaagaccatttaatgttgtcatgacgccatctgataaaaagcgtatgatggatcgtaaaaagcattcaaaagtcaatgtgcctgaattaaagcctgtacaaagtaarcaagctgygagtgaaagmawgmctgcgastcaarmcrcaccatcatcaagwwytgattcacaagagtcaaayacraatgcatataaaacaaataatatgacatcaaacaatgttgagaacaatcaacttattggycatgcagmaacagaaaatgattatcaaaatgcacaacaatattcagagcagaaaccttctgytgattcaactcaaacggaaatatttgaagaaagycaagatgataatcaattggaaratgagcaagttgatcaatcaacttcgtcttcagtttcagaagtaagcgacataactgaagaaagcgaagaaacaacacatcmaaacaatactagtggacaacaagataatgatgatcaacaaaaagatttacagyywtcattttcaaatmaaaatgaagatacagctaatgaaaatagacctcggacgaaycaacmagatgttgcaacaaatcaagctgtacaaacwtctaagccgatgattcgtaaaggcccaaatattaaattgccaagtgtttcattactagaagaaccacaagttattgagycggacgaggactggattacagataaaaagaaagaactkaatgacgcattattttactttaatgtacctgcagaagtacaagatgtaactgaaggtccaagtgttacaagatttgaattatcagttgaaaaaggtgttaaagtttcaagaattacggcattacaagatgacattaaaatggcattggcagcgaaagatattcgtatagaagcgccwattccaggaactagtcgtgttggtattgaagttccgaaccaaaatccaacgacrgtcaacttacgttctattattgaatctccaagttttaaaaatgctgaatctaaattaacagttgcgatggggtatagaattaataatgaaccattacttatggatattgctaaaacgccacacgcactaattgcaggtgcaactggatcagggaaatcagtttgtatcaatagtattttgatgtctttactatataaaaatcaycctgaggaattaagattattacttatygatccaaaaatggttgaattagctccttataatggtttgccacatttagttgcaccggtaattacagatgtcaaagcagctacacagagtttaaaatgggccgtagaagaaatggaamgacgttataagttatttgcacattaccatgtacgyaatataacagcatttaacaaaaaagcaccatatgatgaaagaatgccaaaaattgtcatwgtaattgatgagttggctgatttaatgatgatggctccgcaagaagttgarcagtctattgctagaattgctcaaaaagcragagcatgtggtattcatatgttrgtagctacgcaaagaccatctgtcaatgtaattacaggtttaattaaagccaacataccaacaagaattgcatttatggtatcatcaagtgtagattcragaacgatattagacagtggtggagcagaacgcttgttaggatatggcgatatgttatatcttggtagcggtatgaataaaccgattagagttcaaggtacatttgtttctgatgacgaaattgatgatgttgttgattttatcaaacaacaaagagaaccggactayctatttgaagaaaaagaattgttgaaaaaaacacaaacacaatcacaagatgaattatttgatgatgtttgtgcatttatggttaatgaaggacatatttcaacatcattaatccaaagacatttccaaattggctataatagagcagcaagaattatcgatcaattagagcaactcggttatgtttcgagtgctaatggttcaaaaccaagggatgtttatgttacggaagcagatttaaataaagaataa

SEQ ID NO: 2210 - DNA, 645 bp, Staphylococcus aureus
atggatatagcaaatatgactattatgttgctaattggcgtactgggtggatttatatctggattaataggtattgggggcgcaattattatttacccagctattcttatattgccaccattaataggtatacctgcgtatagtgcatatattgcttcgggacttacctctagtcaagtatttttcagtacacttagtggatcattaaatgcaagaaaacaaccagctttctctcctaaacttgttatatatatgggagggggtatgttgattggaagcatgttaggggcaattttagctagtttgtttaatgctacttttgtaaatacggtatatgtaataatcgccatacttgctttaatattgatgtttattaaagttaaacctactacacaagagacgaaatctaaacctttgctatttattatagttggatttggaattggtgtaatttcgggaattgtgggtgcaggtggagcatttatcatcattcctgtattattagcattatttaaattaccaatgaatacggtagtgaacaatagcatagcaattgcttttatatcttcagtaggggcattttttataaaattaatgcaaggatatataccagtagaaagtgcaatttttttgataattgaatga

SEQ ID NO: 2211 - DNA, 261 bp, Staphylococcus aureus
atgacttatgataaaaaaatgattaatcgtataaatagaatacaaggtcaattaaatggtgtcgtaaaaatgatggaagaagaaaaagattgcaaagatataattacgcaacttagtgcatctaaaggttctatacaacgtttaatggggattataattagtgaaaatttaatagaatgcgttaaaacagcagaagaaaataatgaaagttctcaagaattaattaatgaagcagttaatttattagttaaaagtaaataa

SEQ ID NO: 2212 - DNA, 1131 bp, Staphylococcus aureus
ataaatgataatgaaaaaagagtgctaagggaaatttataaccatcataatatttcgcgtactcaaatatctaaaaatcttgagattaataaggcaacgatttctagtattttgaataagttaaagtataaatctcttgttaatgaggttggtgagggtgatagcacgaagagtggtggtagaaaacctattcttctgaaggttaatcatctttatggttattttatttctttggatttaacttatagttctgttgaagtgatgtacaattattttgatggtaatgtcattaagcatgaatcttatgatttacctgatgaaaaggttagtagtatattaagcataataaaaaaacatattgatattcaggagaaacttgatacttataacggactattaggtgtgtctgtttctatacatggagttgtggataatgagcagcatgtgacatatttaccattccatgaaactgaaggaatttcaattgctaagaaaataaaagaaattactaatgttccagtcgtagttgaaaatgaagcgaatctttcagcgttatatgaacgtaattttaatcataatttatcctacaataatcttattgctttaagtatacataaaggtattggtgctgggcttattattaataatcaattgtatcgtggtgcaaatggggaagykggtgaaattggaaaaacacttgtctcaaaagttagcgataatgtggagatctttcataagattgaagatattttttcamaagaagctttactgcataatttaagtaatcaactaaatgagaagatgacgcttagcaaattaattcaattttataatgaaaaaaatccagtcgtagttgaagaaatggaacaatttataaataaaattgctgttttaatacataatttaaacacccagtttaatccgaatgcaatttacattaactgtccattgttcaatgaaatgcctgaaatattagaagcaattaagaaccagttcaaacaatattcacgtaacgaaattcaaataaagttaacatctaatgtcaaatttgcaactttgctaggtggtacattagcaattatccaaaaagtactacagattaatgatatttacttagatataaaagcataa

SEQ ID NO: 2213 - DNA, 372 bp, Staphylococcus aureus
atggataataaaacgtatgaaatatcatctgcagaatgggaakttatgaatatcatttggatgaaaaaatatgcaagtgcgaataatataatagaagaaatacaaatgcaaaaggactggagtccaaaaaccattcgtacacttataacgagattgtataaaaagggatttatagatcgtaaaaaagacaataaaatttttyaatattactctcttgtagaagaaagtgatataaaatataaaacatctaaaaactttatcaataaagtatacaaaggcggtttcaattcacttgtcttaaactttgtagaaaaagaagatctatcacaagatgaaatagaakaattgagaaatatattgaataaaaaataa

SEQ ID NO: 2214 - DNA, 597 bp, Staphylococcus aureus
atgaatttattttacaatcctaaatatgtaggagatgtcgcatttttacaaattgaaccagttgaaggtgaattaaactacaataaaaaaggtaatgttgttgaaattactaatgaaggtaatgttgtaggttataatatttttgaaatttcaaaagatataacaattgaagaaaaaggtcatattaaattaactgatgaacttgtaaatgtattccaaaagcgtatttcagaagctggttttgattataaattaaatgctgatctatcaccgaaatttgtagttggctacgttgaaactaaagacaaacatcctgatgcagataaattaagtgtactaaatgtaaacgttggaaatgacacattacaaattgtatgtggcgcgcctaacgttgaagctggacagaaagttgttgttgctaaagtaggtgcagtgatgcctagcggtatggtaattaaagatgctgaattacgtggtgttgcctcaagcggtatgatttgttcaatgaaagaattgaatttacctaatgcacctgaagaaaaaggtattatggtattaaatgacagctatgaaattggacargcattttttgaataa

SEQ ID NO: 2215 - DNA, 703 bp, Staphylococcus aureus
atgaaaaatatttcagaattctcagcccaacttgatcaaacttttgatcaaggggaagccgtctctatggagtggttattccgtccgttgctaaaaatgctggcggagggcgatccagtccccgttgaggacatcgcggcggagaccgggaagcccgtcgaggaagttaagcaagtcctacagactctacctagtgtggaacttgatgagcagggccgtgtcgtcggttatggcctcacactgttccctaccccccatcgcttcgaggttgatgggaagcaactatatgcatggtgcgcccttgacacacttatgttcccagcactcatcggccggacggtccacatcgcttcgccttgtcacggcaccggtaagtccgtccggttgacggtggaaccggaccgcgttgtaagcgtcgagccttcaacagccgttgtctcgattgttacaccagatgaaatggcctcggttcggtcggccttctgtaacgacgttcactttttcagttcaccgagtgcagcccaagactggcttaaccaacaccctgagtcgagcgttttgcccgttgaagatgcctttgaactgggtcgccatttgggagcgcgttatgaggagtcaggacctactaatgggtcctgttgtaacatttaatcttaggcaattacgcctgcgtcaatcttggccttacgatgatgtcctgtaa

SEQ ID NO: 2216 - DNA, 858 bp, Staphylococcus aureus
atgaatacctttcaaatgagagataaattaaaggaacgtttaagccatttagacgttgattttaaatttaatcgtgaagaagaaactttgcgtatttatcgaacagataataacaaaggtatcacgattaaacttaacgctatagtcgcaaaatatgaagataaaaaagaaaaaattgtagatgaaattgtttattacgttgatgaagctattgcacaaatggcagataaaacccttgagagtatatcatctagtcaaattatgcctgtcattagagcgactagctttgataaaaaaactaaacaaggtgttccttttatctatgatgarcatactgcagaaacagcagtttattatgcagtcgatttaggraaatcatatcgtctaattgaygaaagcatgttagaggatttgaagttaactgaacaacaaataagagaaatgtctctgtttaatgttagaaaattrtcaaattcatatacgactgatgaagtaaaaggtaatattttttaytttattaactcaaatgacgggtatgatgcaagtaggatwctaaatactgcatttttaaatgaaattgaggcacaatgtcaaggygaaatgctcgtagcagtgccacaccaagatgtgttaattattgcagatatacgcaataaaacaggatatgatgtgatggcacatttaacaatggaatttttcactaaaggtctagttccaattacatcattatcctttggatataaacagggtcatcttgaaccgatatttattttaggtaaaaataataaacaaaaaagagatccaaacgtgattcagcgtttagaagcaaatcgtcgtaaatttrataaagataaatag

SEQ ID NO: 2217 - DNA, 312 bp, Staphylococcus aureus
atgaaacaacttgaatcagaacaacaatttgaatctttaaaacaaggtgctacagtatttgaattcactgcaggctggtgtccagattgtagagtgatagaaccagatttaccggaattagaagcgagatatcctatgtttgacttcgtatcagtagaccgtgayaaatttatggatatttgtattgaaaatggtattatgggkattccaagttttctagtatataaaaatggwgaactgcttggaagttatattggaaaagaacgaaaatcaattgaacagatagatgcatttttagctcaataygtgtaa

SEQ ID NO: 2218 - DNA, 507 bp, Staphylococcus aureus
atgaaaacaatcaaaagtacattagaaaccgaagccattttcagtgatgaccaacaacatcgctatctacttaagaaaacatggaatagtgaaaaacaaaagatcacaatcatcacaatgtatccaaattatacrggccttcttcgtatagatttaactacccaattgataatgaacaaagtttcagaaatggatrcatttggttccatcaattttgtgaatctatactctaatattacaacycctatcaatctcaaacatttagaaaacgcctatgataatcatacagatattcaaattatgaaagccgtgaaagagtcagatgaagtgatactagcttggggtgcttacgctaaaaagcccgttgttgaatcacgcgtcaatgaagtattagagatgttgaaaccacataagaaaaaagtgaaacgactcatgaaccccgcaaccaatgaaatcatgcatccccttaatccgaaagcgagacagaaatggactttgaaagcataa

SEQ ID NO: 2219 - DNA, 1077 bp, Staphylococcus aureus
atgaacataaataaaaaagtaacattacaacgaattcaaactttaactgagcttcatggggcaccaggttttgaagaagaagtaaaaaattatatgactcagcaaatggcgccgtaygtagatgaatttattgaaaatcgtatgggtggwttttttggtgtkaaaaaatctaaaaatccaaatgcaaaacgtgtaatgattgcagcacatatggatgaaatyggattyatgattacaaayatcactaaaaatggaatgattcaattcacaaatttaggtggtgttgcaaatgatatttggcaaggacaacgcttagtaattaaaaatagaaatggcgataaaattatcggtgttgtttctaatatacctaaacattttcgtactggtagtgaaggygcaccggaaattaaagatttaacattagatataggtgctcaaaatgaagatgargtgcgtgagcgcggaatagatataggagatacaattgtacctcacacgccattcacacagttatctgaacatcgatatagtgctaaagcatgggataatcgttatggttgtgtcttggcaattgaaatactagaattattaaaagatatagaattagatgtagacttgtatgttggcgcaaatgttcaagaagaggttggattacgaggtgcgaaagcatctgcagagatgatagacccagacgttgcatttgtwgtygattgttcacctgccaatgacgttaaaggwarycaaccattatcyggtgaacttggtaaaggkacgttaattcgcataaaagacggtacaatgattttaaagcctgyatttagagaytatttattaaagttagtagaagcacatgacattgaacatcaatactatatgtcaccwggtggaacagatggtggagaaattcataaagctaatattggtattccractgcagttattggtgtatgtgcacgatatattcatagtacagactcagtatttgatataagagactattttgcwgctagatctttactttcagaagccatttgtaatttagataayaatcaaatagaaacattacaatataaataa

SEQ ID NO: 2220 - DNA, 1680 bp, Staphylococcus aureus
atgaagggtaaaattgcactttattcacgtgttagtacgtctgagcagtcagaacatggttattctgtaaaagagcaggaacaagtactcatcaaagaagttgtgaaaaatttcccaggttatgactatgagacatatactgactcaggcatttcaggtaaaaatattgaaggtcgtccggcaatgaaacgtctattacaagatgttaaggataataaaatcgaaatggtgttaagttggaaattgaatcgtatctcacgatcaatgagagacgtgtttaatattattcatgaattcaaagaacatgatgtagggtataaatcgatttctgagaatattgatacatccaatgcttctggagaagtactcgttacaatgtttgggttaataggatctatagaacgccagactttgatttcgaatgtgaaactttctatgaatgctaaggcaaggagcggagaggcaatcaccggtcgtgttttaggctacaaattatcacttaatccacttacacagaaaaatgatttagttattaatgaaaatgaagctcatattgtacgggaaatctttgatttatatttgaatcacaataaaggacttaaagcaatcacgacaattctaaatcaaaaaggatatcgcaccattaatcaaaaaccattttcagtgtttggcgtgaaatatattttgaataatccagtctataaaggctatgtcagattcaataaccatcaaaattgggctgttcagcgaagaagtggtaaaagtgataaaaatgatgtgatattggtcaaaggtaagcatgaagccattataagtgaagatgtatttgatcaagttcatgagaaactagcttctaaaagttttaaaccgggtcgacctattggtggagatttctacttacgtggccttattaaatgcccagaatgcggaaataatatggtatgtcgacggacgtattataaaacgaaaaagtccaaagaacgracaatcaagcgktattacatttgttccttattcaatcgttcagggagttctgcatgtcacagtaattccatcaatgctgaagtcgtcgarcgygtaatyaatgttcatttgaatcgtattctktcwcaaccwratrttatyaagcagattgcgtcaartgtgatmgaagaactgaaacaaaagcatagtaamcaaacagaaatwaaatatgayattgatagtytagamaaacaaaaagcwaarsttaaaasacaacaagaacgattrttrgaattgttyttagatgatsaaatggatagcgraatgttaaaagctaaacaaagtraaatgaatcaacagttrgaagtattagaccaacaaattaaagaagcaaaacaagcaaatcaatcacaggatgawataccyaattttgataarttaaaagsacgactcattttgatgataacacgattcagcgtgtacttaagaaaggctacacccgaagctaaaaatcaactyatgaaaatgttaattgattcaattgaaattacgacagataaacaagtaaaacttgtaaggtataaaattgatgaaagtcttatccctcaatctttgaaaaaagattgggggtctttttttatgcctaaatttaactttgtgataaatgtcacaaatgaaaataggattgaaaatttatcacttttaccacttttttag

SEQ ID NO: 2221 - DNA, 1644 bp, Staphylococcus aureus
atgaatcatatattacaaatgttatctaagctattaagtgtggcyaaggaggcaatcgaccgtcaaggtctgattgctatcctaactattcctgttaataatracgatgaaatagaagaaacggctcaaggtgaaaccgtgtataacgaacttatcgatcagttacgacttaatatcccaaaagatacggattatcracctaacatctatagttattttggtattaagaagaatcctaatgacaccgtactcatggaaatgatgataaaggtttttcatatcaaacgctttaattcagaactgtttrttttcaaagytaacgggtggcaaaagataaatggagatgaattacaagggttgatatctaaaatgatacaagtattgcttgtagattataagccttcactaagcactctaaaaaatgtcgtagatggattgcaaaaatcaacagatgtagaagaacttgttgagaatgagcgctatattggttgtggtgaaaatatgttcgatcttaatacgtttcaagtcgttaaaaattcaatcgatatctttccaaaaacacgattgaatttatcattaagtacaaatgatgtaattactgataagataccgccttattttaagcaatatatgttacaacttgcgaattatgacgatgatttacaatactttcttttccaacatacagcagtattacttacagctgatactaaataccgtaggggtctcatattatatggtggagctaagaatggtaaatctgtatatattgaactagttaaatcatttttctatagtaaagatattgtgtctaagccacttaatgagcttgaaggtcgttttgacaaagaaagtttaattgacaaaagtctaatggcaagtcatgaaattgggcaatctaggattcaagaaaagatcgtaaatgacttcaaaaagttattatctgtagaatcaatgcatgttgatcgtaaaggaaaaactcaagtggaagtcattttggatttgaaacttatttttagtacaaatgcgatacttaattttcctcctgaacatgcgaaagctttggagcgtcgaattaatattattccatgtgagtattatgttgaaaaagcggacacttcattaattgataagctccagagtgagaagaaagaaatctttctttacttgatgtatgtgtatcaacagattgtaaaagcagatatcgagtatcttgaaaatagccgtgtcactgaaattacwcacgaktgkktarattttggatatgaatttgtttctagcaggtccgtaagtaatgcaaatcagaaagcatgtattaatttactcagaaaacttatagaaatcaaatcaggatcacgaatcaaagtatccgagttaaataaagttattaatgaagaaataaaggtgagttctcaggttattaatcagttaattcaagcaaactttgatactcaaaccaaactatacaatggctacgattattggattgatttaggttggaaagaagccaataaaaaagagattcatgatatttcggaaaaagataatattatttcattagataaaaatgaaaatataacagacgatgaggcattagatgaagagaatttggactttgattgggaggactttgacgatgaataa

SEQ ID NO: 2222 - DNA, 372 bp, Staphylococcus aureus
atgaataatgatagaggacaaagcctacacatcccaagtagtacaccaatcaaagaaaataatatatatgtagctacgttacattctgtgatccaaacagatttctcaggtgaaataaagcaccaattcacgtatgaaattgaagtgaacaatcagattgtatatgcgaatcgtaatattccaacaaaaccgagcgctaatcagttgtcaattcatgattggctgaaacgtcatagcaactatagcgtgggtcatgatacgtatgaaccttatattgaccgtaagcatttaatccatattggtcaatatagcggtaactattatgtacaagatgtagcatcgttagatgcgtttggaggcgtattatcatga

SEQ ID NO: 2223 - DNA, 1101 bp, Staphylococcus aureus
atggagacaagagacaaactgatgtcattgactcaaagtgacaaaacacagcaatggctaatggacaagtcatctaaccaagatgacattcaacaattgcagcaacaattcagtcagcagcttgatcaacaatataatgcacttttagctgatgaaaaagctaagttagaccaatacgtggaagtacatcaaggattggaatcattaaaggaagagattgaatcagaacctattacgcttaatatcgataaattacccgatatcaaagcaacaatgcttgaaagagccaagaatgatgaacattctgataaaatcgaaaagctatttgataggttagaacaggcattaaatggtacgaatcgattatatacgcaattatcgttgattggtacacgaacacatcgaattacaactaaaaattttaatcttcaaggcttacctaaagcagtccaacatacgattttaccttcaaaatttaagaaggtgtatacagtcgattttaaatcgtttgaaccatcagttgcagcgtacatgactcaagattcaaaactgattgacttgttaaatcagaaagacggactgtatgacgcattgctaagtgaattaggcttatcagatgagctacgtgtatttgttaaacgtgcatttattggttcgtttctatttggaggtaacttcaaaaatcctaaattcaagctgaatcaatatgtaagtgaagtacaatggttggatgcggtcagccaatttacaaaagtcattgaacttaagaagcacgttgaaaagagtaattccatgcctatgccttatagtattgagcatgatatgagcgcatttcaaggtagcagtattatggcaatctacgtacaaactgtagcgagttatattttcaagcacattctgctaaaagtgtacaaagcacagtgcgatcaaaaaacgttcaagattatagtacctatacacgatgcgattatgattgaatgtgaagatgaagaaattgcacaaaatgtgggtcagttaatgaaagatacggctaaccagttgttcaatggtgaatttgcacatgtgacagtggaagaaataggaggcgtagatcatgaataa

SEQ ID NO: 2224 - DNA, 498 bp, Staphylococcus aureus
atgattaacggtcatggatctaaggcatacttagttgaagatttagaaaatgaatttggctacgattcaattaatcttgaaaacataaatacgaatgaattaattttagcagtgaaaatcagagatgcatttctattagataaggatgaaagtaaagagtatcctattaatgaaagtaaacgtgatagaaataaccttaaatcgcgtacattaggtagttggataataggaaaagataaaatacataaaataaaatatattattggtatcaatacaggtgctaataatgcagttgtctcagcttatgaagtatcatttgaacaagcggagagtatcgaaacaaataatggtagaatgagatatgcgtttattgggctttcagaaagagatgctactctaaaaaaattgaatttatacaaaaaagcactaccagatttaagatttggtagtggtagcgctacagcatatataaataatgggacaatgaaagttgattaa

SEQ ID NO: 2225 - DNA, 306 bp, Staphylococcus aureus
atgaaaggaaatatacaatgcctacgattaataaaaggaagtttattagattttgtgttagaaacagtggatgtttttgtaaatggaagtaaaaatgattgtgaattagtaaattttaattataaagaaggaaaagtagtttcacgttatagtacaaaatttgaaagcaatcctaaattaagaaaagagcaattgatatcgacggtaaaagttgtaaggtatgttatttttgattttgagaaaattttatggggcatagggaaagttttattgaagttcatcatattaagacaatgtttactataa

SEQ ID NO: 2226 - DNA, 843 bp, Staphylococcus aureus
rtgaaratcggggatatatctattcattatctaaatggyggcaatacaaaaatggatggcggtgcaatgtttggtgttgttccgaagccgttgtggtcaaagcaatacaatgcaaatgaacgaaatcaaatcaatttaccgacacatccaattttgattcaaacggctcaatataatttgattatagatgcrggtattggtaatggtaaattatctgaaaagcaattacgtaattttggwgtagatgaagaaagtcatatwaytrctgatttggcaaattataatttaacgccaaaggatattgattatgtrctaatgacacatatgcattttgatcatgctgccggtttgactgatcaagcrggacatgcaatttttgaaaatgcgattcatgttgtgcaacaagatgagtggcatgagtttattgcamctaatataagaagtaaatcaacttactgggataagaataaaggcgattatagtaacaagttgattttattcgaaaaacattttgaaccggttcygggtatcaagatgcaacatagtggaggtcatagctttggccacacratyattacgattgaaagtcaaggagataaagcagttcatatgggtgatatattcccractactgcacataaaaatcctctatgggtaacrgcatatgatgattatcctatgcaatcrattcgtgaaaargaacgcatgataccatattttatycagcaacaatattggttcttgttttatcatgatgaaaactactttgctgtaaaatacagcgatratggygaaaryatagatgcatatattttacgtgaaacattagttgataataactaa

SEQ ID NO: 2227 - DNA, 801 bp, Staphylococcus aureus
atgtataagagattatttatttcacatgtaattttgatattcgcactgatattagttatttctacacccaacgttttagcagagagtcaaccagatcctaaaccagatgagttgcacaaatcgagtaaattcactggtttgatggaaaatatgaaagttttgtatgatgataatcatgtatcagcaataaacgttaaatctatagatcaatttctatactttgacttaatatattctattaaggacactaagttagggaattatgataatgttcgagtcgaatttaaaaacaaagatttagctgataaatacaaagataaatacgtagatgtgtttggagctaattattattatcaatgttatttttctaaaaaaacgaatgatattaattcgcatcaaactgacaaacgaaaaacttgtatgtatggtggtgtaactgagcataatggaaaccaattagataaatatagaagtattactgttcgggtatttgaagatggtaaaaatttattatcttttgacgtacaaactaataagaaaaaggtgactgctcaagaattagattacctaactcgtcactatttggtgaaaaataaaaaactctatgaatttaacaactcgccttatgaaacgggatatattaaatttatagaaaatgagaatagcttttggtatgacatgatgcctgcaccaggagataaatttgaccaatctaaatatttaatgatgtacaatgacaataaaatggttgattctaaagatgtgaagattgaagtttatcttacgacaaagaaaaagtga

SEQ ID NO: 2228 - DNA, 645 bp, Staphylococcus aureus
atgagagttcgatacaaaccatgggctraagattatttaaaagatcatcctgaattggttgacatggamggtcaacatgcagggraaatgactgaatggtttgataaaacgcaaccgatacacattgaaattggttcgggtatggggcagtttattacaacattagctgctcaaaatcctcatattaactatatttcaatggaacgtgagaaaagtatcgtttataaagtattggataaagttaaagagatgrgtttaacaaatttaaagattatttgtaatgaygccattgaattaaatgaatattttaaaracggcgaagtttcgcgtatttatttgaacttttcagatccatggccaaaaaatcgtcaygcaaaacgacgtttaacgtatcatacgtttttagcgttgtatcaacaaatcttaaatgatgaaggagatttacaytttaaaactgataacagaggactatttgcctacagtttagaaagtatgtctcaatttggaatgtattttacaaaaataaatctaaatttacatcaagaagacgatggcagtaatattytaacagaatatgaaaagaaattttcgrataaagggtcacgtatttatcgtatggaagcgaaattccattcacaaaaatar

SEQ ID NO: 2229 - DNA, 939 bp, Staphylococcus aureus
atggtcaaaaaaagactattagctgcaacattgtcgttaggaataatcactcctattgctacttcgtttcatgaatctaaagctgataacaatattgagaatattggtgatkgcgctgaggtagtcaaaagaacagaagatacaagtwgcgataagtggggggtcacacaaaatattcagtttgattttgttaaagataaaaagtataacaaagatgctttgattttaaaaatgcaaggttttatcaattcaaagactacttattacaattacaaaaacacagatcatataaaagcaatgaggtggcctttccaatacaatattggtctcaaaacaaatgaccccaatgtagatttaataaattatctacctaaaaataaaatagattcagtaaatgttagtcaaacattaggttataacataggtggtaattttaatagtggtccatcaacaggaggtaatggttcatttaattattcaaaaacaattagttataatcaacaaaactatatcagtgaagtagaacatcaaaattcaaaaagtgttcaatggggaataaaagctaattcatttatcacatcattaggtaaaatgtctggacatgatccaaatttatttgttggatataaaccatatagtcaaaatccgagagactattttgtgccagacaatgaattacccccattagtacacagtggtttcaatccttcatttattgcaactgtttctcatgaaaaaggctcaggagatacaagtgaatttgaaataacgtatggcagaaatatggatgttactcatgctactagaagaacaacacactatggcaatagttatttagaaggatctagaatacacaasgcatttgtaaacagaaattacacagttaaatatgaagtgaactggaaaactcatgaaattaaagtgaaaggacataattga

SEQ ID NO: 2230 - DNA, 978 bp, Staphylococcus aureus
atgaaaaaaatagtcaaatcwwsagwwgttacatcaattgcattgcttttgctatccaatacasttgatgcagctcaacatatcacacctgtaagtgagaaaaaggttgatgataaaattactttgtacaaaacaactgcaacatcagattccgataagttaaaaatttctcagattttaacttttaattttattaaagataaaagttatgataaagatacattaatactcaaagctgctggaaacatttattctggctatacaaagccaaatccaaaagacactattagttctcaattttattggggttctaagtacaacatttcaattaattcagattctaatgactcagtaaacgttgtagattatgcacctaaaaatcaaaatgaagaatttcaagtacaacaaacggtaggttattcttatggtggagatattaatatctctaacggcttgtcaggtggaggtaatggttcaaaatctttttcagagacaattaactataaacaagaaagctatagaactagcttagataaaagaactaatttcaaaaaaattggttgggatgttgaagcacataaaattatgaataatggttggggaccatatggcagagatagttatcattcaacttatggtaatgaaatgtttttaggctcaagacaaagcaacttaaatgctggacaaaacttcttggaatatcacaaaatgccagtgttatccagaggtaacttcaatccagaatttattggtgtcctatctcgaaaacaaaacgctgcaaaaaaatcaaaaattactgttacttatcaaagwgaaatggatagatatacaaacttttggatcaacttcaactggataggtaataattataaagatsamawwagagcaactcatacatcaatttatgaagttgattgggaaaatcatacagttaaattaatagatactcaatctaaggaaaaaaatcctatgagctaa

SEQ ID NO: 2231 - DNA, 1737 bp, Staphylococcus aureus
gtgcaaaataaagaattaatacaacatgcagcgyatgcggctatcgaacgyattttaaatgaatattttagagaagaaaatttatatcaagtaccacctcaaaatcatcaatggtctatacaattatcwgagctcgaaackttaacrggtsaatttcgctattggtctgcgatggggcatcatatgtatcatccagargtatggcttatygatggwaaaagtaaraaawtaacaacwtataaagaagcmattgcgcgtattttgcaacatatggctcaaagtgcagataatcaaacggcagtgcaacaacatatggcgcaaattatgtctgacatcgataatagcattcatcgcacggcrcgttatttgcaaagtaacacaatagactacgyagaggatcgytatatcgtttcagaacaatctttatayttaggtcatccatttcatccgactcctaagagtgcaagtgggttttcagaagcagatttagagaaatatgcacccgaatgtcatacatcattccaattgcattatttagctgtgcatcaagatgttctgctcacgcgctatgtagaaggtaaagaagatcaggttgagaaagtgttgtatcaattagcagayatagayatatcagagatacccaaarattttattttattaccaayacatccttatcaaatcaatgtgttgcgacagcatccacagtatatgcaatatagtgaacaaggtttrataaaagaccttggcgtttccggtgattyagtgtacccgacgtcttcggttagaactgtattttcaaaagcattaaacatttatttraaattaccgatacacgttaaaatyactaattttatacgtacgaatgaycttgaacarattgaacggacaattgatgccgcgcaagttatcgcatcagtcaaagatgaggttgaaacaccccattttaaattgatgtttgaagaaggatatcgtgcattgttaccgaatccattagggcaaacagttgaacctgaaatggatttattaacaaatagtgccatgattgttcgtgaagggataccgaattaccatgctgataaagatattcatgtattggcgtcattatttgaaacgatgcctgattcaccgaystctaagttakcacaagtgattgagcaaagtggtttagcaccagaagcatggcttgaatgttatttgratcgtacattattgccgatattaaagytgtttagtaacacaggcattagtctagaagcacatgtacaaaatacattaattgaattaaaagatggcataccmgamgtrtgctwtgtcagagatytwgaaggyatttgtctatctagaacgattgctactgaaaaacarcttgtgccaaatgttgtkgcagcatcwagccctgttgtatatgcacatgatgaagcrtggcatcgtcttaaatattaygttgtagtaaatcacttaggacatttagtatcaactattggtaaagcractagaaatgaagttgtgttatggmaacttgtagcgcatcgtcttatgacttggaaaaaagaataygcgaataacgcagtrtttrttgactgtgtagaagatttatatcaaacgccgaccattgcggctaaagcgaatttgatgagtaaattgaatgattgtggtgcaaaccctatttatacacatataccaaatccaatttgtyataacaaggaggtatcgtattgtgaatcaaacaattcttaa

SEQ ID NO: 2232 - DNA, 1413 bp, Staphylococcus aureus
atgcattcatctggcaaagacttaaatatttcgttaccgttaaaaacaaagtctattgcaccttatgaaacagatgtaccagttaagatyggtgctgcagaatcattatttaaaacaaatgatcaaggaaaaatagaaaaagyattagtgaaatcgtatcatcaaccaaatgatacaacgttagatatagaattaaaagataatattaaatttcaaaacggtcaaaaattgactgcagaaaaagtgaaatctagccttgaaaatagcatgaaaaaaagcgacttggtcaaatattcattaccaatatcatcaattaccgctaaaggtcaaaaactracaattaaaaccarytccgcttaccctgaacttgtatctgaattagctaatccttttatggcaatttatkatacagatgctaaatcagatgttaatcaaactcctgttggtacaggcccttaccaaatwaaagattataagcaatctcgaaaaatatcattgtcgaattttaaggactattggcaaggtaaaccsaaacttgatcatattactgtgacgtaccaagaagacggcaataatcgcgtcagaaatttagaatctcaaaaagatgatttaataactgatgtcccagttaataaagttcawgacatagaaaataatcaaaatttaaaagtgtcaaaagaatctggatttagaacttctttacttatgtataatcatactaataaaaaaatgactaaatccgttcgtgaagcattagatcatatcattgatagacaaggtattgcagatcatatttatcaaggttaygcgaaacctgcaacgagtcyatttaatgataaaattccatatattaaagaacctaagttaaccaaacaaaatatcgaacaagcaaaaaygttattagctaaagatggttayacaaaagaacaccctttaaaaattaagttaattacgtatgacggtcgtccagagctatcgaaaattgcgcaagtattacaatcagatgctaaaaaagcaaatattgaaatcgacattaaaagtgttgatgacatagaagrttacttaaaagaccgttctgcatgggatgcaacratgtatagtttyggracratycctcgyggwgatacaggytatttctttaatcaagcatataaaaaagatggtgctattaataaaggagactacaataatarcaacgtygatgatttaattaatcaattgaatcatactgtagatgttaaggaacgtcacaatatttctaatgatattattaaattatcaagtcgagatgtaccwaacagttatattgcttacaacgatcaaatagtygctgctaackctaaggttaaaaattataaagtaacacctgaaggtatctatttaatcgattatcgaacwacgattgaacgataa

SEQ ID NO: 2233 - DNA, 153 bp, Staphylococcus aureus
atgcgtaaggaggtgaaaagcctcatgctagacataataaaaacacttctagaacatcaagtattggcagtactgataattccagaagtgttaaaacaacttagagaatggcatctcggctacctagaccgaaagccaaacaacaaagattaa

SEQ ID NO: 2234 - DNA, 726 bp, Staphylococcus aureus
atggctgaacaagatggacaaaagttgtttttaaaacgaaattcaaatccatttattgcggcattatcagcagaaggtattgtgcccaaattagtatggacgaarcgcatagaaacaggcgaggttgttacagcrcaacattggaaaaatggscgtgaactatcttcaaaygaaatgaagcaaacaagagttgcacatttattaaagaagatacacaattctagacctttattragtatgttaaagcgtatggaaatggaacctattactcctgagattatgcttaataaaattaatgcctctttatcaagagaagttttaacacatcatattgtgagaaaatcattaacctatttagaagagcatataccgagtttagattcrcgttttttcactgttgtacatggtgatgtgaatcataataattggttattatcygatcgagatgaactatttttagtygattgggaaggtgcaatgatygcagacccggcaattgatatcggaatgctgctttacaactatgttccacaacaacaatggtctgaatggcttgaaacatatggwgttcaagagagcttgaatttaaataaacgtatgaaatggtatacggtaattcaatctataggtcttgtkcaatggtatgaagagcaaaaaagatataaggatatgaacacttggcttaaattcctaaatsaagttatgaatagtaacatgtttatttaa

SEQ ID NO: 2235 - DNA, 141 bp, Staphylococcus aureus
atgaaaaaattactcaacaaagttattgagcttttagttgactttttcaacagcatcggttacagagcmgcstatataaattgtgattttttattggaygaagctgaagtaccaaaagaattaacwcaattacacgaataa

SEQ ID NO: 2236 - DNA, 849 bp, Staphylococcus aureus
atggaaaaaatttttttaaatggtgagtttgtaagtccaagtgaagcaaaggtttcatacaacgacagaggatacgtatttggcgatggtatttatgaatacattcgagtatayaatggtaagttatttacagtaacagaacattatgaaagatttttacgtagtgccaatgagattggtttagatttaaattattctgtagaagaattaattgaactatctcgtaaattagttgatatgaatcaaattgaaactggggyaatttatattcaagcaacgcgwggtgtagctgaaagraatcatagcttcccracacctgaagtagaaccagcaattgttgcttatacwaagagttatgatcgtccttatgatcatttagaaaatggtgtgaatggtgttaccgttgaagatatccgatggttacgttgcgacattaaaagcttgaayytattaggaaatgtattagcaaaagaatatgctgtraaatayaatgcmgttgaagcaatycaacatcgaggygaaactgtmactgaaggatcttcaagtaatgcttatgcaattaaagacggtgtgatttatacacatccgattaacaactatattcttaatggtattacmcgaattgtaattaaaaaaattgccgaagactataayatcccatttaaagaagaaacgtttactgtagatttcttgaraaacgcagatgaagttattgtttcaagtacttcagctgaggttacacctgttattaaattagatggtgaaccarttaatgatggtaaagttggcccaattacacgtcaaytacaagaaggatttgaaaagtatatagagtcacacagtatttaa

SEQ ID NO: 2237 - DNA, 1410 bp, Staphylococcus aureus
atgtggaaagaaaaagttcaacaatacgaagatcaaatcattaatgacttaaaaggattattagcaattgaaagtgtgagagatgatgcaaaagcatcagaagacgcaccagttggtccaggtcctcgtaaggcattagactacatgtatgaaattgcacatagagatggatttacaacacatgatgtggatcatattgcaggaagaattgaggcaggtaaaggaaatgacgtattaggtatcttatgtcatgttgacgttgttcctgctggtgatggatgggatagtaatccgttygagccggttgtaacagaagatgctatcatagctagaggtacacttgatgacaaaggtccaacaattgctgcttattatgcaattaagatattagaagatatgaatgtggattggaagaaacgtattcatatgattattggtacggatgaagaatctgattggaaatgtacggatcgctattttaaaacagaagaaatgccaacattaggttttgcaccagatgcagaatttccrtgtattcatggtgaaaaaggcattacaacatttgayttagttcaaaataarcttrctgaagatcaagatgaacctgattatgaattaataacttttaaatctggtgaacgttacaacatggtrcctgatcatgcagaagcaagagtgcttgttaaagaaaatatgacagatgttattcaagactttgagtaytttttagaacaaaatcatttacaaggtgatagtactgttgatagtggcattctagttttaacagttgaaggtaaagcggttcatggtatggayccatctatcggtgtgaatgcgggtctttacttactaaaattcttrgcatcattaaatcttgataataatgcamaagcgtttgtagcatttagtaatcgctacttatttrattcagattttggtgaaaagatgggaatgaaattccatacagatgtcatgggtgaygtgacaamtaacattggtgttattacatatgataatgaaaaygcrggtcttttcggtatcaacttrcgctayccagaaggatttgaatttgaaaaagctatggatcgttttgcaaatgagattcaacaatatggctttgaagtgaaattaggtaaagtccaaccaccacattatgttgataaaaatgatccttttgtacaaaagttagttactgcatatagaaatcaaacaaatgatatgactgaaccttatactataggtggcggtacttatgcgagaaacttagacaagggtgtagcatttggcgcaatgtttagtgattctgaagatttaatgcatcagaaaaatgaatatatcactaaaaaacagttatttaacgcaactagtatttacttagaagcaatttattcattatgcgtggaggaataa

SEQ ID NO: 2238 - DNA, 264 bp, Staphylococcus aureus
atgagagatacagaaagaaatatattgaatatttttaaracgttattcgacgaatatactttgtcaaaccaacgagcattattggaaattgaacgtaatcatcacggatacttatcgattaatttcttgcactatcacgacagttacaaaacraacaataagcttgtrcagatacatgaaatcaatccrgacakccaygaacgaataaaaaatttaattatcgaggtgytaagaggtcaycgraagattaaaaaaggagcatga

SEQ ID NO: 2239 - DNA, 474 bp, Staphylococcus aureus
gtgttgcacttaatattacaatccgtcgagtataaaaatgaaatagataaaattaaatctaaaattttaaatgaagaagacgagttagtaaaaaaatcattgatgttaacaatatttgtattatcggagagctatgttagttcattaattgtttctaatttacctgaaagagatgaaaatttaatagataaagcgtatgaaaaaattattcaacagtatataagtaaaaatatacgtacaagaaatggtagaaaagaactagtaaaaaatttttacaatacagatctaccagcaatacctcataccaaattgagagatgcccttgctcacgaaataaataaagttgattwaaaaaacaatcgttttaaatatgataatagtagaggtaatagaaatgaaaatattatagaagttagtattgacgaaataattaatgagttagaagaatggtttttaaatttagaatttccgtaa

SEQ ID NO: 2240 - DNA, 1944 bp, Staphylococcus aureus
atraaaataaataagytaacwatatcraactttgctggaatcaaagaagwaavmtttaactttracggyaaagayrcaaaaatatacggcaataatgcrackggyaagactacracwgcaaccgcattacaatggctgcttttcgataarggtttrgacggwtcaaccaaatcatttaaccctgtayctttaaacgaaaaaaacgmagaaaattatgagttaattccgactgttttcgcagaatttgaaatcgacggaaaaatwacgactttyaaaaaagagtcacatcctaartacacaataaatcaaaaaacgaatcgcaaggaatactcacgaagtcgaacgaagaaacaatatatcaatgatgaatcaataaaagtaaaggattataaagctcgtattgatgaactgattgatgaagatgtattcaagttaattacgaaccctcaagcatttaacttactagattggaagaarcgaagaagtttgttgtttgaaatygctaaaccaatcaatgatgaggatgtcattaaaacaaatgatgattttaaagaaytaaataatattcttggwgatcaygaaattgaaacaaagaaaaarattcttacdgacaagataaaacagattaacaaagayatcaaagatattccgatacgtattaaycaaacrcaacaaaataagcaggatgtaccdgaattcgataaygatagayacrcaatyatmaaacaagaaattgagcaacttgaaaatgagcgtatagatattcaaaacggtrmrgaagaaattaatttgcgtaaycaattagctgataaacaatcagaattgaarcgcatwgaagmyaataayagcgcmagtaatgagaacaaaatmcatrctttaacaaatgarytacacgttgaaaatggaacggywgcraaycttaaaacragattaaagcaaaacaaacaacaaatyrcrcatgaagaaaatmgacgtaatcaattattrgaaaatcayaaaggaytaaaaagtgatttagaaaaakctraaaatcaaaaatttgaayatcttgatgacaatgtatgtagttgttgtggtcaacagttacyarctgaacaagtgartgaggyaagagaaaaagcwttrcagaaattcaatgywrrmaaatcgaaagaattagaaacaatacaaryatctatcaatcacattatttcagarggcaagaaaataaagccaatyatcgagaarttagwggatgacaayaataatytwcaaattaaaatcaacgaagcagaagagcgttcagmragaatacaaaacaaaattaataagttraaaayractcaygttgacgttasrcaaactgacgaatacaaagcagtaatgttagagataaaygarattaatcaaaaacgctcdaacatyaggraaacyattcaagataamgtttcaggaatagatgacaaaataagcgaacttactcaagaaaaatcagaaattgaagtgtcaakatcaatcgaaaaatcaaataaacatctagatgatgttatttctgaattaagaaatgaagaagayagattattggatgaaaaagaaaagtattcacatracctttatatcttaaaagaatttacaacaacaaaagtcaaaatgcttactgaaaayatcaataaygaatttgakattgctgaatttaagytattcaataccttagttaacggcgaattagaagaaacatgttcmacaacggttaayggygtcgartaygacagcggtttaaataacgcctcaagaattaatgttggcttagatatcatcaayacactrtcaaaacattttaaagttacagcrccaatatttattgataatgctgaatcagtaacagagcttatmaaaacagaatcacaacaaattcaattgatagtaaatgaacaagataaaaaattaagaatggagactatataa

SEQ ID NO: 2241 - DNA, 195 bp, Staphylococcus aureus
atggcagacgaaagtaaatttgaacaagcaaaaggtaatgttaaagaaacagtaggtaatgttactgataataaaaatttagaaaacgaaggtaaagaagataaagcttctggtaaagcgaaagaattcgttgaaaatgcaaaagaaaaagcaactgattttattgataaagtaaaaggtaacaaaggmgagtaa

SEQ ID NO: 2242 - DNA, 423 bp, Staphylococcus aureus
atggcaaaaggtaatttatttaaagcgattttrggtataggtggcgctgtagcagctgtacttgttacacgtaaagatagtcgtgacaagctgaaagcagaatataataaatayaaacaagatcctcaaagctataaagataatgctaaggataaagcgacgcaattaggaacaattgcwaatgaaacaattaaagaagtaaaaacaaatccgaaagaatatgctaatagattaaaaaataatccaaaagcatttttcraagaagaaaaatcaaaatttaccgaatatgacaataagactgacgaaagtattgaaaaaggtaaatttgatgatgaaggtggcgcmgcaccaaataataatttacgtatcgtcactgaagaagayttaaaaaagaataaaaatgcaytrtctgataaagaataa

SEQ ID NO: 2243 - DNA, 2121 bp, Staphylococcus aureus
atgttggaattaattactgatttttcaaaaaagtcttttaaaaattacagtatgaaggaagaattaaaattcaatgctataaatataatatacggagttaatgggaggggaaaaacttcattagctagaggtwttaaagaaataatagaagaaaataatccmsatagcttgaggtatttttacactgattatattcmtgaacttcttttactaraarattccmataaatttaaaggggtwaaagcgacatttggtacmaaaaatgtagaaattgaaaataaaataatcaagctgaaaaatgaagttgttgatatgacggatactaaaaagttactagttgagaagagaaggaagttaagagaactaataaacgaaatacataagtcaagaaaagggaatcttaaaataccattaaaatcatcaaataaaagtatagaagaagtaatagctatttatgaaaaaaatttaaaagatgctaaaaaaatagagcataatatagaaagtataagaaattttgtagcgaatgatgaaacactttataataaatataatagcatttatgaagttatgattccaagcctaaaaattgaaacttatgatgtagatagattaacaaagattttacaaaataattatacagatataaaaattcctagttttgaagttatagattggttgcgtaatggtttagaattgcataatgttgaagagagtatatgtaaattttgtggaaacaatttaaattataatttgattaaagaaaaaatagaaatatatttattaaatgaaaagaaaaaagattttgattatcttaaagatgtcgaaaaatcaattgaacaattatcggataattatgaacaatatttatctaatattgatatatttgttaatgaattaggggtccaaaagtcagtagaagaaagtttgggagactcaattgatgaaattaagagaattttaaaacaaaaattaggaaatatggagaatgacaatcttaaatttccttctgatgattacattacattaataagcagattatctgaaattgaagaggaatgtaaggaaaagaagaaaataaaattaaaagaattaaataaaaaaacagaaaatataaatgtaatagttactggctctataagtttagaaatattagagaatcaaagtataagagaagaactttcaagtattcaatatgaagaaaatgaatgtaagaagcaagaacaactaaatgaggaaattaatgcaaaaatatcgaaattacatgaaaatcaatcggattataatgattttaaaatttacttaaatggtgtatttgaaagtattaatttacatattaggttgaaatctgatgaaactacacaaaattattatctttatcatgatttagaaaatatatcactaaatataaaagatataagtgaaggagagaaaaatctaatagcatttttattcttttattttgaactttttgaggatgagaaacaagaaaccattaaaagtaacattaaaacgttaatcattgatgatcctattaatagcttcgacgaagcaaatagattttacgttttagaattaattaaaaaagtacttaaaagcaaatttaatcaaatatttatatttacccattcttggaatgacttttgtgatataacttatagattaaaaggggaagatcataatttttatgaagtgtacaaagatcatcagggaactagttttttagaaaaatttaagaaagtaaagacgccttataaaaagttatttcaagagatttacgagttatcgagaaaaagtcaaaaggacatagttgaggaagattgttattactatcattcaataaatagcattagaagagtgtttgaagaatttttaagttttaagttaaaaaatagtgacctagctcagaaatcaaaccaaccagaaattgaagaagtttatagaaaaatgacaggcaatgaaatgagtaataacaaaaaaataaagttaggatcatttttaacaattataaatgtattgtcacataaaccatacagagcaatagatgtaattggttcagcaaaatttttgatgaggtatattgaagatgtagataaagctcattatgatgctatgaaggattga

SEQ ID NO: 2244 - DNA, 921 bp, Staphylococcus aureus
atgactgaaaataataaattacaaactattgaacaacaattagtacaagaaaagaacgtatctgacaacgtattaaacaaagtgagagttttagagtcacaaggcaatttggaattgccaaatgattattcaccaagtaatgccatgaaacaagcatggttacaaatyagccaagataacaaattaatgagttgtaacgatacaagcaaagcaaatgccttattagacatggtaacgcaaggtttaaatccagctaaaaatcaatgctactttattccttacggcaacaaaatgcagttacaacgtagctatcacggtaatgtaatgatgttaaaacgtgatgcaggtgctcaagatgttgttgctcaagtgatttataaaggcgatacattcaagcaagaaatgggagaaacaggacgtatcaaagcgattaarcacgaacaagacttctttaacatcgacaaagaaaacattatcggtgcgtactgcacaatcgtatttaatgatggacgagataactatattgaagtcatgactattgaacaaattaaacaagcrtggatgcagtcatcaatgattaaagatgaaaaagcattacaaaattctaaaacacataataatttcaaagaagaaatggctaaaaaaacagttatcaatagagctgctaaacgttatatcaacacatcaacagatagcaatmttttcaaataygcacaagaatccgaacaacgtcaacgcaaagaagtgttrgacgcagaagttgaagaaaatgcaaatcaagaacaattggactttgaacaaccagttctygaagaagcacaatacacagaattagaaaatgataagcctattgatgtatctgactttgaagaaataaaagaacctgcaacagaaaaagaaagcgaagaagagccattttaa

SEQ ID NO: 2245 - DNA, 486 bp, Staphylococcus aureus
atgactgctggaacacaacragctatgrattttgaaagtcatcgcttatgcacgattaaggcaaagcaagagctrcgaatwggyacrtggtcaattytaccrtttgacatygaacatgatgctaacgagcctgtggctttcttattacaaagyacaytaggttataagrtyctgtatgttactgatacraagtatytgaaatacaaatttaayggcattacrcacatgatgytagaagttaattatatctatgaacaaatrcargaaaacataaaaaacggcagtkkrcacagcrcattagcaaayagaattatggagtctcattttagcttagaacatgctatmggaatgttraaagcaaatgatttaactagactcgaagaaatacatttarttcatttaagtagycaaaattcaaatgcaaaatacattaaaagwgaaatacaaaaagtgacgggcgygcccgtttatgttggaggtttataa

SEQ ID NO: 2246 - DNA, 471 bp, Staphylococcus aureus
atgmtaaacagaacaatattagttggtcgtttaactagagacccagaattaagraccactcaaagtggtgtaaatgtagcatcattcacattagcagtwaaccgyacatttacraatgcacaaggmgagcgcgaggcagactttatwaatrtcatcgtatttaaaaaacaagcagagaacgttaataaatacctatctaaaggatcgttgrcgggcgtagatggtaggttacaaacgcggaaytatgaaaataaggaaggtcaacgtgtataygttacggaagttrttgcygatagtattcaatttttagaaccgaaraacwcaratgayamtcaacaagatttataycaacaacaagyrcaacaaacacgtggacaatcgcaatattcaaataacaaaccagtaaaagataatccgtttgcgaatgcaaatkgtccgattgaamtaratgayratgatttaccattctra

SEQ ID NO: 2247 - DNA, 894 bp, Staphylococcus aureus
atgactggttggataagtattgatcgctcaattcaaaatcattggctatttaaagaaaagagaacattttcaaagtttgaagcatggatatatttactcatggaagcgaatcattcaaaggcaaaagtgcctatwggaaaccaaattgtaaccgtwgaaagaggacaaagattaacatckattttgaccttgtctgacctttttaactggtcacgatttaaagtgaaaaccttccttgmcttactcgagagtgatggaatgttagaagtcaaaacaacatcaaaatatacccttayaaccattgtcaattatgrcttttatcaaagtgagcasggmaggaaccarcatcawawcgacatcaaaccaacatcaaaacaacatcagwyrracawcaahysracawcaaawcaacawcaaaycaacacaaacaakaatgwwaakaawgrkrataatgwaaagaatgtgartaatgagaagaagaagryarcygccttcgacttcttccaagataacggattcggtttcataactycwtacaatttagacgatttaaattattatcttgattcatttgaaaatgattcagatsaaatagttacsgcatcacttaaaatcgctaaagayagaaayaaagttacttggggatatgctaaaagcattttgaatacatggcttaatgcaaacttgaaatctatygaacaagtacgtgcatttgaaaagcaacaamttgaaagcaaaaarcaaamwtayaaacctywygttaaacaatcaaaagaaaaaacrccyaaatggctcacagacrgcacgagagaaacgaaaacgscggaagtagatgaaaaccttgagaaagacagagaagcttttattaagcgtctaaatagcaaatgggagtga

SEQ ID NO: 2248 - DNA, 762 bp, Staphylococcus aureus
atggcatcaacattagaaatcaaagacctacatgtgtctattgaggataaagaaatcttaaaaggtgttaacttgacaattaacactgatgaaatacatgcgattatgggaccaaacgggacaggtaaatcaactttrtcatctgcaattatgggacacccaagytatgaagtaactaaaggagaagtacttttagacggtgtaaatattttagaattagaagttgatgaaagagcaaaagcaggattattcttggcaatgcaatatccatcagaaattacaggtgttacaaatgctgatttcatgcgttcagcwatcaatgcgaaacgtgaagaaggacaagaaatcaacttaatgcaatttattaagaaattagataaaaayatggattttctagacatagataaagacatggcacaacgttatttaaatgaaggtttctcaggtggagagaagaaacgtaacgaaatcttacaattaatgatgttagaacctaagtttgcaatcttagatgaaatcgattcagggttagacatcgatgcattaaaagttgtatctaaaggtattaaccaaatgcgtggggaaaactttggtgcattaatgatyacacactatcaacgattattaaattacattactcctgataaagtacatgtaatgtatgctggtaargtcgttaaatctggtggtccagaattagcaaaacgtcttgaagaagaaggatatgaatgggttaaagaagagttcggttcagctgaataa

SEQ ID NO: 2249 - DNA, 696 bp, Staphylococcus aureus
atgagaatagataaatttttagcaaatatgggcgtcggwacacgyaatgaggtcaaacagttacttaaaaaaggccttgtaaatgtcaacgaacaagtaattaaatcaccaaaaacacatatagaaccagaaaacgataagatawcagttcgtggagaattaatagaatacrttgaaaatgtctatattatgttaaataagccaaaagrttatatatcrgcaactgaagatcatcattcaaaaaccgttattgatttaatacctgaataccaacatytaaatatttttmcggttggtcgtcttgataaagatacagaagggcttttattgataacgaatgatggtgattttaatcatgaattaatgagtccaaacaaacatgtttctaaaaaatatgaagttatttcagcaaatcctatcactgaagamgacattcaagcttttaaagagggtrtaacactgwctgatggcaaggttaagcctgcaatwttaacttatattgataatcaaacgtcacacgtaacaatttatgaaggaaaatatcatcaagttaaacgaatgtttcatagcattcaaaatgaggtattacatttaagacgtatcaaaattgctgatttagaattggayagcaatytagattcaggagaatatcgtttattaactgaaaatgattttgacaaattaaattataaataa

SEQ ID NO: 2250 - DNA, 237 bp, Staphylococcus aureus
atgttagaaatatttttaatagggtttggcgtttatctcttttatcgcatagcaattatttttcttaagagtaaaaagactatacacacaaayatatatgaaatgttaatgcttgctactatctttatgatatctacawttgcttataaacatcaaaagacgcatatcttaatagcatttttagtaatgttttttatgagtaagctcaaacaagttcaagggagctatgaggaatga

SEQ ID NO: 2251 - DNA, 651 bp, Staphylococcus aureus
atgaacgagcaaataataggaagcatatatactttagcaggaggtgttgtgctttattcagttaaagagatttttaggtattttacagattctaacttacaacgtaaaaaaatcaatttagaacaaatatatccgatatatttagattgttttaaaaaggctaaaaagatgattggagcttatattattccaacagaacagcatgaatttttagatttttttgatattgaagtctttaataatttagataagcaaagtaaaaaagcgtatgaaaatgttattggatttagacaaatgattaatttatcaaatagagttaaggcaatggaagattttaagatgagtttcaacaatgaatttagtacaaatcagattttttttaatccttcttttgttatggaaacaattgctattataaatgaatatcaaaaagatatatcttatttaaaaaatataattaataaaatgaatgaaaatagagcttataatcatattgatagttttatcacttcagagtaccgacgaaaaataaacgattataatctttatcttgataaatttgaagaacagtttagtcaaaagtttaaaataaacagaacttcgataaaagaaagaattattattaatttaaacaagaggagatttaaatga

SEQ ID NO: 2252 - DNA, 1308 bp, Staphylococcus aureus
atgacaactgatattttgaacatttctgaagaacaacttgttgattattctaaagcccacaatgaaccttcttggatgacagaattacgtaaaaaagctttgaaattaacagaaactttagaaatgccaaaacctgataaaacaaaattaagaaaatgggattttgattcttttaaacaacacgatgtaaaaggtgatgtttatcaatctttatcacaattacctgagtcagtaagagaaattattgacgtagatcattctaaaaacttagtaattcaacataataatacgattgcgtacacacaagttgatgataatgcatcgaaagatggcgttatcgttgaaggtttagcagaygctcttatgaaccatagtgatttagtacaaaagyactttatgaaagatgcagtaacagtagatgaacatcgtatcacagcgctacacacggcattagttaatggtggcgtatttgtttatgttcctaaaaatgtagttgtagaacatccagtacaatacgttgtgttgcacgacgacraaaatgcaagcttttataaccatgtyatcatcgttactgaagaaagcgccgaagtcacatatgttgaaaattacttatcaaatgcatctggtgaaggaaatcaattaaatattatttctgaagtgattgctggtgcaaattcaaatatcacatatggctcagtrgactatatggataaaggctttacaggtcatatcattcgacgtggtattactgaagcggatgcctcaattaattgggcaytaggtttaatgaatgagggtagccaaattattgataatacaacaaatttatttggtgatcgttcaacaagttcacttaaatcagtagttrtaggtacaggmgaacaaaaaattaatctaacatctaaaatcgtacaatatggtaaagaaacwgatggttatatccttaaacatggtgttatgaaagaacatgcatcrtctgtatttaatggtatcggctacattaagcatggtggaactaaatcaattgctaatcaggaatcacgtgtattaatgttatctgaacatgctcgtggtgacgcgaatcctattttattaattgatgaagatgatgtacaagctggtcatgctgcatcagtaggtcgtgttgatccagatcaactttactatttaatgagtcgtggkatttctcaaagagaagcggaacgtcttgttatacatggtttcttagatccagtagtacgtgaattacctatcgaagacgttaaacgtcaattgagagaagtaattgaacgcaaagtttctaaataa

SEQ ID NO: 2253 - DNA, 1662 bp, Staphylococcus aureus
atgagtgaaagtaaagaaatggtgcgtggracctttttaattacmattagtatwttrattacmaaggtrttrggcgtactttttatcattccattcaactatttaattggtggacaagaaaatatggcgccgttcacatacgcttatgcaccatataatattgcaattgcagttgcgacagcaggtgtaccattagcwgcttckaaatatgtwgcgaartataatgckattggkgcatataaagtmagtcagaaattttataaatckagttttattgtmatgagtattaccggtgttttaggtttcttrgtactktatttcytagcaccwtatatttctgaattaacwttagctagaaayrttcaygataaaaayggttggtcagtygatgayattacwtggattatwagaatcattagtatggtwgtyatcttyattcctgtattagcracatggagaggkatattccaaggttataaatctatgggrccwacwgcrgtrtcrgaagtawctgagcaaattgcacgcgtgattttcatattaatcggaagttatttagtactaaatgtctttgatggytctatyttattagccaatggtattgctacttttgcagcagcagttggtgcgattattggtatattcacactctggtattaytggagaaagcgtaagcataatattgatcgtatggtcgaatctgattacacagatatagatgtgtcatatggcaagatgtataaagaaattattgcttatagtatwccgttcgttattgtaagtttgaattatccattatttaacttagtagatcaatttacacataacggtgctttatctttagttggtataccttcacagttacaagatatattctttaatatgctaaatatgtcaactaataaaattgtaatgattccgacatcattaagtgctggytttgcagtragtttaattccttwtattacaaaaacatttgcagaaggtcgcttacatgaaatgcatcatcaaattagaacatctattggtgtattaatgtttataactgttccagctagtattggaattatggccttggcacaaccrttattcacagtwttctatggttacgatccaattgttttaggtcatgaccctaaccatgatggtagtcgyttrytattctattatgcgcctgtagcaataytaatttcactattaagtgtaacggcrtcaatgttacaaggtatmgataarcagaarttaacrgtttatgttattttagcttctgtwgywatyaarttagcrttaaactayccattaattatgytattccatacrcckggkgcwrttttaagyacwagtatcgcattattattygcaattggwtgtaayttctatattcttaaaaaataygcgaartttaaattyagctatagytggattcatttygcaaaaatattcttrtaytcatttattatgatgytaggtgtagaakyagtattyttcmttgcraayctattcttagarccwacwaaacttggwtayttaatyattatyattttaggtgtwacagtwggtattctaatttacggtacaatcacaattaaaacgcgtcttgcggacgaattcttaggtgaaattcctgaaaaattaagacgtagagttaggtttttacgatga

SEQ ID NO: 2254 - DNA, 288 bp, Staphylococcus aureus
atgatgaaagaaaaagaattttatacactaaaacgtgctgttacaagcatcgcatttaatttacctgtaggcaccatgtttatgtatcacgatttgaatgtgagggctaatgttttgtgctcgactgaaattcaacaagatgttggtcgttggtttgcacattttgtaaaatatacacctaaccttccattcattgtagttggaaaaaaaggttcatctttgctctaccttaaaactgcaccaaatccgatgaatcatcaaaataactggaaaggtggtaacaactaa

SEQ ID NO: 2255 - DNA, 1569 bp, Staphylococcus aureus
atgactaacatcatctttagtgaatatccatactggcttactgaagattcatggtatgaagttataccaccgaaaggtaaaaatgatcagcaaaagtccatacgcttatctagtccaattttaattaaaaacaagtttcttgaccccaaatctggggttgagaaactagttatttccaacggacaaaatattggacgtattgaaacatcagatattttaacatcgcaaaagttaccttcactaatcatgtatggcttcagcatcaatgagaagtacattaaatcattaagcaatgcactacaattaatgcgccaatcactgcctctgtcatcgttgtatacgggtgtcggtgtgttaaatactgataaaggtgtcgtcatttcattagatgaaccatatctttcaaaagaaattacacagtcgcaggcggatgaaatcatttgtgaaacacagtacgatctacaacctaaaggcacttttgaagactggtggcaaatgtatcttgatgaagtaaaaggaaacttgttactcgaacttgctgtagtgtttggtatttcttcattagtaactgcgtttttaaaaacaaaacatgaggttgaattcgcaggtacgattttctcatttacgggaaattcaagcacgggtaaatcaactgcagcggctttaggagtctcaataaccggcaaccctactaaaggtagtaatacgctgtttagatcatggaatggcactagaaacgcgcttgaaggatatctaagtaacaactatggtgtacctattgtattggrcgaactgtcatctgcaacctttaaagatacaactggtttgctctattcaattgccgaaggtcaaggaagacaacgttctaatatacacggagaagtcaagtcactaaaaaactggggaacctcagtaattagtactgccgaacacagtattttcaataatagtgcacgtaatgatggtttgaatgtacgtaccattgaaatatctgaagcttwwacaactaacgctgacaacgcagatactattaaaaaagcaacatcagctaattatggtcatatcatgccattagtagctgaatatctactcaatcgtgaacaagaagtcattaaatggttccaaaatgagcacctaaggttcaaaactcaactagaaaaggaaaccagcaatacaggaattcggatgttcaaacgctatgcaaccattacaacatcagcacgtatattggaacgtgtcattgccacacctgttgatttgaatgctgtaagggactatcttattaactatcatttagattctgttagtgagcgaagcctagctgataaagcaattgaagtcattgtccaatttgtagcacaaaatcgtggtaagttttctgacgacactaggttatcaacgcttattgaaaattatggaatgatttcacttgaagatgatcatatccaggtgaaaatgattgcctcggtttttaaaaatatgttaaaagaacataatttccaagatacaaataatgtcattgatgcactgagggataaagattacatccagtcagacgccaatcgttaa

SEQ ID NO: 2256 - DNA, 396 bp, Staphylococcus aureus
atggatacacatagctcagataagcgtcacagtcattacagaagttattacaataatgaaagatatagaaaaggagaaatgagcatgaaacgttatattacacgtagtattgccaattacttgccagcaatgttgcagcaacagttatggaaacttgtagcgcaacgcgaaaacgaacaattcaaggaactagaagagattgattactttcatatattccagttcaatatgcataatagtcaattatatatcaaacataagcaagaacgtccagagtacgtaaaaattcataaggcaaattattcaaaagctatcaatattaataaggtctacattatccgagaagatgatgtagacctttcttattacgtcatgttgttacctgaagaatattaa

SEQ ID NO: 2257 - DNA, 522 bp, Staphylococcus aureus
atgaaatcaatcaaaagtgtattagaaactgaagcgatatttagtcaggataaaatgcatcgttatcttctcaagaaaacttgggatattgataaagaagtacttacaattataacgatgtatcctcattatgatggtgttatcaacgttgaccttacaacacaacttattgtcaataaagtagctgaaaaagatgaatatggtggcgttaattttataaatcttttttcaaatattgatacccccattaatttaaaacatatcgaaaacagccatgacaagcacacggatattcacattatgaaagctgtcaaagaagccgatagtgttttattggcttggggttcctacggaaaaaaacctcttgtggaaaatcgagtgaatgaagtattagacatgttaaaacctcacagtaagaaaatcagtatattaacaaatcctcaaacaaatgaaatcatgcatccattaaatccatacgctagaaaggcatggacaattaaaccattaaaggagactaaatag

SEQ ID NO: 2258 - DNA, 207 bp, Staphylococcus aureus
atgaatcaaacatggaaagaagtataccaatatttaatgcatcaaccacacatcgatgttattaaaggcattatcgccttttcatcaaacaaaaaaaataattcagaattaratgagctatattccatttatatgaatgatgattctatcacatccattgttcaccctgacttaatagaaagtatagagcttatccataatgagtag

SEQ ID NO: 2259 - DNA, 324 bp, Staphylococcus aureus
atgagtagaaaaagaatagatgttgtcaaagtccaaatggttaaagaagatacactttggtatttaaaaagacgtattgaagaaccaaaagacgctgctgatattatgcgtgacttcataggaaatgctgaccgagaacacttcattttaatttgcttgaatagcaaaaatgaacctacacatattgaaaccgtctctataggaaccattaattttgcggttatacatcctcgagaaatatttaaaacagccatattaagtaacgcaacgggtatgattattggccataaccacccaagtggagacatattaaccatagtataa

SEQ ID NO: 2260 - DNA, 1242 bp, Staphylococcus aureus
gtggccgaacactcatttgacgttaatgaagtaatcaaggattttccgatattagatcaaaaagtcaatggcaaacgtttagcatatcttgattcaacagcgacaagtcaaacgcctrtgcaagtgttaaatgttttagargattactacaagcgttataattcaaacgttcatcgtggtgttcatacattaggatcattrgcaactgatggttatgaaaatgcccgtgaaaccgttcgtcgttttattaatgcgaagtattttgaagaaatcattttyacacgcggaacaactgcgtcgattaaccttgtagcacatagctatggtgatgcaaatgttgaagagggcgatgaaattgttgtcactgaaatggarcatcatgccaatattgttccttggcaacagttagcaaagcgtaaaaatgcgacattgaaatttataccaatgacagctgacggtgaattaaacatcgargatattaagcaaacgattaatgataaaacaaagatcgttgctattgcacatatwtctaatgtrctcggtacaattaatgatgttaaaaccattgcagaaatagctcatcaacatggygcaattatcagtgttgatggggcgcaagcagcaccacatatgaaacttgatatgcaagaaatgaatgctgatttttatagttttagtggwcataaaatgcttggaccaacaggtattggcgtattatttggtaaacgtgagttactacaaaaaatggaaccgattgagttcggtggygacatgattgattttgtaagtaagtatgatgcaacatgggctgatttacctactaaatttgaggcgggtactccattaattgctcaagcaattgggcttgcagaagctattcgctatttagaacgcataggttttgatgcaattcataaatatgaacaagaattaacgatatatgcttatgagcaaatgtctgcaattgaaggaattgaaatttatggcccgccwaaggatcgtcgtgcaggtgtaataacgtttaatttacaagatgtacatccacacgatgttgctacagccgtagatacagaaggtgtagcggttagagctgggcatcattgtgcgcaaccgttaatgaaatggttaaatgtgtcttcaacagctagagcgagtttttatatatacaacacgaaagaagacrttgatcagttaatwaatgccttgaaacaaacgaaggagtttttctcttatgaattttaa

SEQ ID NO: 2261 - DNA, 465 bp, Staphylococcus aureus
atgaattttaataatctagatcaattatatagatctgtcattatggatcattataaaaatcctagaaataaaggtgtattagataacgggtctatgacagtagatatgaataacccgacatgcggtgaccgtatacgactaacatttgatatagaagacggcattataaaagatgctaagtttgaaggtgaaggttgttcgatttcaatggcaagtgcatcgatgatgacacaagcygttaaaggtcattcacttggagaagcaatgcaaatgagccaagaatttacgaaaatgatgcttggtgaagactatgtgattacagaagaaatgggagatattgaagcattgcaaggtgtatctcaattcccagctcgtattaaatgtgccacattagcttggaaagcattggaaaaaggtactgttgctaaagaaggtaaagcagaaggtacgactgaagaagaatag

SEQ ID NO: 2262 - DNA, 777 bp, Staphylococcus aureus
atgaagaaattatctactgtaattattattttgattctagaaatagtttttcataatatraattatgygaatkcycaaccygatcytaaawtagacgaactaaataaagtaagtgattataaaartaataagggaactatgggwaatgtwatgaatctttataygtctccacctgttgaaggaagaggagttatyaattctagacagtttttatctcatgatttaatttttccaattgagtataagagttataatgaggttaaaactgaattagaaaatacagaattagctaacaattataaagrtaaaaaagtagacatttttggygttccatatttttatacatgtataatacctaaatctgaaccggatataaaccaaaattttggaggttgttgtatgtatggtggtcttacatttaatagttcwgaaaatgaaagagataaattaattactgtacaggtaacaatcgacaatagacaatcacttggatttacaataactacaaataagaatatggttactattcargaactagattacaaagcaagacactggctcactaaagaaaaaaagctatacgagtttgatggttctgcatttgaatctggatatataaaatttactgaaaagaacaatacaagtttttggtttgacttatttcctaaaaaagaactagtaccttttgttccatataagtttttaaatatttacggagataataaagtwgttgattctaagagtattaaaatggaagtatttcttaatactcactga

SEQ ID NO: 2263 - DNA, 1398 bp, Staphylococcus aureus
atggctaaaaaagcacctgatgttggggattataaatatggattccacgacgatgatgtrtccattttcagatcagaacgtggtttaactgagaatatcgttagagaaatttctaacatgaaaaatgagccggaatggatgttagatttccgtcttaaatcattaaaattgttttataaaatgccaatgcctcaatggggtggcgacttatcagaattgaatttcgatgacattacttactatgtaaagccttcagaacaagctgaacgttcatgggatgaagtgccwgaagaaattaaaagaactttcgataaattaggaattcctgaagctgaacaaaaatatttagctggtgtttctgctcaatatgaatctgaagttgtttaccataatatggaaaaagaacttgaagaaaaaggtattatctttaaagatacagatagtgctttacaagaaaatgaagaattattcaaaaaatactttgcttctgtagtacctgcagcagataacaaatttgcggcgttaaactcagcagtatggtcaggtggttcgttcatttatgtacctaaaaatatcaaactagatacgccactacaagcttatttccgtattaactctgagaacatgggtcaatttgaacgtacattaatcattgctgatgaaggtgcttctgtacattacrtagaaggttgtactgcaccagtttatacaactagttctttacactctgctgttgtggaaatcattgtgcataaagatgcgcacgttcgttatactacgattcaaaactgggcgaacaatgtatacaatttagttacraaacgtacttttgtttatgaaaacggaaatatggaatgggtagatggtaacttaggttctaagttaacgatgaaatatccaaactgtgttcttttaggtgaaggtgcaaaaggtagtacattatctattgcatttgctggtaaaggacaagttcaagatgccggtgctaaaatgattcataaagcrccwaatacatcttcwacrattgtttctaaatctatttctaaaaatggtggtaaagttatttatcgcggtattgttcattttggacgtaaagcaaaaggygctcgttcaaatattgaatgtgatacattaatcttagataacgaatcaacatcagatacaattccatataacgaagtattcaacgatcaaatatcattagaacatgaagcsaaggtttcaaaagtttctgaagaacaattattytatctaatgagtcgtggtatttctgaagaagaagcgacagaaatgattgttatgggattcatcgaaccatttacaaaagaacttccaatggaatacgcggtcgaaatgaaccgtttaatcaagttcgaaatggaaggtagtattggrtag

SEQ ID NO: 2264 - DNA, 2418 bp, Staphylococcus aureus
gtgttgaattacaaccacaatcaaattgaaaagaaatggcaagactattgggacgaaaataaaacatttaaaacaaatgataacttaggtcaaaagaaattttatgctttagacatgtttccatayccatcaggtgctggtttacatgttggacatcctgarggctatacagcaacagatatcatttcaagatataaragratgcaaggwtataatgtattacatccgatggggtgggatgcattcggattaccagcagagcaatatgctttagayactggyaacgacccacgtgaatttacaaagaaaaatatccaaacttttaaacgacaaattaaagaattagggttcagttatgattgggatcgtgaagttaatacaacagatccagaatactataaatggacacagtggattttcatacagttatataacaaaggtttagcatacgttgaygaagttgcagttaactggtgtccwgcattaggyactgtyttatctaacgaagaagtgattgayggtgtmtctgaacgtggyggwcayccagtttatcgtaarccratgaaacaatgggtacttaaaatyacagaatatgcagatcaattattagcagatttagatgatttagattggcctgartctttaaaagatatgcarcgyaaytggattggacgttcwgaaggkgccaaagtttcatttgatgtagataatwcggaaggaaaagtagaagtatttacgactagaccagayacwatctatggtgcatcattcttagtcttaagtcctgarcatgcattrgttrattcaattacaacwgatgaatataaagawmaagtraaagcktatcaaacagaagcttctaaaaagtcwgatttagaacgtacagatttagcaaaagataaatcaggtgtrtttactggtgcatatgcaaytaatcctttatctggtgaaaaagtacaaatttggattgctgattatgtattatcaacatatggtactggwgcaattatggcagtaccagcgcatgatgacagagattatgaatttgctaaaaagtttgatttgccaatcattgaagtcatygaaggtggaaatgttgaagaagcrgcatacactggtgaaggtaaacatattaattctggtgaacttgatggtttagaaaatgaagcggcaattactaaagctattcaattattagagmaaaaaggtgctggcgaaaagaaagttaattacaaattaagagattggttattcagtcgtcagcgttattggggcgaaccaattcctgtcattcattgggaagatggaacaatgacaactgttcctgaagaagagctaccattgttgttacctgaaacagatgaaatcaagccatcagggactggtgagtcwccactagctaatattgattcatttgtaaatgttgtagatgaaaaaacaggtatgaaaggrcgtcgtgaaacaaatacaatgccacaatgggcaggtagttgttggtattatttacgttacatcgatcctaaaaatgaaaatatgttagcagatcctgaaaaattaaaacattggttacctgttgatttatatatcggtggmgtagaacatgcrgtkcttcacttattrtatgcaagattttggcataaagtmctttatgatttrgstatcgtacctacwaaagaacctttccaaaaattatttaaccaaggtatgattttaggagaaggtaatgagaagatgagtaaatctaaaggaaatgtaatcaatcctgatgatatagtacartctcatggkgcagatactttrcgtctttacgaaatgtttatgggacctttagatgctgcaattgcatggagtgaaaaaggattagatgggtctcgtcgattcttagatcgygtatggcgtttaatggtaaatgaagatggracattragttcaaaaatwgtaactacaaataataaatctttagataaagtttataaccaaactgttaaaaaggtaacagaagactttgaaacattaggatttaatactgctattagtcaattaatggtatttattaatgagtgttataaagttgatgaagtttataaaccttacattgaaggcttcgttaaaatgttagcacctattgcaccacatatcggtgaagaattatggtcaaaattaggacatgaagagtctattacgtaccaaccttggccaacttatgacgaagcactacttgtagatgatgaagtagaaatcgttgttcaagtdaatggtaaattgagagctaaaattaaaattgctaaagatacatcaaaagaagaaatgcaagaaattgccttatctaatgacaatgttaaagcgagtattgaaggtaaagacatcatgaaagtcatcgctgttcctcaaaaattagtcaatattgtagctaaataa

SEQ ID NO: 2265 - DNA, 975 bp, Staphylococcus aureus
ttggataacataacatttcgtaaacgtattgaagaatatcgaaagcgatctattgagcaaaagaaatatgagagcaaactaaattatcaatcaagatttggtgtgaaagatgatgaagttagtacttttaatatcaaaggcattgctacagataaaaaagaaaataagttagtcatggccgaagatagagaggataaacaaaaagttcttttatacgccaataaagataatgatatgtattatttgaattctggtagcacttataaagaggctgttcaaaacacttttggtaatgaaaccaattacgaaatggtagatgatgaattatttatttataattcaaaaaatcaagcacttacaaactatgaccaacttgatgagtatcacaatcgacaaaagcaattacaatataacaccaaattagaacaggaacgaaagcaaagattgactgatacaaataaagttagtgaaaatgctaaagaagatttagcgttaagtttaggacttacagcaacagcattgaaaggtaacataaacatttctaatgttgaaaaagtcactgataatgaaagtatggttactatagaaaatgaaattaatggtaagtcagaacatttaatttcagactttaaagatagtttcattgaaaaggctaaagaaaagctaactgtttccccttcaatgaggttaggatttgaagaatttaaaaacgcctcgggacaaatagcaatgggatttacagagttttttggcgctaggtatgacgaaagcactttagaaaacgaccctaaagttgtggcaacagaaaaagggtactctgtttctgtttttgataaagacggaaacaaaaaagatttaacatcagctgacacttttgaggaggcagtaaaattatccaaagaaatgaaacatgataactcgctttctcgtagtgaaatagaattaaatcaagaattagaaaagaaaaaaatataa

SEQ ID NO: 2266 - DNA, 318 bp, Staphylococcus aureus
atgattaaaaaattcagtttaacaactgtttatgtagcatttttaagcattgttttatcaaatataacacttggcgcagaaaatccagggccgaaaattgaacaaggtttacaacaagtacaaacattcttaacaggcctaattgttgctgttggtatctgtgctggtgtttggatagttcttaaaaaattacctggaattgatgatccaatggtaaaaaatgaaatgtttagaggcgttggaatggtattagctggtgtggctgttggggcagcacttgtttggttggttccatgggtatacaaccttttccaataa

SEQ ID NO: 2267 - DNA, 135 bp, Staphylococcus aureus
ttgatggtggataaagcgacaacacaaatacaayatgattgtggcattagagtgctggtctttattaaattaattgaaarctacatcaaatattctttagataattcgatattagttcgattaagattcgttgta

SEQ ID NO: 2268 - DNA, 1182 bp, Staphylococcus aureus
atgaatatacctaaatcagtctggtggctagtaattggcatggcgttaaatattactggttccagttttttgtggcctttaaatacaatttatatgaaacaagaacttggaaaaagtttaactgttgctggtttagtgctaatgataaattcatttggcatggttattggaaacttattaggtggttcactatttgataaattaggtggatacaagacgattttaattggaactttcacttgtctttgtagtacaacgctacttaatttctttcacgggtggccttggtatgctgtatggcttgtaatgttaggstttggtggcggaatgattattcctgcgatatacgcwatggctggagcagtgtggccraatggcggaagacaaacgtttaatgcgatatacttagcgcaaaatattggtgtkgctgtcggygctgcaatgggcggctttgtcgcagaatttagctttaactatatctttttagccaatcttattatgtatgttgtgtttgcrcttgtcgcggtaacgcaatttaatattgaaattaatgcgaaagttaaatatccaactcawttagatattactggtaaaaagaataaagcaagatttatttcattagtactaatttgtgcaatgtttgcaatttgttgggttgcrtatattcaatgggagtctacaatcgcwtcatttacacaatckattaatatttcaatggcacaatatagtgttttatggacaattaacggaataatgattttagtagcacaaccattaattaaaccrrttctctatctgttaaaaggaaacttaaagaagcaaatgtttgtcggcatcatcatttttatgttgtcgttctttgtcacgagttttgccgaaaactttacaatatttgttgtcggtatgattattttaacttttggagaaatgtttgtatggccwgcagttccaactatagccaatcagttagcgccagatggtaagcaaggacagtaccaaggttttgtgaattcagctgctacagtaggaaaagcattyggtccatttcttggtggtgtattagttgatgcrtttaatatgcgcatgatgtttatcggtatgatgstactacttgtatttgcattaatattattaatggttttcaaggagaataatacgcaacctaaaaaaatagatgcataa

SEQ ID NO: 2269 - DNA, 408 bp, Staphylococcus aureus
atgtctgttgagcaagaagttaaagatataatgctcgatatgttgggcgaagaaaagaaagttaaagagaatataatacctcgtaatgtagacgctagttataaaatattcttaaatttaaacggtaaagaattagcaattgtatttgttccttttttactatttctaacaatagcatttggtgtaacgtttttaatgggcttacttaatttaataactggctttatggtttttatagtaggtttgatttttggtttaacaatatatggcttactaacaattagaccaattagtacaaaagaaaatataagaatgattgataccataaaacaatcacaacgatttagcagaaggcagaaagtttacttctataaaagtaaagaaggattgggtgatgatgatgtttaa

SEQ ID NO: 2270 - DNA, 684 bp, Staphylococcus aureus
atgatgatgtttaaaaaaaagaataagcaaaataaaaataacgaacaacaatttgaaattataaatagatatataaaaggggacggacgtaatcaaagtattcaagaagattcactaatagctggtttttataaagattacgttgttactaaagacggttatatcagtggaggtttaaatattactggtgtaaatacagagttattaacgaagtttgagcaaaatgatttattagaagaatattcatcttttatttcaaacattctttacgacgaaccaatgataaaaacaattacagaaccagtaaatatacaaaattatataaaacacctttacagacaagtattacttgatatgaagaataataataataaaccaacaagacgtggccaattaatagctggtcgtatattgtttcttcaagaaaagctagcaaaaggcgaaatgagtacaaagaaacattatattttcttttcggaaaagataacagaaaatactgtagcacaattagatcatgcagtgaatagactacatgaaaagataaaccttaataaagaggcattacaacaagcattttcacattatggtttagaaactagacctatatatcaaacagaatacttaaaccagttttatgctttatatgattataaaggttataacgactatcatcttagtaattag

SEQ ID NO: 2271 - DNA, 2019 bp, Staphylococcus aureus
atgattatggcatttttaaaaaagaaaaagcaagagcaagttacaaataaaattcacaatgaatcttttcaaaaattaacagaagtattagatacagattctgttgatagtatttatccttttagttggatagagaaaaaatcgcatatagaaacaggcgaaaattatattaaaaatttattagtagttgactaccctcaatcagtaaaaggggcgtacttatcaaatttattaaagaaaaacggtaatattcaaataactaaatttattagaccagcaaatatagaaagaatgattgaccatttaaacaactcaatcaaaaacaaaacagcagaacaaatgcgtactacagaccctaaacgaaatgcaacaattaaaagagaaattgaaagtagtaaaaaacaacttgataaatttttagatgaaaaaacaggatttatgtacatgtatatgtatatcacgttaaatggcgattcatacgaaaagatacaagcgctagaaaaagatgttaagcgtactttaacgagattaagacttaaaacacatacacctacaaacgcaatgcgagaatcatttcatacagttcttcctttaaatagaaacttcttatcagcatttacacaacaaaatatggatacagcaacagcagggcatttctttatgtttgatgattcagaaattattgatttaacacctaatacatcagtttttggaattaacaaaaatacagattcattagtagcagttgattttaataacaaagaaaaaactttaaataaaaatatgactattatcggtacaagtggtgtaggtaaatctaccctcaatatgagaatgattttagacaatatcaaaaaatctataagacaatttatcattgatcccgaagatgaattttcatatataactaaatattacggtggaacagttgtaaatatttcaacaagttcaaatatcaaaattaatccatttgaaattttttcagaagaagtatttgaaaaagaagatgaaacagacaatgaaacaacatcagatgttttaacggaaaacaacgaacacgaaagccaaattgacacattagttcgttctaaaatagggaagttaaaaaccttctttagagttcttaaagatgaaatatctcaaacagaaatatctgtattatcttcaactttaagacagttatatcaagataaaggatttaaaggtaatgcgaaattatcagatttcaaaagcgaagattatccaactttaacagaattatataacaaactaaaagacttagacccagaaaaatatgaggtattaaaggacttaacacttatcatagaagattacacaatggaacatggtactactacaatctttgacggttatacaaacatcaaattagataatgaaattgttacttttaaccttaaaccattacaaacagaaaaagatgttcaaagtgcagcgtatttgaatatattcagtttcttatgggacgaaataacaaaagatagaacaacagaaacagtattaatgactgacgaattacatttcttagcaacaaatgaatatagcttagatttttattatcaagcatacaagcgtattagaaaatatggcggtggcgctattgcctctactcaacaaattaaagatattcttagaacatcacaagaaataggttcagctattattgaaaatagtcatactaaattcttctttggaatggataacgtaggcgttgatgatgttgttgataaattaggattgaaatttagcgatcaagaaatatctcatttaactaaaaagaaaaaaggcgaggcattattactatacggaacacaaagagcatttataagaattgatttagatagagaagaaacaagactttggaataaagaattatatgaaacaatttatgaagaaccagcagacgtagagccgaattatgttgaacaactaggattaacagatattgatttagcagagttggaagaagaattaagacaagcagaaatgatttatgaatag

SEQ ID NO: 2272 - DNA, 1281 bp, Staphylococcus aureus
atgaaaattagaaattttaatgaaggaacattggtaggaaaacataaccacttagaatatatcatcaatgttgatttgtgccatatatcagatatagacgaaattagatatgacttaacagaacctaatgaattgttttttgaagttaaagatttacaaaaggaaggcgattattttcatatcatttacaacactgataatgaatataattccttcctatcagcaaaaaaagaaagcaaagcactcaaattatctttaatggattatgtgttaaaagttgatccattaaaggacaatataactgttatgcacccagcgaacctattttttaaaaatattgaggatataaaaataggattcaaaggccatgaatatttacctaaacctaaaataaataatttagaacagtataaattgttaataatgagtacattatcacaatacacgtttgataagtattatcgcaataaatttgaagttttatcaaaagaaaaagatgattttttccataaagtaaataatgcagaaacttttgaaaaattgaaagagattgtaagacatgaattgaatcaagtacagacagattatttactgaatgaagaaaaacgtaaaagagaaacacgaaaaaagtacattagaaatttaatacttggttttgttggtattgcaatagttataagtttaatttcatttatgattataaacggaaagcaacaagaattagatagcaaaatagcacaagcagacaaacaagaacaaagaagtaaagtatatgaaaatctttacaatggcaatgttgatcaagcagttaaaggcatgaaacgtgacgatagctttaacaaaaaagatattgaaaaaacattaaaaaaagaaaagaaatatgaagaactaattgaattgagtagtaaaaacacaccttatgtaattgaacaattatataaagaaggtaagcagaataaaataagagagttagctttcaattttgaaaataacgatacattgagtttagaaaagaaaatattagacaaagacggaacagcatttagtgtaggctcaacaggtaaatacgaagaacaaagtaaacgtttggctttagcgtcagctaaagaaggttatgttgaatcagctaaagatattaataaaaaacttaaagataatgaagttgaagaagaaataaataaagctgaaattaaacaactaaaagaagaaaaagacagcacgaaggataaagacaagaaaaaagaaatccaaaaagatatagaggaattagagaagaaatag

SEQ ID NO: 2273 - DNA, 1077 bp, Staphylococcus aureus
atgtggagtgctattgctaaaggaataacaatgctgatgaagaaaaaagcattatccaaaatattaaaaccagtaatagctatagtaataggctttttccttcttatttttataatgattgcttatctagtaggatctttcactaaagaaattaatgagagtggcgaacaaaaaatgaaagaggctgaatcaacagcaacaggtgcgtgtactggtggaagtgttgacggttcgggtatctctgcttttgaaaaaaacgccaaaggtggcgcattagaaggtaaaggtaaggatatggttaaaattgctaaaaaaaataaaataccaccaaaattatttatagcaattgtagcttctgagtcagaatggggaagaggggcaaatgcaacaaaacaaaaaaaccccctatctataatgggggctggccctctacaagtttacccttcaattgaagaaggacttgataaaggtgcaaaaaatttatatgacttatacatttctgaaggtttgacaactcccgagaaaatcgggccaaaatacgcaccagtaggcgctagtaatgacccagatgacttaaatagtaactgggtacctacagttaagaaaatcatgaagtcattcggtggcaaagaggctaaatgttctactgaaagcagtggtggaggttcagacggaaaaggatttgattttaaaggagaattccctaaacctgacaaatcgaaatataacggtcaatcttatccatggggacagtgtacttggtatgtacatcaacgtagaaaagaaattggcaaaccagtacctttaacttggggtaatggtggggactggggcgataatgcaaaagcgcaaggctgggaagtaggtagtaagccgaaagctggcsstggcgcctctgtaaaacccggtaactttggcgcaccaccaccgtatggacacatcatgtttgtcgaaaaagttaaaaaagacggtggaattgtagttagtgaggccaatgtaaaaggcctaggagttataagttcaagagaattttcaaaagcagaaacacaacgtatgcaatttatttatgataagtag

SEQ ID NO: 2274 - DNA, 486 bp, Staphylococcus aureus
atgaaaaaattattaactatagttattttattcactttggttctggctggttgtggccaaaatcaaagtgagaaaaatagtgaaaaacataatgaagaaaaaacagtagatactacagaagaaagaaacgatatgataaaaggtctaattgaatatggttatgaaaatgatgattataaaggttataagcatatgaaagatatattatctgaaaagttgcaaaagcaagcagaattgcaaaatcaatcagcacaaactaaaggtgtaaaaaaagaaactaaagacattaaactttatcaagacgtagataatgatgatgaattgatttattctattaaactttcaattacaaacaaaaaagagaaaaactctgactactcaatgagatatgggaaaattgaattaacggaagaagaaggtaaacaaaagatagataatgtcgaagaactaacacaaagaaatttagtaagtatgaatcaagaatag

SEQ ID NO: 2275 - DNA, 2103 bp, Staphylococcus aureus
atgaacactttaattctatgtgaaaaaccttcacaagcaatggacttaagcactgtttttgcaaaaaagaaaaagcaaaatggatatatggaaatttcagatgaacaattaaatgtaagtggctttttaacttgggcagttggtcatttagtcgaattgaaggaaccacaagaatatgacgaaaaatataaaaattttagcacatatcctatattgttagaaaaagacgattttcaatttaaagtatctgacaaaacgaaagatcaatttaacaacattaaaaaaatatttaaagaaaacaagattgatgaagttattattgctactgacccagctagagaaggcgaaaatatagcatataaaattttaaatcaattgaaagtaacagataaagttactataaaaagattgtggcttacttctaaagtagaaagcagtataagaaaggcttttaaaaatatattacctaaagaaaaaacttatggattttacaaagagggcagggctagagaattaagtgattggttagtaggaattaacttatcacgtcatttcactaaaatttcacgagaattaggaaatgacggtgttattcatatcggtagagtatctagtcctacattaaacatggtttacaacagagagaataacattaaaggttttaaaggtaaaaagttttataaagtttcagcgactattaacaaagatgaacaagaagtgaaaacagagttaaaaaacaaatttgacagtgaagatgaattgcacgaatttttgtttgaaaatgatattacagatttaacacaaaaagggttagttactgatattgaaaaagaaataggctatacaatgccacctaaattttatgacttatcagctttacaagaagatatgaatgataaatataaaataagtgcgaaacgaacattagaaatcgcacagacattatatgagaagaaattaatcacatatccaagaactgattcaagatatatcacagaagatgaaaaagaaatgttattagaaaatatagactatttaaaagaaataacaaagattaatttgaataatgaattaactaataacagcttgattaatccttctaaaatagaagatcattacgcaatattaataactggaaatgattttaacaaagtagatttaaaagaagaagaaatcaatgtttataaaagtatattacaaaatgtggccatgaattttatggataaagaacaatatgaaacgactactatagaaatcgctgttaaaaagcttatgtttgaagtgaaaggtaaaattattcaagataacggatttaaagctttgttaaataaacaaaaaacttccgaagaaacaattcctaattttgaaaaaaatgaagaagtagacattgaattagatttgttagaaaaagaaacgacacctccaaaaagatatacagaaaaaacattgttaaaagcaatggccaatcctatagaaacactagaagatgaaggcttaaagtctacacttaaagaagttaaaggtttaggcacaccagcaactagagccgatattatagaaaacttgaagaaaaataaatatattcaagtacaaaaaaacaaaatttatattactaaaaatggtatattagcttgtttattattggaaggacatttactttcaaaaccagacttaacaggacaatgggaaaaatatttgaatggtattagtaaaggcgaaaaagatgatgattcatttataaataccattaatgaaatgattaaaaaaacaattaatgaagaagttaaaaataaagaaagtatacaaaaagtggccaaagagaaagtatcgactaacaatatagcaaaatgccctgcttgcgataatggctatttaatagatagaaaaggtttttatggttgtacagagtacaataacggttgtgaatttactattcctaaaaaattgttagaaaaaagtatacctccaactgtagtaaaagcattatgtgaaagtaagacaacaaaaaaattgaaaggctttaaatcaaaaaaaagtggaaagtcatttgattgtaagttgatattaacaaaagaaaacaaacttcaattttcattcgattaa

SEQ ID NO: 2276 - DNA, 465 bp, Staphylococcus aureus
gtgaaaaaaggaatattcattttaactggtattatttggctagtattaatatatttagcgcaaatattagcatatgctttaaatacactaagtaatactagcaataagcaaaagatatttagtgatatatcacagttgtttatacctccagctaaacacccaataagcactattatcggttttgtatctgataaaaatacagtgttttttgtaataggtgtaatagcaacaattatttgtatatatattcttataaaacaattatttgagagcaaagacggaaacgaaaaaaatcaagactataaaattgctaaacatggttctcatggatcagctaaatttgccgaagatagcgaattgttttcagaaggacattataaaaaaatgaaagaaaacgacattacgaactatgtttataacagtttagataaatcattaatagaagaaagaagtgataaggaatga

SEQ ID NO: 2277 - DNA, 1641 bp, Staphylococcus aureus
atgactacacttttaggcgaattagaaagtaaagcaacttctataaataaaaagaatctagtaatacaagattttgatactaaatgccctaatagaaatatatttgtggtaggagggccaggttcctataagtcagctgggtatgttattcctaatgttattgttaaaaatcaacaatcaatagttgtaactgaccctagtggcgaagtttatgaaaaaacatctaatattaaacgcatgcaaggttttgatgttagagtagtaaatttcaaaaactttttagcctctgatagacaaaacttttttgattatattgataaagattctgattgttcaatagttgctgaattaattattaaatcagctggggattctaaaataaataaagacgtatggtataaagcctctgtaggattattaaattcattgcttttatacgctaaatatgaatttgaaccagaaaaacgaactataggaaacattattaaatttattcaaaataacaaacctaatcaagatgaagaaggatcagttgaattagataaacgctttaatgaattatctaaagaccacccagctagagaaagttatgaatttggttttgcagtatcagaaggaagaacaagagcaagtattatactaacctttgtagccgatttacgaaattacattgataacgaaattagaagttatacaagcgattctgattttgatttacgagatgtaggattaagaaaaactattatatatgtaatgttgccagttttggggaacactgttcaatcactttctagtttattcttctctcaaatgttccaacagctatataggttaggggacgaaaacggtgctagacttccagtcccagtagattttttactagacgaatggccaaatatcggcgcaataccagactatgaagaaactttagcaacttgtcgtaagtatggtattagtatcacaacaattgttcaatctatatcacaagcagtagataaatataataaagataaagctaacgctattataggtaaccacgcagttattttatgtttaggtaatgtgaataatgatacagcaaaatatataaaagaagaattaggtaatgctactgtagagtttgaaacaagtagtgaaggttcttctagtggtaaagatagcagaagtaaatcatcaaataaaaatgtaagctacactggaagggcattactaaatgaagatgaaataagtaatatgcaacaggataaagctattcttataactaaaaatagaaatcctaaaattattaaaaagttagcatattttaaaatgttccctaatttaacagaaacgtatatagcacctcaaaacgaatacaaacgtaaaaaaaaccagtctatgattgataagcataatagattaagagaagaatgggataaaaaacaagagaaaaataaacagcaaaaactagaagaatataaagaagaacaaagacagaaagagttagagaaagaacaacaaccacaagaagaacaacaaaatgagaaagtaaaagaaagtaaagacaaaaacgatcaagaagataagaaagacgagcaacaaaaaattaatgattctaagaaagcattctacgaaaaattaaaacaaaaacaagctaaataa

SEQ ID NO: 2278 - DNA, 918 bp, Staphylococcus aureus
atggattggattaaagacgctattaaagaactgaccgaaggtattgcagacgkkatgatgaattttatatttcagtttctttatacgttattttacgaacctttaaaattctttatatggttgttagataaaatacttattgatcctaatagtatttcaagtgattacatttcaaacgcctctgtattagttaatagcttaatcacttcaatagcaatatgtgtgtttgcttttaaaatggttcaagttatgaaacaaaatgcagaaggtaatgctgaaagtccaggctattatgtagcacaattattaccaagttctttattggtagcagttttaccatggctagttgatataatgactaaattatcttattcagcgactagggcatttttagatgtaggtcaaaaaagttatttagaaactattaaagaatggagttctttaaaaaaaggtcaagacggatttaaagaaatgctaggttctatggggactatggcaggtagtcaaattatgtttattctatttattctattgattttagtatttactgtagtatttattttccaatttgttagtaggatagctgatttagtaataatgaaagttgttgccccgttagtagcagtttctttattagcagatgaaaataattatataggtgtatggtggcgtgaattattagcaattagtattcaattaccattacaagtgtttactttctttggaggaataaatttattctttggtgcaaagctagacgtaggcacattattattaggtataggattctttattattacagttaaatcgccttcctttattagatcaatggtttactctactggaagtgggcgcatggcaactggaatggctggaagtggtgcaaaacttctagttagaaaaatgttatctaaataa

SEQ ID NO: 2279 - DNA, 1779 bp, Staphylococcus aureus
gtgaatcaaacaattcttaatcgtgtaaagactagagtratgyaycaaytggtatcatcrcttatttatgagaatattgttgtgtataaagcgtcatatcaagayggtgycggtyattttacaatagaaggamatgattcagagtatcgttttactgctgaaaagacacatagctttgatcgtatacgtatcacatcaccaattgagcgtgtcgtaggagatgaggcagatacaacaacagactatacacaattaytgagagaggytgtatttacatttcctaaaaatgatgaaaagctagaacaatttattgtygagttattacagacagaaytaaaagatacrcaaagtatgcagtatcgagaatcaaacccaccagcaacacctgagacatttaacgactatgaattttatgcgatggaagggcatcagtatcatccaagttacaaatcacgtttaggatttacgttgagtgataatttgaaatttggtcctgaytttgtaccaaacgttaaactgcagtggttagctatcgacaaagataaagtagaaacgacggtatcaagaaatgttgtagttaacgaaatgttacgtcaacaagttggcgataagacttatgaacattttgtacagcaaattgaagcrtctggcaaacatgtaaatgatgttgagatgatacctgtacacccatggcagtttgaacatgtcatycaagttgatttggctgaagaaaggcttaatggcacagtactatggttaggggaaagtgatgagctatatcaycctcaacaatcgattcgtacgatgtcgccaatagacacgacaaaatattatttaaaggtaccaataagtataacgaayacttcaacgaaacgagtgttggcrcctcatacaattgaaaatgcagcgcaaattacggattggttaaagcagatacagcaacaagataygtatttaaaagatgaattaaagacagyttttctaggggaagtcttaggacagtcttatttaaatacacaactttcgccttataaacaaactcaagtttatggtgcgttaggtgttatatggcgtgaaaatatatatcayatgttaatcgatgaagaggatgcgataccatttaatgcactttatgcragtrataaggatggtktaccattcattgaaaaktggattaaacaatatggttctgaagcttggacaaagcaatttttagctgtagcgattcgtccaatgattcatatgctttattatcacggtattgcctttgaatcgcatgcacaaaatatgatgctcattcatgaaaatggttggcctacacgtattgccttaaaagatttccaygatggtgttcgttttaagcgtgagcatttaagtgaagcwgcttcacacctgacattaaagccaatgccagaagcacataaaaaagtgaatagtaattcatttattgaaacagatgaygaacgtttagtacgygactttttacatgatgcatttttctttattaatatcgccgaaatcatcttatttattgaaaagcaatatggtatcgatgagvagckrcaatggmaatgggttaaagrcatyatygaggcgtatcaagaagcatttccagagytgaataactatcaacatttygatttgtttgaacctacgattcaagttgaaaagttaacgacacgtcgattattaagtgactccgagttaagaattcatcatgttacaaatccattaggtgtaggaggtatyamtgatgcaacaactatctctgaaacatag

SEQ ID NO: 2280 - DNA, 1041 bp, Staphylococcus aureus
gtgatcattgccataattatattgatatttatttcgtttttcttttcaggaagcgagacggcattaacggctgccaataaarcaaaatttaaaactgaagctgacaaaggtgataaaaaagcaaaaggcattgtaaagttacttgaaaaaccaagtgagtttattacaackattctaattgggaataatgtcgcgaatattttattaccaacacttgttacaattatggctttacgttgggggattagcgttggkattgcatcagctgttttaacagttgttatcattttgatytccgaagtgattcccaagtctgtcgctgcracatttccagataaaataacaaggcttgtatatccaattatwaatatttgtgtcattgtgttycgycctatcacattacttttaaataagttgacggacagtattaatcgaagtttatctaagggycaacctcaagaacatcaattttcaaaagaagaatttaaaacaatgttagcaattgctggacatgaaggtgctttaaatgaaattgagacgagtaggttggaaggtgtcattaattttgaaaatttaaaagtaaaagatgtwgatacaacacctagaattaatgtgacggcatttgcttcaaatgcgacatacgaagaagtttatgaaacggttatgaataagccatacactagatatccagtgtacgagggagatattgataacattattggrgtgtttcattctaaatatctgttggcttggagtaataaaaaagaaratcaaattacaaactattcagctaagccattatttgtgaatgaacacaataaagctgaatgggtattacgtaagatgactatttctagaaaacatttagcaattgtgttggacgaatttggtggtacygaagcgatagtgtcacatgaagacttaattgaagaattattaggtatggaaattgaagatgagatggataaaaaggaaaaagaaaaactttctcaacagcaaattcaatttcaacaacggaaaaatcgcaacgtatctatataa

SEQ ID NO: 2281 - DNA, 402 bp, Staphylococcus aureus
atgaaaaaagtaaataacgayactgtatttggrattttgcaattagaaacacttttgggtgacattaactcaattttcagcgagattgaaagcgartacaaaatgtctagagaagaaattttaattttactaactttatggcaaaaaggttytatgacgcttaaagaaatggacagatttgttgaagttaaaccgtataagcgtackagaacgtataataatttagttgaattagaatggatttacaaagagcgtcctgttgacgatgaaagaacagttattattcatttyaatgaaaagttacaacaagagaaagtagagttgttgaatttcatcagtgatgcsattgcaagtagagcaacagcaatgcaaaatagtttaaacgcaattattgctgtgtaa

SEQ ID NO: 2282 - DNA, 393 bp, Staphylococcus aureus
atgataaacaaagtaatatatagtggacgtatcgcaactgatttaaaattaagaaaaagtaaaaatgaaaagtcttatgttttctttaacatagctgtacctaggcagtttgataatgatagaacagattttattaattgtgttgtatggggaaaacaagcagaaagtttagttgattatcaaagtaaaggtaatctaattattattgaaggttcaactgaaacatataaaaaagacaatattaatatgtctagatgtttggttgaaaagactatctttttagaaagcaaaaaagaaaacaaaaaacatgacgtgtcagaagatgacgctataagcccagcagaagatagtggcaacgataaatctatctctgatgatgacttaccattttaa

SEQ ID NO: 2283 - DNA, 384 bp, Staphylococcus aureus
atgaataacaaaacagtgaagcaatccgtaacgatggttgcttcactgttttattatgaattattaataagtgctgttacttctcccttaaatacaatttcttcattttcattgtatgttgaaagtgacactgtaacgagtccattttctttttttatggatttcttatttgtaatttcagcgataacgtacaatgtattacctgggtatacaggtttaataaatttaacgttattcatttgtgttcctgctacaacttcttctccgtatttaccttcttctacccataatttaaatgatattgaaagtgtatgcatgccagatgcaatgatacctttaaatctactttgttctgctttttctttatctatatgcatatattga

SEQ ID NO: 2284 - DNA, 189 bp, Staphylococcus aureus
atgcaccattttatctgcattgtctgtaaagataccatcaactccccaattagcaagttggtttgcacgtgctggtttgtttacagtccatacgttcaattcataacccgcttcttttaccatttttacttttgctttagtaagtttggcatcttcagtgtttactattttagcattacagtaatctaa

SEQ ID NO: 2285 - DNA, 1545 bp, Staphylococcus aureus
mtgatttcattttttacaaaaactactgatatgatgacatcaaaaaaaagatggactgcactagtagtattagctrttagtttgtttgttgttacaatggatatgacaatattaattatggctttaccggaattagtaagagagttagagccttctggtacccaacagttatggatagttgatatatactctcttgttttagctggctttataattccattgagtgcctttgctgataaatggggaagaaaaaaagcattattaactggatttgctttatttggcctcgtttcattagctatatttttcgcagaaagtgcagagttcgtaatagctattcgatttttacttggtattgcaggtgctttaataatgccaactacyctttcaatgataagagtaatttttgaaaaccctaaagaaagggccactgcattagctgtatggtcaatcgyttcatcgataggtgctgtttttggaccaattatcggaggagctwtacttgagcaattttcatggcactcggcatttttaattaatgtaccgtttgygataatagcagttgtagcaggtttatttttattaccagagtctaagttatcaaaagaaaagtctcactcgtgggatattccttctacaattttatcaattgcaggcatgattggactggtatggagtatcaaagaattttcaaaagaaggactagcagatattattccatgggttgtaatagtattagcaattaccatgatagtgatatttgttaaacgtaatttatcaagttctgatccaatgttagacgtaagactttttaaaaagagatcattttcagctggtacaattgctgcatttatgacaatgtttgcaatgrcatctgttttgttattagcttcacaatggttacaggttgtggaagaactttctccttttaaagctggcttatacctattacctatggcaataggagmtatggtgtttgcaccaattgcacccggattagcggcgcgatttggaccgaaaatagtgttaccttccggaattggaaytgcagccattggcatgtttattatgtatttctttggtcatccattatcatattctacaatggctttagcattaattttagttggagctggtayggcttcactagcagttgcatctgctctaataatgttagaaacacctacatcaaaagcaggtaatgcagctgctgttgaagagtctatgtatgaccttggaaatgtttttggtgtagcagtacttggtagcctatcttctatgctttatcgtgtatttttagatatttcatctttttcatcaaaaggtatagttggagatttagctcatgtagctgaagaatctgtagtgggcgctgtcgaagtagctaaagctacggggataaaacagcttgcaaacgaggctgtaacatcatttaatgatgcttttgtagcaactgctttagtaggtgggattatcatgattatcatttcaatagttgtctatttgttaattcccaaatcacttgatataactaaacaaaaatag

SEQ ID NO: 2286 - DNA, 1068 bp, Staphylococcus aureus
atgtggaataagaaycgacttactcaaatgttaagtattgaatatccaattatacaagcaggtatggcaggaagtacgacaccgaaattagttgcatcagtaagtaacagtggtggrttaggcacaataggcgcaggttactttaatacgcagcaattrgaagaygaaatagattatgtacgccaattaacgtcaaattcttttggygtaaatgtctttgtaccaagtcaacaatcatatacyagtagtcaaattgaaaatatgaatgcatggttaaaaccttatcgacgcgcattacatttagaagagccggttgtaaaaattaycgaagaacaacaatttaagtgtcatattgatacgataattaaaaagcaagtgcctgtatgttgttttacttttggaattcmaarygaaymkattatarrmagrttgaaagmagcraayrtyaarctwataggtacagcaacaagtgttgatgaagctattgcgaatgaaaaagcrggtatggatgctatcgttgctcaaggtagtgaagcaggtggacatcgtggttcatttttaaaacctaaaaatcaattacctatggttggaacaatatctttagtgccacaaattgtagatgtcgtttcaattccggtcattgccgctggtggaattatggayggtagaggagttttggcaagtattgtcttaggtgcagaaggggtacaaatgggcacygcatttttaacatcacaagayagtaatgcatcagaactactrcgagaygcaattataaatagtaaagaaacagatacagtcrttacaaaagcgtttagtggaaagcttgcacgcggtatcaacaataggtttatcgaagaaatgtcccaatacgaaggcgayatcccagattatccaatacaaaatgagctaacaagtagcataagaaaagccgcrgcaaacatcggcgacaaagagttaayacatatgtggagtggacaaagcccgcgactagcaacaacgcatcccgccaacaccatcrtgtccaatataatcaatcaaattaatcaaatcatgcaatataaataa

SEQ ID NO: 2287 - DNA, 561 bp, Staphylococcus aureus
atgaatagagcagatatttttaaaatatttgatgtagaacttaatataactatatttttaggagcactagtagcaactttcatctattttataagttacatgaacaatgtaaatgaattaattacattatgcttaacattagcttttcctgcatatttattaaaaattagcagatcgttcgaggttattttattagaggaaaaaataaaaaatagtaaaatcaaaatctgtgacaaagatagaattgaacgagagatactggtgaaaaagaacctaatagatgaactattgkttcstwryaragttattwawaratatacactgacaattttaatttacagtataggtattattattcttttactactttgtaatatgttaagttatggaattggtgaaaatgtcaattttatctggagattactagcttgttatgtaacgagtgtcacagtgattatagttgccttgattataatgataatgatatttgatcttataattggattactattaaattttcaaatatttttaaaaaataaaaagtatgatgactttttataa

SEQ ID NO: 2288 - DNA, 96 bp, Staphylococcus aureus
ttgcgtttctattttaccaatttaatcaaacgaaaacatcaagctgaagatcgccgaaagattttaatcaagcaaaaacatcaaactaaagttcgc

SEQ ID NO: 2289 - DNA, 828 bp, Staphylococcus aureus
atgtggaagtgggaagctgaaaatgatgcgaaaggcgtcgttgttattgctcataatatattagaacatacgggaagatatgcatatgttattacgatgttaagaagaaatggctatcatgtgattatgggagatttgcctggtcaaggtcaaacttcaagagctaataaaggacaaattgaaaactttcaaacgtatcacgaaagtttgctagaytggttaaagatagctaatgaatataaaattcctacttatgtattaggggtaggacttggcggtttgattttattaaatttacttgaaaaagtagaattgccaatcgaggggatgatgttaatttctcctatgctagaacttcaaaagaatggaaaaaatcgtaaagataaacttgtttcaaatataggtaaaatttcaaaagacacacgttttaatgttggtgtagaaccaaaagatttaacacgtaatttagaaattgttgaagaaacagttaacgatggtttaatgttaaaaaaagcaacgtatcattggtataayacaattaatgagacgatgaaagatacgatggctcatattcatgacattcaaccaatgccaacrctattaatgtatggaacgaaggatttaattgttgawactagggcaattgatgagtttaaagaaaaatatcaaacacctgaattatattttaaagcttggcaaggtttttaccacgaggttcacaatgagccagaacgygatgaagtaatgcgttatattctgactttcttaaataayagcgtcaatacaatgggctttattgttgaagatgacgaaattgtagaaatttaa

SEQ ID NO: 2290 - DNA, 888 bp, Staphylococcus aureus
ttgwtttrtaaaaattacaactgtaatatcggagggtttattttgaaaaagttaatayttttaattgyaatkgctttagttttaagtgcatgtaattcaamcagtycacatgcyaaaragttaaatratttagaaaaraaatataatgctmatattggtgtytatgcwttagatactaaaagtggtaaggaagtaaaatttaatkcmgataagagatttgcctatgcttcracttcaaaagcgataaatagtgctattttgttagaacaartaccttataataagttaaataaaaaartacatattaacaaagatgatatagttgcttattctcctattttagaaaaatatgtaggaaaagmyatcactttaaaagmacttattgaggcttcaatgrmrtatagtgataatacagcaaacaataaaattataaamgaaatyggtggratcaaaaaarttaaamaacgtytaaaaraaytaggagataaagtaacaaatccagttagatatgaratagaattaaattactattcrccaaagagcaaaaaagayacttcaacrcctgctgcyttcggyaagacyytwaataaacttatcgcmaatggaaaattaagcaaaraaaayaaraawttcttacttgatttaatgttwaataataaaarcggagayactttaattaaagayggtgttycaaaagactrtaaggtkgctgataaaagtggtcaagcaataacatatgcttctagaaatgatgtwgcttttgtttatcctaagggccaatctgaacctattgttttagtcatttttacgaataaagacaataaaagtgataagccaaatgataagttgataagtgaaaccgccaagagtgtaatgaaggaattttaa

SEQ ID NO: 2291 - DNA, 366 bp, Staphylococcus aureus
atgacaaaagatatgtgtgaagttacctatattcatgaagataaggtaaacagggctaaaaaagaccttgctaaacagaatcctatggatgtagcgaaagtttttaaggctctatcagatgatacaagagttaaaattgcttatgttttgtctttagagggagagttatgtgtttgtgatgtagctaatatcattgaatcttcaacggctacggcatcccatcatttaagattattgaaaaatttaggtatagcaaaataccgtaaagaaggaaaaktagtctattattcactagatgatgagcatgttaaacagcttgtagaaaaagctttcttgyatcaaagggaggttgctagtattggatag

SEQ ID NO: 2292 - DNA, 936 bp, Staphylococcus aureus
ttggagcatacaactatgaaaatgacacaaattgcgaaaaccagtttagcactatcacttttaacaacaggtgcaagtatagtaacaacgcaatcggctaatgcagaagtagcatcagcacttaaaacagaacaggcaataaaatctaaaatacaaaaagtaacaacatcgccttcaccaaatgtacaaccgcaatcgccacaaccaacaccaagtgtaacaactccgccttcaccaaatgtacaaccgcaatcgccacaaccaacaccaaacccaacaacaccgcattcatctaatgtcgaaacaaaacaaccgcaatcgccaaccacaaaacaagcacaaaaggaaataaaccctaaatataaggatttaagaacatattatacgaaaccgagtttagaattcgaaaagcaatttggctttatgctgaaaccatggacgacagttaggtttatgaatgttataccagattggttcatttataaaatagctttagttggaaaagatgataagaaatataaagatgggccatacgataatattgatgtatttatcgttttagaggacaataaatatcaattgaaaaaatattctgtcgggggtatcacgaagacaaatagtaaaaaagttgatcacaaagcagaattaagcattactaaaaaagatgagaaaggcaaaatctcacacgatgattcagaatataagataactaaagaagagatttccttgaaagagcttgattttaaattgagaaagcaactcattgaacaacataatttgtacggtaatattggttcaggaacaattgttattaaaacgaaaaacggtgggaagtacacgtttgaattgcataaaaaattacaagaacatcgcatggcagatgtcatagatggcactagtatcgaaagaattgaagtgaatctaaaatcatcgtga

SEQ ID NO: 2293 - DNA, 720 bp, Staphylococcus aureus
ttggagcatacaactatgaagatgacagcaattgcgaaagccagtttagctctaagtattttagcgactggggttataacatcaacggctcaaactgtaaatgcgagcgaacatgaatcaaaatatgaaaatgtgacaaaagatatcttcgacttgagagattactatagtcgcgcaagtaaggaacttaaaaatgttactggctatcgttatagcaaaggtggcaagcactaccttatctttgataaaaatagaaagttcacaagaatacaaatttttggtaaagatatagaaaggattaaaaaacgtaaaaatccaggattagatatatttgtagttaaagaagcggaaaatcgcaacggcacagtgtattcatatggtggcgttactaagaaaaatcaaggcgcttactatgattacttaagcgcacctagattcgttattaaaaaagaagtaggtgcaggtgtttctgtgcatgttaaaagatactacatttataaggaagagatttcgctgaaagaacttgattttaaattacgacagtatttaattcaagattttgatctgtataaaaagtttcctaaagctagcaagataaaagtgacaatgaaagatggcggctattatacgtttgaactcaataaaaagttacaaacaaaccgaatgagtgacgtcatagatggcagaaatattgagaaaatagaagccaatattagataa

SEQ ID NO: 2294 - DNA, 849 bp, Staphylococcus aureus
atgataaacatcggattaacaggttggggtgatcactattcattatatgaagatttagaacgccaaaccgataaacttaaaacatatgctggacattttccggttgtcgaattagatgcgacatactatgcgatacaaccggaaagaaatatattgaaatggataaaagaaacgcctgatacatttgaatttgtggtcaaaattcatcaagcactcacattgcatgcagactacaaaacatttgcagatacaaggcaagaactatttgatcaatttaaraatatgttagagcccttacatacacagaaaaaattagcaatggtattrgttcaatttcckccrtggtttgactgcaatgcacaaaatatcaaatatattttgtatgtaagacagcaattacaagcatttccaatgtgtgtagaatttaggcatcaatcatggtttagtgatgcatttaaagaacaaacattggcatttttaacagaacatcaratcattcatgcagtagttgatgaaccacaagtgaaagatggcagtgtacctttagtcaatcgaatcacaaatgaaattgcgtttgtacgttatcatggacgtaatcattayggttggactaagaaagatatgtcagatcaagaatggcgmgatgtacgctatttatatgattataatgagcaagaattaatagacttrgcacaaaaggcacaaatattagcacaaaaagctaagaaagtttacgtcatatttaacaataattctggtggtcatgcagcaaataatgccaaaacatatcagcgattattgaatatagaatatgaagggttagcaccacaacaattaaaattattttaa

SEQ ID NO: 2295 - DNA, 117 bp, Staphylococcus aureus
ttgatgttgatttcatttrtatataataatatggacaacaataatactataaatagaaatctacatagtgaatttgctataattatgttattgaagattaatgaaaaaggggcagta

SEQ ID NO: 2296 - DNA, 660 bp, Staphylococcus aureus
ttgaagaaaagtcctatccctaaaatatttggagatgataaaatgatcgcgacgatactgacggctactgcggtatatgtagcaacaggaattgattatctcgtcatattaattcttttgttttcgcaagtaaaaaaaggtcaggtaaaacatatttggataggacaatatatagggactgcaattgtgataggagcaagtcttttagttgcacagggggttgtaaatttaattcctcagcaatgggttatcggactacttggacttttaccactttacctaggcgtgaaaatatggattaaaggagaagaggatgaagatgaaagtagcattttatctttattctcctctggaaaatttaatcagttatttttgacgatgattttcatcgtattggcttccagtgcggatgacttttccatttatataccgtacttcacgaccttaagtatgtctgaaatctttattgtcactattgtctttctaattatggttggagttttgtgctatgtcagttaccgtctagcttccttcgattttatatcggaaacaattgagaaatatgaacgttggattgtaccaattgtattcattgggctaggtatttatatattgtttgaaaatggaacatycaatgctctgatttcatttcttctttga

SEQ ID NO: 2297 - DNA, 1133 bp, Staphylococcus aureus
atggaacaatacaaagaagtacacattaattcattaaacaaagaagaattagaaaaattggcaaaaatgggtcaattgattgatgttagaacaaaagaagaatatgaattaggacacattaacggttcaactttacacccagtagaagagattaaatcattcaataagaatagcaacaaaacgtattatatacattgtaaaagcggtaaccgaagcactaaagcttgcgattatttagccaaacaaggttatgatgtcgtgaatttaaagggtggatataaagattatgaagcaaagaacttcaatagtgctcctttaatagaaaaagatattgaaatcaaagagaatcgtaaacaatttgattttagaggtcttcagtgccctggacctattgttaatatcagtaaagaaattaacaatatttcaacgggtgagcaaatcgaggtaacagttacagatcctggtttcaatagtgatattaaaagttgggcgaaacaaacagggaatacccttgtaaatcttactgaagaagcaaatgtaattaatgcaattattcaaaaagaaaagccaaaagaatttgaaatcaatgacactgctacaggtacaacaattgttttatttagcggtgagttagataaggcagtagcagcaatgatcatcgcaaatggcgctaaagcagcaggtaaagatgtaactattttctttactttttggggcctcaacgcattaaaaaaagcgcaatcaactcgcgttaaaaagaaaggtatttccaaaatgtttgaccttatgttacctaaggatccaatacatatgccattatcaaaaatgaatatgtttggactaggtaatattatgatgcgttatgtaatgaacaagaaaaatgttgattctttatactcacttatcgatcaagcaatcgatcaagatataaagttaattgcttgtaccatgagtatggatgttatgggaatttcaaaagaagaattaagagatgaagtcgattatggtggcgtaggtacttatattggacatactgagcaagcaaatcataacttatttatctaatcaataaaatctattttaaaaaggagttttttttgtttttcaaacaattttatgaagacaatttttca

SEQ ID NO: 2298 - DNA, 939 bp, Staphylococcus aureus
ttgtttttcaaacaattttatgaagacaatttttcacaagcatcttatttaattggatgtcaacgtacaggagaagcaatgattattgaccctatacgagatttaacaaaatatttaaaagttgcagataaagaaggattcacaattactaaagctgcagaaacacatattcatgctgattttgcttcaggtattagagatgtggcaaataaattgaatgcaagtatatacgtatctgatgaaggtaaagatgaatttaattataaaaatatgcctaaacaaacacatttcgttaagcatcaagatattatctatttaggaaagattaaattagaagtcttacacactccaggccatccccctgagagtattagttttttacttactgacgaaggtgggggttccagtataccaatgggattatttagcggtgacttcatctttgttggtgatgtaggtagaccagatctattagaaaaagctgtaaatgttgaaggttctacaaaaatcggagcaaaacaaatgtatcagtccatacaatttgctgcaacattaccagactatattcaaatttggccaggtcatggtgcagggagtccttgtggtaaagcgctaggttcattacctacaactactttgggttatgagaaaataaacaactgggcttttaatgttaaagatgaaacttcatttatcgaaactttaacactcaatcagccagctccaccacaccatttttcacaaatgaaaaaaataaatcaatttggtatgcaaatgtaccaaccatataatgtttaccctagttcaagcaatacacaaactgcttttgatcttcgaagtaaagaagcattccatggtggtcatatgcatggaactatcaatattccttttaataaaacttttataaatcaaattggttggtatttagattatgactaa

SEQ ID NO: 2299 - DNA, 828 bp, Staphylococcus aureus
atgttattaacaattacattattagttytaatcggwggtttgtcagcgattatagggtcwatcgtaggcattggaggcggtattattatcgttccaacaatggtttacctcggtgttgaacatggattactacataatattacaacrcaartagcgatwgggacrtcktcwgtcattctaattgtgacaggactttcttcatcrcttggatatytaaaaacaaaacaagttgatattaaaaatggytcyatctttttatttggaytattaccaggttcattgcttgggtcmttcattagtagatatttaacatttgagtcatttaatttatattttggwatctttttaatyttygtagcyattttattaatggtaagaaataagattaaaccgtttaaaaywttygataaaccmaagtatgaaaaracttatgtagacgctaaaggtaaaacatatcattatagtgtkccaccattgtttgcttttattacaacgtttttaattggtatattgacaggtttatttggtattggaggtggcgcactaatgacgccactaatgcttattgtatttagatttccacctcatgtagctgttggaacaagtatgatgatgattttcttttcaagtgtcatgagttctatagggcacattgctcaaggtcacgtagcttggggttatgcaatcattttaattatwtctagttattttggtgcgaaaatcggtgtcaaagtgaatcaatcaattaartcagatacggtagtaacattattgagaacagtaatgttgttaatgggtatatatttaattattcgwgcgttgatttaa

SEQ ID NO: 2300 - DNA, 465 bp, Staphylococcus aureus
atgaattttgaaggtaaattaattggaaaagawttgaaagttgyaatcgtagttagtcgatttaatgattttatcactggaagattacttgaaggtgcaaaagatactttgattcgacatgatgttaatgaagacaatattgatgtwgcatttgtkccdggtgcgtttgaaattcctttagtagctaaaaaattagcctcatcaggaaattatgatgcartaattacattaggatgcgtaattcgcggtgctacgtctcattwtgattatgtttgtaatgaagtcgcgaaaggtgtttctaaagtraatgatcaaactaatgtaccagtcatatttggtattttaacgactgaaagtattgaacaagctgtkgaaagagcaggtacgaaagctggyaataaaggtgcygaagcagcagtaagtgcaattgaaatggctaatttattaaaatctataaaagcatag

SEQ ID NO: 2301 - DNA, 660 bp, Staphylococcus aureus
ttgaatttaaacaatgaccatggacctgatcccgaaaatattttaccgataaaagggaatcggaatcttcaatttataaaacctactataacgaacgaaaacattttggtgggggaatattcttattatgatagtaagcgaggagaatcctttgaagatcaagtcttatatcattatgaagtgattggagataagttgattataggaagattttgttcaattggtcccggaacaacatttattatgaatggtgcaaaccatcggatggatggatcaacatatccttttcatctattcaggatgggttgggagaagtatatgccttccttaaaagatcttcccttgaaaggggacattgaaattggaaatgatgtatggataggtagagatgtaaccattatgcctggggtgaaaattggggacggggcaatcattgctgcagaagctgttgtcacaaagaatgttgctccctattctattgtcggtggaaatcccttaaaatttataagaaaaaggttttctgatggagttatcgaagaatggttagctttacaatggtggaatttagatatgaaaattattaatgaaaatcttcccttcataataaatggagatatcgaaatgctgaagagaaaaagaaaacttctagatgacacttga

SEQ ID NO: 2302 - DNA, 900 bp, Staphylococcus aureus
atggaatttaaattacaagaattaaatcttactaaccaagatacaggaccatatggtataaccgtttcagataaggggaaagtttggattacacaacataaagcaaatatgataagttgcatcaatttagatggaaaaattacagagtacccactaccgacaccagatgcaaaagtcatgtgtttaactatatcctcagatggggaagtttggtttactgagaatgcagcaaacaaaatagggaggattacaaaaaaagggattattaaggaatatacattgcctaacccagattcagcaccctacggtattacagaaggaccaaatggagatatatggtttacagaaatgaatggcaaccgtattggacgtattacggacgacggtaaaattcgtgaatacgagctgcctaataaaggatcttacccttcttttatcactttgggttctgataatgccctgtggttcacagaaaatcaaaataatgctattggtagaattacagaaagtggggatattacagagtttaaaattcctacacctgcatcaggaccagttggtattacaaaggggaacgacgatgctttatggtttgtggaaattatcggtaataagatagggcgaataactcctctgggggaaattaccgaattcaaaattccaacgccaaacgctcgacctcatgcaattactgctggagcaggaattgatttatggtttactgaatggggggctaataaaataggaaggctgacaagcaataatataattgaggaatacccaattcaaatcaaaagtgstgaaccacatggcatttgtttcgatggtgaaacaatttggtttgcaatggagtgtgacaagataggcaaattaactctcattaaggataatatggagtga

SEQ ID NO: 2303 - DNA, 1569 bp, Staphylococcus aureus
atgaaaataatgttagagggacttaatataaaacattatgttcaagatcgtttattgttgaacataaatcgcctaaagatttatcagaatgatcgtattggtttaattggtaaaaatggaagtggaaaaacaacgttacttcacatattatataaaaaaattgtgcctgaagaaggtattgtaaaacaattttcacattgtgaacttattcctcaattgaagctcatagaatcaactaaaagtggtggtgaagtaacacgaaactatattcggcaagcgcttgataaaaatccagaactgctattagcagatgaaccaacaactaacttagataataactatatagaaaaattagaacaggatttaaaaaattggcatggagcatttattatagtttcacatgatcgcgcttttttagataacttgtgtactactatatgggaaattgacgagggaagaataactgaatataaggggaattatagtaactatgttgaacaaaaagaattagaaagacatcgagaagaattagaatatgaaaaatatgaaaaagaaaagaaacgattggaaaaagctataaatataaaagaacagaaagctcaacgagcaactaaaaaaccgaaaaacttaagtttatctgaaggcaaaataaaaggagcaaagccatactttgcaggtaagcaaaagaagttacgaaaaactgtaaaatctctagaaaccagactagaaaaacttgaaagcgtcgaaaagagaaacgaacttcctccacttaaaatggatttagtgaacttagaaagtgtaaaaaatagaactataatacgtggtgaagatgtctcgggtacaattgaaggacgggtattgtggaaagcaaaaagttttagtattcgcggaggagacaagatggcaattatcggatctaatggtacaggaaagacaacgtttattaaaaaaattgtgcatgggaatcctggtatttcattatcgccatctgtcaaaatcggttattttagccaaaaaatagatacattagaattagataagagcattttagaaaatgttcaatcttcttcacaacaaaatgaaactcttattcgaactattctagctagaatgcatttttttagagatgatgtttataaaccaataagtgtcttaagtggtggagagcgagttaaagtagcactaactaaagtattcttaagtgaagttaatacgttggtactagatgaaccaacaaactttcttgatatggaagctatagaggcgtttgaatctttgttaaaggaatataatggcagtataatctttgtatctcacgatcgtaaatttatcgaaaaagtagccactcgaataatgacaattgataataaagaaataaaaatatttgatggcacatatgaacaatttaaacaagctgaaaagccaacaaggaatattaaagaagataaaaaacttttacttgagacaaaaattacagaagtactcagtcgattgagtattgaaccttcggaagaattagaacaagagtttcaaaacttaataaatgaaaaaagaaatttggataaataa

SEQ ID NO: 2304 - DNA, 1320 bp, Staphylococcus aureus
ttgaggcttacaatttatcatacgaacgatattcatagtcatttacatgaatacgaacgcattaaagyatatatggcagaacawcggccacgacttaatcatccttctttatatgttgatctaggtgatcatgtagatttatccgcacctataacwgaagcaactttaggtaaaaagaatgtrgcattactaaatgaagcaaaatgtgatgttgcaacaatcggtaataatgaagggatgaccatttcayacgaagctttaaatcacctttacgacgaagcaaaatttatagtgacatgtagcaatgttatagatgaatcaggtcatttaccaaataatatcgtttcttcttatattaaggayatrgacggtgtgaaaatactattcgttgcagcgacagcaccttttaccccattttatcgtgcactarattggattgttaccgatccacttgawtctataaaagaagaaattraacwtcaacgaggtaaatttgatgtawtaatcgtgctaagtcattgtggcattttcttcgatgaaacattatgccaagaattgcctgaaattgatgtcatttttggtagtcatacgcatcattattttgaacatggtgaratyaataatggtgtactgatggcggcagctggaaagtatggtaattatcttggagaggttaatttaacttttgaggcacataaagtagtacataaaactgcaaagattattcctttaraaacattacctgaagttraaacttcatttgaagaagaaggaaaaacgytaatgtcyaatycagtaattcaacatccagtagtgcttaagcgtagtatgaaycacataactgaagctgcatacttattagctcaaagtgtttgtgagtatacacatgcwcaatgtgcyatcatcaatgctggcttactcgttaaagatattgtaaaagatgaagtgacwgaatatracattcatcaaatgttaccgcatccgattaatatggtaagggttagactttytggtgtgaaattaaaagagattwtarctaaaagtaataaacaagaatatatgtatgaacatgcacaaggtttgggtttcagagggaatatatttggaggatatattctttataatttagggtacattcattctacagggcgttactatctgaatggagaagaaatcgaagacgacaaagaatatgtaytaggtacgatagayatgtatacgttcggtcgttatttcccaacaytgaaagaattaccaaaagagtatttaatgccagagtttttaagagatatatttaaagaaaaattattggaatattaa

SEQ ID NO: 2305 - DNA, 1182 bp, Staphylococcus aureus
atgcaattcgataatattgacagtgctttaatggctttaaaaaatggagaamcaattattgtagtagatgatgagaatcgtgaaaatgaaggtgatttagtagcggtyactgaatggatgaacgataataccattaattttatggcgaaagaagcaaggggattaatatgcgcaccagtgtctaaagatattgcacaacgtttggatttggtacaaatggttgatgataactccgacatctttggtacgcaatttacagtragtattgatcatgtagatacaacaacaggaatwagygcttatgaacgtacattgactgccaaaaagctcattgatccwagtagtgaagctaaagattttaatcgtcctggtcatttatttccattagtagcacaagataaaggsgtattagctmgwaatggwcayacwgaagcggctgttgatttagctaaacttactggtgccaagcccgctggtgtcatttgtgagattatgaatgatgacggcacgatggcgaaaggacaagatttacaaaaktttaaagaaaaacatmaattaaagatgattacgattgatgatttaattgaatatcgtaaaaaattagaaccagaaattgaatttaaggcaaaagtgaaaatgcctacagatttcggaacatttgatatgtatggttttaaagcgacwtacacagatgaagagatagttgtactgacaaaaggtgcaattcgacaacatgaaaatgtacgcttacattctgcgtgccttacaggcgatattttccatagtcaacgttgtgattgtggtgctcaacttgaatcgtctatgaagtatatcaatgaacatggyggcatgattatttatctacctcaagaaggtcgtggcataggattgttaaacaaattacgcgcatatgaattaattgagcaaggatatgatacagtaactgcaaatttagcattaggttttgatgaagatttrcgagattatcatattgctgcacagattttaaaatattttaacatcgaacatatcaatttattaagtaataatccaagtaaattygarggattaaaacaatatggcattgatattgcagaaagaattgaagttatcgtaccagaaacggtacataatcatgattatatggwaacgaaaaaaataaaaatgggtcatttaatatag

SEQ ID NO: 2306 - DNA, 630 bp, Staphylococcus aureus
atgaggtgtattatgattcaaacggttgttgctgctgctgttctttatattgctacagcagttgatttattagtaatyttattaatattttttgctagagcaaagactagaaaagaatatagaratatttatgttggtcaatatttagggtctattattttaatattagttagtttgtttttagcttttgtattaaattatgttccagaaaagtggatattaggtttattgggtttaataccaatttatcttggaattaaagtggctatttatgatgattgtgaaggagaaaagagagctaaaaaagaattgaatgaaaaaggattgtctaaattagttggtacggttgcaattgttacgatakcaagttgtggcgccgataatattggtttatttgttccktattttgtgacattaagtgttactaatttattacttactctgtttgtctttttaattttaattttcttcttggtgtttactgcacaaaaattagcwaatatcccaggaattggagaaattgttgagaaatttagtcgttggattatggctatyatttatatagctttaggtttatttattattattgaaaatgacactattcaaacaattttaggatttatattttaa

SEQ ID NO: 2307 - DNA, 918 bp, Staphylococcus aureus
atggcgacaaaaaacgaggaaatattacgtaaaccggattggttgaaaataaaattaaataccaacgaaaactatacaggacttaagaagatgatgagggaaaaaaatcttaatactgtatgtgaagaagctaaatgtcctaatatacatgaatgttggggtgcacgtcgtacagcgacatttatgattttaggtgccgtatgtacaagagcttgtcgtttttgtgcggttaagacaggtttacctaatgaacttgatttaaatgagcctgaacgtgtagctgaatcagttgaattaatgaayttgaaacacgttgttatcactgctgttgcgcgtgatgatttaagagatgctggttcaaatgtttatgctgagacagtacgtaaagttagagaaagaaatccatttacaacgattgaaattttaccatcagatatgggcggggactatgatgcgttagaaacattaatggcktcaagacctgacattttaaaccataatattgaaactgttcgtcgmttaacaccgagagttcgtgcgcgtgcgacwtacgacagaacattagagtttttacgtcgttcaaaagaattacaaccrgatatcccaactaaatcaagtattatggttggattaggtgaaactatagaagaaatttatgaaacgatggatgatttacgtgcgaatgatgtagatattttaacgattggtcaatatttacaaccttcacgtaaacatttaaaggttcaaaaatattacacgcctttagagtttggtaaattaagaaaagtggcaatggataaagggtttaaacattgycaagctggacctttagtacgtagttcwtatcatgcggatgagcaagtaaatgaagctgctaaagaaaagcaacgccaaggtgaggcacagttaaatagttaa

SEQ ID NO: 2308 - DNA, 633 bp, Staphylococcus aureus
atgtttactggcatcgttgaagaaataggtgtcgttaaaagtgttcaaattcgtcaatcagtcaggacgattgaaatygaagcacataagattacggcagatatgcatattggtgattccatcagtgttaatggtgcatgtttaacagtgattgattttratcagacatcttttactgtwcaagtaattaaargcactgaaaataaaacctatttagcagatgttaagcgacaatcagaagtaaatttagagcgtgccatgagtggtaacggtaggtttggtggacattttgtcctcggtcatgtagatgaactaggaacagtttcaaaaataaatgaaacagccaatgcmaaaattattacgattcaatgtagccaacatattaataakcagttagtkaarcaagggtctatyactgtggatggtgtwagtctaacggtatttgayaarcatgataacagttttgacattcatcttattccagaaacgaggcgttcaacgattttatcatccaaaaaattaggagataaagtacatttagaaacagacgttttgtttaaatatgttgaaaatattttaaataargataaagaccaattatctgtagataaattaagagcatttggtttttag

SEQ ID NO: 2309 - DNA, 393 bp, Staphylococcus aureus
gtgaagaatttgataaaagtagatcaacattactttgaattaatagaaaattatcgcgaatgttttaatgaagaacaatttattgctaggtattcagatattttagayaaatatgattacatwgttggtgactatggttacgatcaattacgattaaaaggyttttacaaagattctaataaaaaagcagagatgagtaaacgtttttcaaatattcaagattacatatttgaatattgtaactttggttgtccttactttgtattaagacatttgtctaaacaagaggttaaaaagttaatcgaagaagttcatccgtctgatgtgatagatgacgacaataaacttcaagatgtgaagattaagccaaccattcaagatactgaacattaa

SEQ ID NO: 2310 - DNA, 1005 bp, Staphylococcus aureus
atggtacaaggtcaaacaggtgttaatccacccgttggcgctgttgtagttaawgaaggtaggattgttggtattggtgcacacttgagaaaaggtgacaagcatgcggaggttcaagcacttgatatggcacaacaaaatgctgaaggtgcgacgatttatattacgttagagccatgtagtcattttggttcaacrccaccctgtgttaacaaaatwattgattgtaagatarcwaaagtagtwtacgcaacaaaagacaattcgttagayacacatggtgatgagacgwtacgggmtcacggtattgaggttgaatgcgttgatgatgaacgkgcatcacaattataccaagacttttttaaagcaaaagcaaagcaactgccacaaattacagtgaaagtatctgcaagtttagatggtaaacaagcgaatgataatggacaaagtcaatggattactaacaaagaggttaaacaagatgtctataagttaagacatcgacacgaygcagtgttaactggaagacrtacagttgaattagatgatccacaatatactacacgtattcaagatggaaaaaaccctataaaagtaatattgtctaagtctgggaatattcattttaatcagcaaatttatcaagatgaatcaacaccaatttggatatatactgaaaatccaaatttaacaascaatcaaacacatattgaaattatttacttgaagtcttgygatttaacaacaattcttcacaatttatataaaagaggagttggaactttgctagtcgaggcaggtccaaccactacttcagaatttctccaatctaattatatagayraatttattctctattatgccccgaaattaattggcggatctggaaattatcaattttatcaaacaaatgatgtgattgagataccagatgcgaaccaatttgaaattgttcattccgagttattaaatcaaaatgtyaaattaactttacgaaagaagtga

SEQ ID NO: 2311 - DNA, 423 bp, Staphylococcus aureus
atggctaaacaaattatcgtcacggattcaacctctgatttatcacatgaatatttaaaacaacataacattcatgttataccattaagcctgacaatcgacgggaaatcttacactgatcaagytgatatctcttcaagtgagtatatcgatcatattgaaaatgatgcagacgtcaaaacaagtcaaccacctattggtcgatttattgaaacatatgagcaattagctcaagatgacgttgaaattataagtattcatctttcgtcaggcttaagtggtacttataatactgctgttcaagcgagccatatggtagatggtaatattacagtgattgattctaaatctatttcgtttgggttaggttatcaaattaagcaaattgttgaattggttctgttgcaaagtaaaaaaatatag

SEQ ID NO: 2312 - DNA, 486 bp, Staphylococcus aureus
atgacattatcaataattgtcgctcacgataaacaaagagtcattgggtaccaaaatcaattaccttggcacttaccaaatgatttaaagcatattaaacaactgaccactgggaatacacttgtaatggcacggaaaacttttaattctatagggaagccattgccaaatagacgtaacgtcgtactcactaaccaagcttcatttcaccatgaaggggtagatgttataaactctcttgatgaaattaaagagttatctggtcatgtttttatatttggaggacaaacgttatacgaagcaatgattgaccaggtagatgatatgtatatcacagtaatagatggaaagtttcaaggagacacattctttccaccatacacattcgaaaactgggaagtcgaatcttcagtagaaggtcaactagatgaaaaaaatactataccgcatacattcttacatttagtgcgtagaaaagggaaatag

SEQ ID NO: 2313 - DNA, 435 bp, Staphylococcus aureus
atgtattttgtagacaaagataaactaactcagaaattagcctatttacaagcattaactgatgattatcatgagagyaagcacaatcattatgcatttgaacgcattgctcaaatgttgatagaatcatcggtagatatagggaatatgattatcgatgcatttattttaagggatcctggtaattataaagatgtgattgatatattagaactagaaaatgttattactaaagaaacacagcaggmgattaataaaactgtcgrtattcgtaaacaatttacatatgattacacagccttagatattaagrttatcatgccaatgtttgatgacgcattaccttattacaaacaatttattacagaagtaacgayatttttacatcaagaaaatgtaccagtaacagcttttggtaaaggagaaaatcaataa

SEQ ID NO: 2314 - DNA, 1503 bp, Staphylococcus aureus
atgcgtgtagcaataatmggcatgggaactgctggtgtaagtgtattgagagagttagttaagcacccgaartttaatcaattagatatagatttatacgatgataaagtaaatatgggacagggcgtaccatttcaaaatgatagttctgagctgctaattaatatgccttcgaaaaagatgagtttaaatttagatgatgagactgaattttggaagtggtataaacaacaaactgattttaattttgatgaacctgcatatttaccgagatttgtattcggacattatatgaaatcttatttatctatgtwyacgaaaaaatatccaaatatatcaactaattataataaagttcaagagatttatacaaattctaatatcgatgaaacgaatttaacttattacatatgtactacaaattcagracaatcatggcaarcgtacgattatgtatttttaacatgtggtacatttgcctaccatgatccatataacttraagggyaaaaaaggatatatcgctacgccttatccaacatataatacgttagacgaagtaaatgaactggacgatattgcgattattggtacaggccttgcmagtttagatgttgtycgttatgttgctgctcatcatccraaattaccaattactatgacgagtcgttctgcwmatttaccaagtgtaagaggtacaatgatagacgtgacattcaagtacttaactaaagacaaattaaatgacatwaaaaaacatcatttcggcaatgcaccgcttgatackwtagtttctttatttttaaaagaatgtgctgawtatgacattgattttraaaaattagtayatagacgtacaggaaatcatattgcagatttgaagtatgatttagcgcgtccaacagaaatgggcattttccaaagtatsattgaayatttgaaagagaatttaaattggatatggaatagcttaagyattgaagaycaacatcaatttaatcaaaaatactcaaagatgattcaattaaattcaaatccaatgcctccaagaactgctgaactaattattgaattaatagaaaataagtctttaattttgaaaaaagatttagaagatgtgaaacatgatggcaagttgtattatttttcatacaaaaaccaagaatcagtagacatrtataatgttgtcattaacgcgacaggtgcaaaaagtcatttaaatgaattrgatcaagatgatcaattaattaraaatcttgaaaatagacaaattgtacaagcacayccaatgggaggcatacaaatcatwccggaaaccaatcaagttattagtccaaggtttggaacattaacaaatatgattgcgataggtcaaatgacaaacggtgttaataaactacgaaayggtgtgaaaatgatwgtagaacaagttgcgcatamagtatctcaattatatgatgctttagaatcgaatgagcaasaacagcgmagtkacaatcaataa

SEQ ID NO: 2315 - DNA, 189 bp, Staphylococcus aureus
atgaataataatgaagaaaattcagtcttttttggtaaaaagaaaaaagtatcactacatttgttagttgatcccgatatgaaagatgagattatcaaatacgcacaagaaaaagatttcgataacgtttcacaagctggtagagaaatcttaaaaaaaggattagaacaaattaaaagtaataaataa

SEQ ID NO: 2316 - DNA, 567 bp, Staphylococcus aureus
atgaacttgaaagataaaatactaggtgtcgcaaaggaattatttataaaaaatggatataatgccactactactggagaaattgttaaattatcagaaagtagtaaagggaatctttattatcactttaaaacaaaagaaaatctatttttagaaattttaaatatagaagaatctaaatggcaagaacagtggaaaaaggaacaaatcaaatgtaaaactaatagagaaaaattttatttatataatgaactatctttaacaaccgaatactattatccacttcaaaacgcaataattgaattttrcactgaatattataaaactaatagcattaatgaaaaaatgaataaattagaaaacaaatatatagatgcttatcatgtaatttttaaggagggtaatttaaatggcgaatggtgtattaatgatgttaatgctgttagtaaaatagcagcaaacgctgttaatggaattgttacctttacacatgaacaaaatattaatgaaagaattaaacttatgaacaagttctctcaaatttttttaaatggacttagtaaataa

SEQ ID NO: 2317 - DNA, 780 bp, Staphylococcus aureus
atgaaacagtataaagcgtatttaatcgatttagatggcacaatgtatatgggaacagatgagattgatggagcaaaacaattcatcgattatttaaatgtaaaaggyattcctcatttatacgtaactaataattcaacraaaacacctgagcaagtaactgaaaaattacgtgaaatgcacattgatgctaaaccagaagaggttgtaacgtcagcgttagccactgcwgattatatttcagaacaatcaccaggagcatcagtatatatgttaggtggkagtggtttaaatactgcgttaaccgaagcgggacttgtcattaaaaatgacgagcatgttgattatgtagttattggacttgacgaacaagttacatatgaaaagcttgcgattgcaacgttaggtgtaagaaatggkgcaacatttatttctacaaatccwgatgtrtcaattccwaaagagcgwggwttwttaccwggkaatggtgctattacaagtgttgtaagtgtatcgacaggtgtatcgccacaatttattggtaaaccagaaccgattattatggttaaagcattagaaattttaggaytagataaatccgaagttgctatggtaggcgatytgtacgataccgatattatgtctggtattaacgtaggtatggatacgattcatgtacaaacaggtgtatctacgttagaagatgtgcaaaataaaaatgtgccaccaacgtattcttttaaagatttaaatgaagcaatagctgaattagaaaaatag

SEQ ID NO: 2318 - DNA, 855 bp, Staphylococcus aureus
atgaataaacacaagaaaggttctatttttggaataataggacttgttgtcatatttgctgttgtctcatttttatttttctcaatgatatccgatcagatatttttcaaacatgttaaatccgacattaagattgaaaagttaaatgttacattaaacgatgcagcaaagaaacaaataaataattatacgagtcaacaggtatcaaataaaaagaatgatgcatggagagatgcatctgcaactgaaattaaaagtgcaatggatagcggtacttttatcgataatgaaaagcaaaaatatcaatttttagatttatcaaagtatcaagggattgataaaaatagaattaaaygtatgttagtmgatagaccaacgttattgaaacatacggatgatttcttaaaagctgctaaagataagcacgttaacgaagtttatttaatttcacatgcattattagaaactggcgcagttaaaagtgaattagctaatggwgtcgaaattgatggyaaaaartactacaatttctatggagtrggagcycttgataaagacccaattaaaacaggtgcagaatatgctaaaaagcatggttgggatacacctgaaaaagctatttcaggcggtgctgatttcattcataagcacttcttatcaagcacagatcaaaatacattgtatagtatgagatggaatccaaaaaatccaggagaacatcaatatgctacwgatattaagtgggcagaaagtaatgcaacaattatcgctgacttttataagaayatgaagactgaaggaaaatacttcaaatactttgtgtataaagatgacagtaaacatttgaataagtaa

SEQ ID NO: 2319 - DNA, 729 bp, Staphylococcus aureus
atgaaaaaawttaaatayagttttatattagtttttatattaytttttaacattaaagaycttwcgtatgckcaaggwgatattggtgtaggtaacttaagaaatttctatacaaaayatgattatatagatttaaaaggcgtcacagataaaaacytacctattgcaaatcaactygaattttcaacmggtaccaatgatttgatctcagaatctaataattgggacgaaataagtaaatttaaaggaaagaaamtggatatttttggcattgattataatggtccttgtaaawctaaatacatgtatggaggggccactttatcaggacaatacttaaattctgctagaaaaatccctatwaatctttggrttaatggcaarcataaaacaatttctactgacaaaatagcaactaataaaaaactagtmacagctcaagaaattgatgttaaattaagragatatcttcaagaagaatacaatatatatggtcataataacamtggtaaaggyaaagaatatggrtataaatctaaattttattcaggttttaataakgggaaagttttatttcatttaaatratgaaaaatcattttcatatgatttgttttatacaggagatggactgcctgtaagttttttgaaaatttatgaagataataaaataatagaatctgaaaaatttcatcttgatgtygaaatatcatatgtagatagtaactaa

SEQ ID NO: 2320 - DNA, 777 bp, Staphylococcus aureus
atgcaacaactatctctgaaacatagattaaacaatggtgattcagtttatggcatttttaattctataccggacccattgatgatmgaggttatcgcagcaagcgggtatgactttgttgtgattgatacagaacacgtggcgattaatgatgagacactagcgcatttaattcgtgcagctgaagcagcgcatattataccaattgtacgtgtcactgcagtgatagatagagatatcattaaagtgttrgatatgggtgcgagaggtattattgtgccacacgttaaagatcgtgagacagttgagcatattgtgaaattaagtcgttattacccgcaaggattaagaagtttgaatggtggtcgcatggcaagatttggacgtacaccattacttgatgcaatggagatggctaatgagcatattatggtgattgccatgatagaagatgttgaaggggttatggccattgacgatatagcwcaagtcgaaggtttagacatgatagtcgaaggtgccgcagatttatcscagtcacttggcataccatggcaaacgcgtgatgatcaagtaacatcacatgttcaacatatttttgargttgtgaatgcacatggtaaacatttttgtgcattaccacgtgaagatgaagatattgcaaaatggcaggcacaaggtgtacaaacatttattttaggtgatgatcgcggaaaaatatatcgccatttaagtgcatctctagcgacgtctaaacagaarggggatgawgrctaa

SEQ ID NO: 2321 - DNA, 960 bp, Staphylococcus aureus
ttggtaaaaatagttgtttcgaggaaaattccagataaattttatcaacaattragtaaacttggtgacgttgttatgtggcaaaaatcattagtgcctatgcctaaagatcaatttgtgacagcacttcgtgacgcagatgcttgttttatyacattaagtgaacagatcgatgcagaaattttagcrcaatcaccaaatttaaaagtaattgcgaatatggctgtaggatatgacaacatcgatgttgaaagtgcaacagcgaayaacgtggttgtcacgaatacaccaaatgtwcttactgaaacaactgcagaattaggatttacattaatgcttgctayagcacgycgtattgtagaagctgaaaaatatgtagaagcagatgcatggcaaagctggggtccttatttattgtcaggtaaagatgtcttcaattcaactrttggaatatatggtatgggagatattggtaaagcttttgcaagaaggttgcaagggtttaatactaawattctttatcataatcratcaagacataaagatgcagaggcggactttaatgcaacatatgtttcttttgaaacgttgttagcagaaagtgattttatcatctgtacagcgccacttacaaaagaaacacatcataaatttaatgctgaagcatttgaacaaatgaaaaatgatgcaatttttattaatatcggtagaggrcaaattgtagatgaaacagcattaatcgatgcactagacaataaagaaatwttagcatgtggtttagatgtattagcaaatgaaccrattgatcatacacatccattaatgggacgtgataatgttctgattacaccrcacattggtagcgcatcagtaacaacacgggacaatatgattcaattatgtattaataatatagaagcggttatgacaaatcaggtaccacatamtccagtaaattga

SEQ ID NO: 2322 - DNA, 513 bp, Staphylococcus aureus
atgaaacagcaaatgttatcaaaagtattattaagtacagtcgtagttatgggatcaatagcaggatcttctcttgtaatggatgacaacgctcatgctgaacaaaaaagtgataatatcgggaaactgaatcaaaaaaatgaaagtaccttgcatctttcatttgaaaagggtattaaagggactgttgacaaaaatggtaagttaacattatctgatggaaaaacgtcaaaagtgatgccaactaatgctaaagataaaaaaggtaacgatgttgttttggtttataaaaaggttaragatggatttgatgttcaagtaattaaatctagtcaagagagaaaaactaactgggttaaatgtggtctaggaacagttggaggcgctggcactggtgggctaggyggtgctagtgcagcttcagttataccaggtttaggaactgttgcaggtgctattattggtggggtttctggtggtgccacaggtgccgcagcgtcatgtttcggttga

SEQ ID NO: 2323 - DNA, 108 bp, Staphylococcus aureus
gtgatgacaaccaattactatgttgaatctataaaattaaaattgaatttcattatgaatatcgatataatgaattgtaaaaaacaaattttaaaacgtattttatat

SEQ ID NO: 2324 - DNA, 1711 bp, Staphylococcus aureus
atggaaacaggtaaaagtgatgtacttgataaaattgaaaaaattaataaaaaagatagtgccttacaagaaattataccmaaaggytatgaaattgaacatcatcaatgcggtrttgccttawatcaacttataccaagtaaaaaagaaggcgarccagataaaaaggtttttatcacaartacaatccctcaaatyactgaacgctttgaagatattgagagtaacgaagtcagctttaatatgcttttctatgacaataaaacgccagtaaatatagctgtgagtgccgaagaaatttcagatagtcgtcaactcttgaaattggttaataaaaagctrgatgtaacatcgtcracatctactaaacttgttgaytatattaatryatctaaacggtataatccaccattraatgttaaagttgcaacgcgtttggggcatgtgaaaggttattttatttatccttatcaagaagtwatgaaagacagcaatgtcaagttgtttagcaatgataaagggtttcaaaagttaatagactcttttcgaagtaaaggaacactacaaggttactctaaaaaggtgtttgctcaaataaaagatttaccaatggtaatggttatgttgtatgcatctttaggctcagttttattaagagaatttggattacaaccctttattgtagaaatatcaggtagtacatccacaggtaaaacattcacactcaacttagtatcaagtgtwtggggaaccagtgaccttattacgacatggagttctactcaaaatagtattgaatcaatggcgtcatttttgaactcatttccaatgtttaaagatgatacgcgtaacacacatcctaagtttgttrccagtgccacatayaacttttctagtggtgaaagtaaatcgagaagtaatattaatttaacgctaaatgctaaaaaagaatggcgaaatattttaatttctactggtgaatcatctatcgcaaatatggctgatgaaaaagcgggtgtatcagcacgtgtagttacactacaagatccaccatatccagataattttgattttaccacattagacaaatcgtttagggagaactatggaacrttagggttggcatttattaaacaatatgagtctaaaaaagacgtgtataagaacgcttttgagagctatcaacggtattttaatcaaaaaggtagtaatgaaatcatgcaacgtttaggacgtgcctttgcgttactacaagttaccggtgaggttttgaatgatattgatgggtttgaacatgaccattttaaaattatcgaacaagcctatgacagcatggttaaaaacaataagacgattgataaacctaagcaactgttagaggaactattacaatatttagatgcgaatagaaataatatygywggtgayggytatrrttcagtmaawwayggwgayrtyaaagckrtatataaacrtgattwtytwtgtatwwwarrygaaacwgtyaaarakaarttarsrcacgaawtgcaracsatyacaggrcaatgggacaaaaaaggttatttaatwaaagrtaaaaaaagrwtwcaaaaacargtmaaacatmaawckswaargyatmkgggwtwtgckatwaarmaagaartamtwraagaaytrggatttgatttytcsawttcryayaatccwwatwcwgaaagttattgag

SEQ ID NO: 2325 - DNA, 204 bp, Staphylococcus aureus
ttgaacggtctttataaaggcgtttttactaagaactttaagaggtgcaatatgaaatctaaaagtaaacagccacctaataaatatgttgaagcattcaaaccatatttattaacactattgtatttggcaatatttattactttatatttaatttatggcagtggcgacacacacaataacttcatttataatgagttctaa

SEQ ID NO: 2326 - DNA, 714 bp, Staphylococcus aureus
atggctaaactaaatgtagaagtatttgcggayggtgcagatattgaagaaatgaaagcagcttataaaaacaaacaagtggatggytttacaacaaatcctagtttaatggckaaagcgggcgtaacagattacaaagcttttgctgaagaagctgtgaaagaaattccagatgcttcaatttcatttgaagtatttgcagacgatttagaaactatggaaaaagaagcagcaattytaaaacaatatggcgaaaatgtatttgttaaaattcctattgtaaatacaaaaggtgaatcaacgattcctttaattaaaaarctttcagctgacaatgtgagattaaacgttacggctgtttayacaattgaacaagttaaagaaataactgaagcagtaactgaaggtgtgccaacatatgtttcagtatttgcaggacgtattgcagatacaggcgtagatccattaccattaatgaaagaggctgtaaaagttacgcatagtaaagacggcgttaaattattatgggcaagttgccgcgaattattcaatgtgattcaagctgatgaaattggtgcagatattattacaygcccwgcagatgttgtgaaaaaagtgaatacaaacttaggtcgcgatattaacgaattatcagtagatacagttaaaggctttgcgaaagatattcaatcttcaggtctttctattytataa

SEQ ID NO: 2327 - DNA, 384 bp, Staphylococcus aureus
atggaaatcaaacaaaaatatcaattatcaaaagtggttaaaatattagaagtagtattatacgaggaagataagtttcaatcmgataaggactatcattatcaggataaagcattttatgaatatgctttaaagttagttcataatggattgttcaatattcttgctgaattagattttgaagatgaagyatttttrattcttgatgaagtaacratgacgctaagtgatgtcatgaaagaaacacaacacgtttaycgttatagtgtcatagaygaaaaaggtgaacataaacatacaacagatcgcaaaggacacgtgattggaatgttagagtgggcattagattacattgtgggaaatattgaagtggaggwattataa

SEQ ID NO: 2328 - DNA, 1458 bp, Staphylococcus aureus
atgacagatattattaacaagctgcaagcgtttgcggatgcaaatccacaaagcattgctgttagacacacaactgatgaattaacttatcaacagttaatggatgagtctagtaaattagcacatcgattacaaggtagtaagaaaccgatgattttattcggtcacatgtcaccatatatgattgtkgggatgattggtgccattaaagcaggatgtggatatgtacctgtagacacttcaattcctgaagaccgtattaaaatgattattaacaaggttcaaccagagtttgtatttaatacgactgatgaatcrtttgaaagtttagmaggygaagtatttacaatwgaagatattaaaacatctcaagacccagtaatttttgatagtcagattaaagataacgacacagtatacacaatctttacatctggttctactggggaacctaaaggtgttcaaattgaatatgcaagtttagttcaatttactgagtggatgttagaacttaataaatcaggaaatraacaacaatggcttaaccaagcgccattttcatttgatttatctgtaatggctatttatccatgtttagcrtcaggcggtacattaaatcttgtagataaaaacatgattaataaacctaaaytattaaatgaaatgctaacagcaacaccgattaacatttgggtatcaacaccatcatttatggaaatgtgtttattattaccaacgcttaatgaagaacartatggtagtcttaacgaattcttcttctgtggtgaaattctacctcacagagcagcaaaagcgttagtrarccgtttcccaagtgcgacgatttacaacacatatggtccaactgaagctacggtagcagttacaagtattcaaattacacaagaaatcttagatcaatatccgacattacctgttggcgttgaaagacyaggcgcaagattatctackacagatgamggtgaacttgttatygaaggtcaaagtgtaagtttaggatacttaaaaaatgaccaaaaaacwgctgaagtatttaatttcgatgacggtattcgtacwtatcacactggtgataaagcgaagtttgaaaatggtcaatggttcattcaaggtcgtattgatttccaaatcaaattgaatggctacagaatggaattagaagaaattgaaacacaattacgccagtctgagttcgtaaaagaagcgattgttgtacctgtatataaaaatgataaagttattcatttaattggtgcaattgtgccaacgactgaagttacggacaatgcagaaatgactaaaaatattaaaaatgacttgaaatcacgcttaccagagtatatgattcctagaaagtttgaatggatggaacaattgccattgacttcaaatggtaaaattgacagaaagaaaattgcagaggtaattaacggatga

SEQ ID NO: 2329 - DNA, 834 bp, Staphylococcus aureus
atggaggttaaaacattttataatggaaacacgatgccacaaattggtttagggacatttcgtgtggaaaatgatgaaaattgcatggaaagtgttaagtatgccattgaacaaggatatcgtagtattgataccgcaaaagtttatgggaatgaagaacaagtaggtgctggcattcgtgccggattggartcaactggtattgctagagaagacttatttattacttcaaaattatattttgaggatttyggtcgtgaaaatgtagcagctgcytacgaagctagtttatctagattaggtttaaaatacttagatttgtatctagtacattggccaggyacgaacgaagccgtaatggttgatacatggaaaggtatggaagatttatataaaaataataawgytaaaaatataggtgtcagcaattttgaacctgaacatttggaagctttgttggcacaagtgtcaattaaacctgtaattaatcargttgaatatcatccatatttaacscaacataaattgaaattatatttggcagcacaacrtatcgtgatggaatcttggtcaccattgatgaatgcacaawttttaaatgatgagacaattaaagacattgctcaagaattaggaaagtcacctgcccaagttgttttaagatggaatgtgcagcatgswgtggttayaatccctaaatcggtracaccaaacagaatctctgaaaayttccraatatttgatttcgaattatcagatgaacaaatgacgcgaattgatggtttaaatcaagataagagaattggacctgatccaaaaamwtttgaaggmtag

SEQ ID NO: 2330 - DNA, 142 bp, Staphylococcus aureus
atgaatacattattawamatcattttttgattttataactggtgttttaaaaaacattggtaacgttgcttcttatagtacatgttatttcataatggacgaagttgaaatacctaaagaattaactcaattacacgaataa

SEQ ID NO: 2331 - DNA, 1215 bp, Staphylococcus aureus
atgattccatatggtgattttacattcttcttaattgctttaattgcattattaccagtcattatacttggatttttaggtaagcgaagttacatttataatggcgtagttacagcatttatgattgtgttaatcttttcttctgataaacataatctgtttgaccaaaagtatttaagtgttcaattaattagttttattatttacgtcgtatggcaagttttattgataatgttttattatcattcaaaaccaaaaaataattcattttcaaaatttgtaactgtaatggttttatcaatattgccattagcacttgtgaaagtgttacaaagtacatggttaggtggacatcagattcacttccatgaaagtaaattaattgaatttgttggtttcttaggaatttcttatgttacattcaaaagtgtgcagttaattatggaaattcgtgatggttctatcaaagaaattaaagtatggaaattaattcaatttatttcattcttcccaacgatttcatctggaccaatcgatcgttacaaacgtttcgttaaagacgataaaaaagtaccaacaggcaatgaatatcgtgaattagtattaaaagcaattcacatgattatgcttggtttcttgtataaatatattgttgcttactttattaacacatatgcaatcatgccgttacaattagacttacatggctttgtcaatttgtggttatatatgtacgcatacagcytatatttattctttgactttgcaggttatagtttatttgcgatagcatttagttatttattcggtattaaaacaccaccaaacttcgataaacctttcaaagcgaaaaatattaaagatttctggaatagatggcatatgacattatcattctggttcagagattgtatttacatgagatctttattctacatgtctcgtaaaaaattattgaagagtcaatttgcaatgtctaacgtggcattcttaatcaacttcttcataatgggaatttggcatggtatcgaagtgtattacattgtttatggtttataccatgcagcattgtttataggttatggctattatgaacgttggcgyaagaaacatccgccacgttggcaaaatggtttcacaacagcacttagcattgtgattacattccactttgtaacatttggctttttaatcttctcaggtaaacttatataa

SEQ ID NO: 2332 - DNA, 912 bp, Staphylococcus aureus
gtgatggatttatcttcaccgrtagtcattggactcattattgcagtagtcattgcattaatcttttttgtccttttyttagttrccttaggtagtaagaaaaaagttaagcgacaaacagaagaaaagtatgaacaacaagaacaaaacattaaaaagtctcatgaagaagctttagagaaagagcgtattcaaaataaaaagacaattacaaaacaacaagaagattataatcacatggttagtacaaaagatcgtgagattgacgcattaaaattgttctcgaaaaatcatagtgaatatgtaacggacatgagattaattggtattcgtgaaagattagttaaagaaaaacgaattcgaccagaagatatgcacattatggcaaatatctttttaccaaaggatggctttaataatattgaacgaattagtcatttagtattaacaagaactggtctttatattattgattctcaattgttaaaaggtcatgtttataatggtatwagtggcggtcaatttaaagatttaccaccwatggaacaagtatttgatacattggatttagataaatctagaccrcaaactattgtkatggatcaaaatgatgacaaacgttcattatcwtttgtaaattattcagatcaaattgaggcrattaaacaattggctgaagacttacaaaaasawttaggtgcyaaatatacrccracttcaattttatactttaatcytaaaaatgaaggcgatgtaacratttcaaattataatcaaaatagtgctgtcaaagtgcttgtcggtgctgaacaattagacgagttctttaacaaatttgtattccatggtcgtattcaatacaacgtggaagacttacaacaaatgatggataaaattgaatcattcaattaa

SEQ ID NO: 2333 - DNA, 237 bp, Staphylococcus aureus
atggaatttagagaacaagtattaaatttattagcagaagtagcagaaaatgatattgtaaaagaaaatccagacgtagaaatttttgaagaaggtattattgattctttccaaacagttggattattattagagattcaaaataaacttgatatcgaagtatctattatggactttgatagagatgagtgggcaacaccaaataaaatcgttgaagcattagaagagttacgatga

SEQ ID NO: 2334 - DNA, 1197 bp, Staphylococcus aureus
atgttaaataacaaacgattatttacttcagagtctgttacagaaggacacccagataaaatcgctgaccaagtgtcagatgcaatattagatgctattttaaaagacgayccaaatgcacgtgtagcttgtgaaacaactgttacaacaggtatggcattgatcgccggcgaaatttctacaacaacatatgttgatattccgaaagttgttagagaaacaatyaaagaaattggatacacaagagcaaaatatggttatgattatgaaacaatggcaattttaactgcgattgatgaacaatcacctgacattgcacaaggcgtggataaagcattagagtatcgtgataaagatagcgaagaagaaattgaagcaacaggtgcaggtgaccaaggtttaatgtttggttacgcaacgaatgaaacagaracgtayatgcctctagcaatttatttatcacatcaattggcaaaacgtttatcwgatgtgcgtaaagatggtacgttaaattatttacgaccagacggtaaagttcaggtcactgttgaatatgatgaaaatgataacccwgtacgtattgatacgattgtcgtatcaacacaacatgctgakgatgtgacacttgaacaaattcaagaagacatyaaagcrcatgtcatttatccaactgttccagaaaacttgattaatgaacaaactaaattctacatcaatcctacaggacgctttgtaatcggtggacctcaaggtgatgcaggattaacaggacgtaaaatcattgttgatacgtayggtggcwwtgcacgtcatggtggcggatgcttyagyggtaargatcctacaaaagtagaccgytcagctgcataygctgcacgttatgtggctaaaaatattgtwgcagcaggtttagcagatcaatgtgaagtacaattggcatatgcgattggtgttgcagaaccagtgtcaattgcaattgatacatttggaacaggtaaagtttctgaaggrcaacttgtcgaagcagttagaaaacactttgacctaagacctgcaggyattattaaaatgcttgatttgaaacaaccgatttacaaacaaactgctgcttatggtcattttggacgtacagatgtmttattcccatgggaaaaattagacaaagtggaagaattaaaagacgcagtaaaatawtaa

SEQ ID NO: 2335 - DNA, 1176 bp, Staphylococcus aureus
atgaaattaaaaccttttttacccattttaattagtggagcggtattcattgtctttctattattacctgctagttggtttacaggattagtaaatgaaaagactgtagaagataatagaacttcattgacagatcaagtactaaaaggcacactcattcaagataagttatacgaatcaaacaagtattatcctatatacggctctagtgaattaggtaaagatgacccatttaatcctgcaattgcattaaataagcataacgccaacaaaaaagcattcttattaggtgctggtggttctacagacttaattaacgcarttgaacttgcatcacagtatgataaattaaaaggtaagaaattaacatttattatttcaccacaatggtttacaaaycatggtttaacgaatcaaaactttgatgctcgtatgtctcaaactcaaattaatcaaatgttccagcagaaaaacatgtctactgaattaaaacgtcgttatgcacaacgtttattacagtttccacatgtacacaataaagaatacttgaaatcttatgctaaaaaccctaaagaaactaaagatagttatatttctggttttaaagagaatcaattgattaaaatagaagcgattaaatcattgtttgcaatggataaatctccattagaacatgttaaacctgctacaaaaccagacgcttcttgggatgagatgaaacaaaaagcagttgrrattggtaaagctgrtactacatcgaatwaatttggtattagagatcaatactggawattaattcaagaaagtaagcgtaaagttagacgtgactaygaattcaatgttaattctccagaattccaagatttagaattacttgtaaaaacaatgcgtgctgctggtgcagatgttcaatatgtaagtattccatcaaacggtgtatggtatgaccacattggtatcgataaagaacgtcgtcaagcagtttataaaaaaatccattctactgttgtagataatggtggtaaaatttacgatatgactgataaagattatgaaaaatatgtwatcagtgatgccgtacacatcggttggaaaggttgggtttatatggatgagcaaattgcgaaacatatgaaaggtgaaccacaacctgaagtagataaacctaaaaattaa

SEQ ID NO: 2336 - DNA, 324 bp, Staphylococcus aureus
atggagcacgtgagtgtgrtagtwtatggggcagatgttatatgtgcaagttgcgttaatgcgccaacatcgaaagatatttatgactggctacagccgctattaaaaagaaaatacccaaatatatcatttaaatatacgtatatagatattacaaaagataatgacaacttaacagatcatgatttacaatttattgaaagaatagaacaagatgaactattttatccattaattacaatgaacgatgaatatgtagcagatggttatatacaaacaaagcaaatcactcgatttatagaccaaaagcttgtgaatgaataa

SEQ ID NO: 2337 - DNA, 771 bp, Staphylococcus aureus
ttggrttttatcaaacgtaaacgaatgccaattgaatmttttacgcatcaattcgaagaaattacatatttgtcagatgayttacaagtaaaagctttaatgatgacaccacatcatgaagtaaawcgcattgtagtwtatttgcgaggtggcaaaggycaagtaggacgtgtgcgcgcaggtagattaatgcaattttcagatagtcaaactttagtgattgggccatactaccgaggtaacaatgggagtgaaggyaaagaygaattttaycgtggcgatttaaatgatgtgacksaattattraggttgctacatgataaatatccrcawgcwtttatycayatggttggtttttcrmgaggtggwytacaaggrttgttgacrtttcaagacttaccwgtaamwagttataymatctggggtggwgtctcagatattgatttratgtatgaagarcgygtygatttaagaggsatgytacgwagaatgattggtcatccgaaaaaagatcgagcrgcatatgaggcacgccaagcgattccaaacattaatgaaaacagtccrscaatattaattgtacatggagggaaagaccagcaagttggtattcatcatgcgtattatttagcggaycaactagagttaaaaggtgccaygcatgaaacattttatcaaatggcagaaggacatgtgccaagaccaccagcgatggttgaaacattgacttatattaaagartttatgaamcaagttgagtygcatagstag

SEQ ID NO: 2338 - DNA, 783 bp, Staphylococcus aureus
attaaaaatagtaaagtaatgttaaatgtattattattaattwtaaatttaattgcaatatgtagtgtaaacaatgcatatgcaaatgaagaaratcctaaaatwgagrrtttgtgtaagaagtcaagtgtagacsmtattgctytacataatattratrawgaytatatramtaatcgmtttacrayarwwrartcaaytgtatyaactacagaaaaattyttagaywtygatttattatttaaaartwttamttggttagatggaawatctgctgaatttaaagatttaaaagtggaatttagctcatcrgmratttcyaaagartwtytwggaaaractgtwgatatttatggtgtytaytataaagcrcattgtcatggtgagcatcaagtgrawactgcctgtacwtatggyggggtaacacctcatgaaaataataaattaagygarcctaaarawataggagtagctgtgtataaggataatgtaaatgttaatacatttatcgttactacagataaaaagaaagttactgcacaagaacttgatattaaagtaagaacaaaattaaataatgyatataaattrtatgaymgaatgactagtgatgtacaaaaaggttatattaaattycattctcattcggagcataaagaatcattttattatgatttattttatattaaaggaaatttaccagatcaatatttgcaaatttataatgataataaaacaatagattcatcagactatcatattgatgtttatttatttacataa

SEQ ID NO: 2339 - DNA, 402 bp, Staphylococcus aureus
atgaagttatttgcctttatcttcatatgtgttaagtcttgcagcttactatttatgttaaatggcaatcctaaaccagaacaattgaataaagcgagtgaattcactggtctaatggataatatgaggtatttgtatgatgataaacacgtatcagaaacaaacattaaatcccaagaaaagtttttacaacatgatttattatttaaaataaatggttctaaaattttaaaaacagaatttaataataaaagcctttcggataaatataaaaataaaaacgtagatttgtttgggacaaactattataatcaatgctatttttcattggataatatggaattaaatgatggtagattaattgaaaaaaacgtgtatgtatggcggtgtgryykaksatga

SEQ ID NO: 2340 - DNA, 410 bp, Staphylococcus aureus
ttgaaaaaacgtgtatgtatggcggtgtgaccgagcatgatggaaatcaaatagataaaaataattcaactgataactctcataatrtmtkmrktrwrgtttwtgaaaacgagagaaattcattatcttttgatatacctactaataagaaaaacataacagcacaagaaatagattataaagttagaaactatttacttaagcataaaaatttatatgaatttaayagttcgccttatgagactggctatataaagtttatcgaaggaartggtcattctttttggtatgatwtgatgcctgaatctggtraaaaattttatccgactaaatatttactaatttataatgataataaracagttgagagtaaatctattaatgtagaagttcatttaaccaaaaaataa

SEQ ID NO: 2341 - DNA, 777 bp, Staphylococcus aureus
ataaaaaatattaaaaagcttatgagattgttctrcatagctgcrattataataactttattatgtcttatwaataataattatgttaatgctgawgtagacaaaaawgatttaaagaaaaaatctgatmtagatagtagtaagttatttaatttaacaagytattatactgatataacgtggcaattagacgagtcaaataaaattagtacagatcaactactgaataatactataatattaaaaratattgatatatccgtacttaaaacttctagtttgaaagttgagtttaactcatcagatttagcaaatcaatttaaaggraaaaatatagatatttatggactgtattwtggaaataaatgtgtaggcttaactgaagaaaaaacatcatgcttatacggaggagttacgatayatgatggaaatcaattagatgaagagaragttataggcgttaatgtatttaaagatggtrtccaacaagaaggttttgttataaaaacyaaaaaggctaaagtaacagtacaagaattagayactaaagttcgatttaaattagaaaatttatataaaatatacaataaagataccggtaacatacaaaaaggatgcattttctttcattctmataatcatcaaratcaatcattttattatgatttatataacrtaaaaggttcagtrggagcagagttttttcaattttatagtgataatagaacagttagctcatctaattatcatatygatgtatttttatataaagattaa

SEQ ID NO: 2342 - DNA, 237 bp, Staphylococcus aureus
atgaatccgatcgtagaattttgtctctctaacatggcaaaaggtggagattatgtttttaatcaactggaaaatgacccagatgtcgatgtgttagagtatggttgcctgacacattgtggtatatgttcagccgggttgtatgctttagtaaatggtgatattgttgaaggtgattcgccggaagaattattacaaaatatatatgcacatataaaagaaacwtggattttttaa

SEQ ID NO: 2343 - DNA, 534 bp, Staphylococcus aureus
atgcctccaacgatagtaattaactattatattaacatacaatgtagggatgtgatgcgcgtgaagtttagggataaagataatcgtcaagttaatttgacatttaaaaaggataatgagatagcagatggcaatcatgtgctagctattccaacgtttaaaaatcaattgctttttaccaaacataatttacggggkattgaatttcctggtggtaaaagggaacgcggggaaagtagtgctgaagcarttacmcgtgaattatatgaagaaacaggcgccaaagttaaaaatattyattacatagcrcaatataccattgaaacacatgatcaaactgattttgtaaaagatgtatattttatcgaagttgaatcattggtaagcaagaacgattatttagaaacagcagggccagtgttgtttaactgtatcaatgatattgaactcgcacaacggagtttcttactgcaagatagtaccattttaaaatgcgtagagagggtgcaatcacttggrttttatcaaacgtaa

SEQ ID NO: 2344 - DNA, 360 bp, Staphylococcus aureus
atgccaacagttatattaacagaagcagctgcytacgaagtaaaagatatgcttaaagcaaatgaaatgccagatggctatttaaaaattaaagtgaatggtggcgggtgcactggkttaacatacggwatgggtgcagaagaagcgcctggkgaaaatgatgaagtcttagaatactttggattaaaagtwttagtagacaaaraagatgcacccgtattaaatggtacgactattgattttaagcaatcattaatgggtggcggtttccaaatcgacaatcctaatgcaattgcwtcatgtggctgtggtagttcatttagaactgcaaaagttgcaggtaatcctgaaaaytgctaa

SEQ ID NO: 2345 - DNA, 1002 bp, Staphylococcus aureus
atgaagttgacagctttgcatttttataaatatagtgagccatttaagtcacaaattgtaacaccgaaagtcactttaacrcatcgtgattgtttgtttatcgaattgawtgatgayaaaggaaatgcatatttcggggaatgtaacgcttttcaaacagattggtatgatcatgaaacaattgcbtcagtgaaacatgtaattgagcaatggttcgaagataatagraataaatcatttgaaacgtatgaagcwgcactaaaaytagtagattcattggaaaatacgcctgctgcaagggcaactattgtcatggcattgtatcaaatgtttcatgtactgcyttcattttcagtagcatatggagcgacagygagcggcttatcaaataaacaactagagtcattraaagcaacwaagccgrccagaattaaattaaaatggacrcctcaaatcatgcatcaaattagagtgttacgggaattagasttycactttcaattggttatagatgcaaatgartcmttgratcgtcaagatttyacacagttacagytattagcgcgtgaacaggttctttatatcgaagagccatttamagatatctcmatgcttgatgamgtagyggatggaacaatacctccaatwgcycttgatgaaaaggcracrtcrytgtyggmcataattaatttgataraattatacaatgtgaaagttgttgtattaaaaccatttcgtctaggtggcattgataaagtgcaaacggcaattgatactttgaaaagtcatggtgyaaaagtggttrttggcggcatgtaygaatatggtttaagccgytattttacagcgatgcttgctcgtaaaggtgattatccaggagatgttacaccagcaggttattattttgawcaagatgtggtkrckmawtcaggcatattaaaagaggggcgactcgaatttcgcccccctttagtggatataactcaattacaaccatattaa

SEQ ID NO: 2346 - DNA, 1287 bp, Staphylococcus aureus
atgttagacattagattattcagaaatgagcctgwcacagttaagagcaaaattgaattacgyggagatgatycaaaagttgtagatgaaattttagaattggatgagcaacgacgtaaattaattagtgcaacagaagaaatgaaagcacgtcgtaataaagtaagcgaagaaatcgcattaaaaaaacgtaataaagaaaatgctgatgatgtgattgctgaaatgcgcacattaggtgacgatattaaagaaaaagatagtcaattaaatgaaattgatartaaaatgacaggtatcctttgtcgtattccaaatttaataagtgatgatgtacctcaaggtgaatctgatgaagataacgttgaagttaaaaagtggggtacaccacgtgagttttcatttgaaccmaaagcacattgggatattgtagaagaattgaaaatggctgattttgatcgtgcagcaaaagtttcaggtgcgcgttttgtatatttaacaaatgaaggtgcgcaattagagcgtgctttaatgaactatatgattacaaaacatacaacacaacatggttatacagaaatgatggtaccacagcttgtraacgcagatacaatgtatggtacaggtcaattacctaaatttgaagaagatttatttaaagtagaaaaagaaggattatatacaattccaactgctgaagtaccattaacgaatttctaycgtaatgaaattattcaaccaggtgtacttcctgaaaaattcactggtcaatctgcatgtttccgtagtgaagcaggatcagcaggtagagatacaagaggattaattcgtttacatcaattcgataaagtggaaatggtacgttttgaacaacctgaagattcatggaatgctttagaagaaatgacaacaaaygcagaagcaattytagaagagttaggtttaccataycgtcgtgttattttatgtacaggtgatattggatttagtgcaagcaaaacatatgatwtagaagtttggttaccaagctacaatgattataaagaaattagttcatgctcaaactgtacggatttccaagcgcgtcgtgctaacatccgcttcaagcgtgacaaagcagctaaaccagaattagcacatacattaaatggtagtggtttagcagttggacgtacatttgctgctattgttgaaaattaccaaaatgaagatggaacagtaacaattccagaagcattagtaccatttatgggtggtaaaacacaaatttcaaaaccagttaaataa

SEQ ID NO: 2347 - DNA, 90 bp, Staphylococcus aureus
atgaataattggatcaaagtggcacaaatatctgttacagtcattaacgaagtgattgacatcatgaaagaaaagcaaaatggaggaaaa

SEQ ID NO: 2348 - DNA, 1203 bp, Staphylococcus aureus
atgcgtatagttcaacctgttattgaacarttaaaagcacaatctcatccagtttgtcattatatctatgatttagtcggactggaacatcatttgcaacatattacatygtcattgcckagtaattgtcaratgtactatgcaatgaaagcaaatagtgaacgaamaatcctagatacaattagtcagtatgttgaaggattcgaagttgcatctcaaggtgaaatagcaaaaggtcttgyttttaaaccagcaaatcatattatttttggwggccctggtaagacagacgaggaactaagatatgcagtaagtgaaggtgttcagcgtattcatgttgaaagtatgcatgaattacaacggctaaatgccatcttagaagatgaagataagacacaacacattttattgcgtgttaatttagcaggaccatttcccaatgcaacgttgcatatggcaggacgcccaacacaatttggtatttctgaagacgaagttgatgatgtcattgaagctgcgctmgyaatgccaaakattcatctagatggmtttcattttcattctatttctaacaatttagactcgaatttacaygtcgatgtagtgaaactttattttaaaaaagcaaarkcatggtctgaaaaacatcratttccwctcaaacatatcaatcttggtggtggyataggsgttaactatgcagatttaactarccaatttgartgggataattttgtagaamrttttaaaacacttatcgttgagcaagaaatggaagatgtgacattgaactttgaatgtgggcgctttattgtggcacatattggttactatgtgacagaagtgctagayattaagaaagtrcatggtgcttggtatgccatwttaagaggaggtacgcaacaatttagactgccggtatcttggcarcataaccatccttttgamatttatcgytataaggacaatccatattcatttgaaaaagtttcaatttcgagacaggacacaacgttagtcggtcaattatgtacaccgaaagatgtctttgctagagaartacagatagasgcaatcagtacaggcgacgttattgttttcaaatatgcaggtgcatacggatggtctatttcacatcacgatttcttaagccatccacatcctgaatttatttatttaacrcaaacaaaggaggatgaataa

SEQ ID NO: 2349 - DNA, 1107 bp, Staphylococcus aureus
gtgccwttrcttaaagaraaaggracagaaattacgtcaatcttttatccaaaaatgtttaargcrcatcctgaacttttaaayatgtttaatcaaacgaaccaaaaamgaggcatgcaatcttcagcattagcacaagctgtaatggccgcwgcggttaatatcgataayttaagtgttattaaaccagtyattatgccagtygcatataaacactgygcaytacaagtttatgctgaacattatccaattgtggggraaaatttattaaaagcmatycaagacgtgacaggwttagaagaamatgaccctgtsattcaagcttgggcraaagcatatggygttattgcggatgtgttcatccaaattgaaaaagaaatttatgatcaaatgatgtggatwggttttaaaccattcaaaattaccaatattaaacaagaatctgaagacattaaatcatttacagttgaaactgawgmatatgactttagtsaatwtryaccaggccaatacatcacagttgatgtttctagtgawaaacttccatatagagctaaacgtcactattctatcgtatcaggtgawaaaaaycatttaacytttggcgttaaacgtgatgtcacaacagaacatgaaggcgaagtttcaacaattttacacgatgagattaaagaaggcgatatgattaatttagctgcrcctgtaggtggattcgtattagagaatacgactgaaccacaacttttcttaggttcaggtattggygtyacacctttagtagcwatgtatgaagctgcctctgccaaaggtttagatacwcagatggttcaagttgctgaaaatgaacaacatttacctttcaaagacaacttcaacagtatygcaarycatyatgacaacgctaaattatatacmcacttaaaagryraacaaggytatatyggyrctgaagaattamaagyatttttagcaaataaacctgaaatttatatctgtggtggtacaaaattcttacaatctatgatcgaagcacttaaatctttaaattacgatatggatcgcgtacactacgaaacatttattccaagactaagcgttgyagtataa

SEQ ID NO: 2350 - DNA, 1209 bp, Staphylococcus aureus
atggctcaagatcgtaaaaaagtacttgtacttggtgctggttatgcaggtttacaaactgtaactaaattgcaaaaagcgatatcaacagaagaagcagaaattacgcttattaataaaaatgaatatcactatgaagcaacatggttacatgaagcatcagcaggtacactaaactatgaagatgtattatatcctgtggaaagtgtcttgaagaaagacaaagtgaactttgttcaagcagaagtaacaaaaattgaccgtgatgctaaaaaggtagaaacaaatcaaggtatttatgactttgatattttagtagtagcattaggtttcgttagtgaaacattcggcatcgaaggtatgaaagatcatgctttccaaattgaaaatgttatcacagcacgtgaattatcacgtcatatcgaagacaaatttgctaactatgcagcatcaaaagaaaaagatgataacgatttatctatcttagttggtggtgctggattcactggtgttgaattcttaggtgaattaacagacagaattcctgaattatgtagcaaatatggtgtggatcaaaataaagttaaaatcacttgtgttgaagcagcacctaaaatgttaccaatgttctcagaagaattagttaaccacgcagttagctacttagaagaccgcggtgttgaatttaaaattgctacaccaatcgttgcttgtaacgaaaaaggtttygtagttgaagtagatggtgaaaaacaacaattaaatgcaggtacttcagtatgggcwgctggtgtacgtggtagtaaattaatggaagaatcatttgaaggcgttaaacgtggacgtatcgttacaaagcaagatttaacaatcaatggttacgacaacatttttgttattggtgactgttcagcgtttatcccagctggagaagarcgtccattaccaactacagcacaaattgcaatgcaacaaggtgaaagtgttgctaaaaacattaaacgcatcttaaacggtgaatcaactgaagaattcgaataygttgatcgtggaactgtttgttctttaggttcacatgacggtgtaggtatggtatttgrtaaacctatcgctggtaaaaaagcagcattcatgaaaaaagtgattgatacacgtgcggtattcaaaatcggtggtatcggtttagcwttcaaaaaaggtaaattctag

SEQ ID NO: 2351 - DNA, 1479 bp, Staphylococcus aureus
atggacttttggttatataaacaagcacaacaaaatggacatcatattgcgataacagacggtcaagaatcttatacttatcaaaatttatactgtgaagcgagtctattggctaaaagrctcaaggcttatcaacaatctcgtgtygggctatacatagataattcgattcaatcratcattttaatacatgcwtgttggttggcaaatattgaaattgcgatgattaatacaaggttgacacctaatgagatgamgaatcagatgargtcaatcgatgtacaattgattttttgyaccttgccactggaattrcgagggtttcaaattgtatcgctggatgatattgaattcgctggaasggatattacaaygaacrgtttgttggacaayacaatggrtatccaatatgawacatcgaatgaaactgtggtgccgaaagaktcgccgtccaacatattaaatacwtcatttaatttagatgacattgcatcrattatgtttacatcagggacaackggycctcaaaaagcggtgccrcaaacgtttcgtaatcattatgccagtgcaatcggatgtaaagagagcttgggatttgatcgtgayactaattggctatctgtcttgccgatttatcatatttcgggtctcagtgtacttttaagagctgttattgaaggdtttactgtgcgcattgttgataaattcaatgccgaacaaattttaacgatratwaaaaatgaacgmatcacrcacatttcgcttgtgccacaaactttaaattggcttatgcaacaaggtttacatgaaccttatratttrcaaaaaatattactcggcggtgctaaaytatctgccastwtgatagagacggcattacaatataacctgccaatttataattcatttggyatgactgagacatgttcrcaatttttaacagcaacaccggaaatgttgcatgcacgtcctgacactgtaggratgccaagtgccaatgtwgacgtwaaaattaaaaatcctaataaaraaggtcatggagaattaatgattaaaggygccaatgtgatgaatgkatatttgtatccaacagatttaacgggtacgtttgaaaatggttattttaatacrggtgacattgctgaaatagatcatgaaggttatgtyatgatttatgacmgacgtaaagatttaattattagtggcggtgaaaatatttatccatatcaaattgaaacggtagcgaagcaatttccaggtatcaktgacgcagtatgtgtagggcatcctgatgatacttggggmcaagtrcctaaattatattttgtcagtgaaagtracatttcaaaggcacaattgattgcatatttatcamaacatttagcgaaatataaagtaccgaaacactttgaaaaggttgatactttaccttatacatcaacrggtaaattacaragaaataagttgtatagaggatga

SEQ ID NO: 2352 - DNA, 2070 bp, Staphylococcus aureus
atgaaatttaagtcattgattacaacaacattagcattaggygttwtagcatcaacaggagcaaacttwratactaacgaagcatctgccgcagctaagcaaatagataaatcatcaagttcattacaycatggatattctaaaatacagattccatatacaatcactgtgaatggtacaagccaaaacattttatcaagcttaacatttaataagaatcaacaaattagttataaagatatagagaataaagttaaatcagttttrtactttaatagaggtattagtgatatcgatttaagactttctaagcaagcaaaatacacggttcattttaagaatggmacaaaaagagttgtcgatttgaaagcaggcattcacacagctgacttaatyaatacaagtgacattaaagcaattagtgttaacgtagatactaaaaagcaagtgaaagataaagaggcaaaagcaaatgtycaagtgccgtatacaatcactgtgaatggtacaagccaaaacattttatcaaacttaacatttaaaaagaatcarcaaattagttataaagatttagagaataatgtaaaatcagttttaaaatcaaacagaggtataactgatgtagatttaagactttcaaaacaagcgaaatttacagttaattttaaaaatggcacgaaaaaagttatcgatytgaaagcaggcatttatacagcgaacttaatcaatacaggcgrtattaaaaatatcaatataaatgtagaaactaaaaagcaagcgaaagataaagaagcraaagyaaataatcaagtgccatattcaattaatttaaatggtacaacaactaatattcaatctaatttagcattttcaaataaaccttggacaaattacaaaaatttaacarcaaaggtwaaatcagtattgaaatctgacagaggcgttagtgaacgtgatttgaaacacgcaaagaaagcgtattacactgtttactttaaaaatggtggtaaaagagtgatacatttaaactcgaatatttatacagctaayttagttcatgcgaaagatrttaagaraattgaagttacwgtwaaaacwgkwtcraaagyraawgcrgagcgttatgtaccatayacaattgcagtaaatggrrcatcaamwccaamtttatcwgatttaaaatttamaggtgactcacgtgtaagytacagtgatatcamkaaaaaagttaaatcagtattgaaryatgatagaggtatcggtgaacgtgaattaaaatatgcyraaaaagcaacttatacagtacattttaaaaatggaacaaaaaaagtgattaatttaaactcwaawattagycaactgaatytgctttwtgtcaaagatattaaaaakatagatrtcgatgttaaaacwgggkcaaaagcgaaagyskatagctatgtaccatacacaatcgcagtaaatgggacawcaacacctattgcatcaaaactaaractttcgaataaacaattaattggttatcaagatttaaataaaaaagttaaatcagttttaaaacatgatagaggtatcaatgatattgaattgaaatttgcgaaacaagcaaagtatactrtacactttaaaaatggaaagacacaagtmgttgaccttaaatcagatatctttacaagaaayttattcagtgtcaaagatattaaaaagatwgatattratgtraaacaacamwctaaatctaataaagcgcttaataaagtgdctaacawagcgactaaagtgaagtttccagtaacgataaatggattttcaaatktagtttcaaatgaatttgcgtttttacatccacataaaataacaacaaacgacttgaatgctaaacttagactagcgttassaagcgatcaaggtattactaaacatgatattggactttctgaacgcactgtgtataaagtgtattttaaagacggatcatcaaaattwgwwgacttaaaagctgcgaaacaagattcaaaagtatttaaagcaactgacattaaaaaagtagacattgaaattaaattttaa

SEQ ID NO: 2353 - DNA, 1476 bp, Staphylococcus aureus
atgaattttaaattaaataacacamtaagcaacgaaataaatacattgattattggtataccagaacatttaaatcagttagagcgcattagttttaatcatatcgatattacagaatcacttgaaagactaaaacatcaacatattattggtagtaaagttgggaagatttatacaactgcatttgatgtacaagatcaaacatatcgtttaattacagttggtttaggaaacttaaarrcacgtagttatcaagatatgttgaaaatatggggacatcttttccaatacataaagtcagaacayattgaagatacktatttacttatggattcatttatttcaaaatatgatcagttatcagatgtattaatggcatgcggtattcaaagtgagcgtgcaacatatgaattcgatcattataaatcaagtaagaaggcaccgtttaagacraatttaaaccttattagtgaatcattaattgaattagatttyattcatgarggtatcagtattggccartccattaatttggcaagagactttagtaatatgccaccgaatgtattaacaccacaaacatttgcagaagatattgttaatcattttaaaaatacaaaggtcaaagtagakgttaaagattatgacactttagtttctgaaggattyggacttttacaagcrgtaggtaaaggtagtaagcataaaccgagattagtaaccatcacatataatggcaaagacaaagatgwagcaccaattgccttagttggtaaaggtataacgtatgattctggtggttatagtattaaaacgaagaatggcatggctacaatgaartwtgacatgtgtggcgctgcgaatgtcgttggtatcattgaagcggctagtcgtttacaactgcctgtaaatattgtcggagtgcttgcktgtgctgaaaatatgataaatgaagcatcaatgaagccagatgatgtatttacagcrttaagtggtgaaactgtagaagtaatgaatacagacgctgaaggtagattagtccttgcagatgctgtgtwttatgcaaatcaatatcagcctagtgtgattatggactttgctacattaacgggtgcagcmatygttgcactwggcgatgataaagctgctgcatttgaatcgaatagtaaagtgatattaaacgayatattacaaataagttctraagtcgatgaaatggtatttgaattaccgattactgcaaccgaacgtgcaagtattaawcacagtgatatcgctgatttagttaaccatacgaatggacaaggtaaagcgctatttgcggcaagttttgtaacacattttagtggtcaaacacctcacattcatttcgatattgcaggtccagcaacgactaataaagcttcatataatggtccaaaagggccaacaggatttatgattccgacgatagtacaatggttaaaacaacaataa

SEQ ID NO: 2354 - DNA, 483 bp, Staphylococcus aureus
ttgaaaaagtytttaaaattcaaggggatgaaaatatgtttaatgctatatctactgatttttttaagtagttgtrgcacaaayaataaaatagtaggccaacgatttgaaatacaacaacataatgaaayaataggtagwatttacttttcagcagactatgcacatataagaggtatagaaaaaggcactgyaaaatatttcrtagayaaagtaggcagcaaacgttacttatttattgaatatattccggataatgtattgaattgcaagycggacttttggaaaacgttaaaatataaaaaggayaagrtaacatattatgtatatctcattgaaaatttagatgatgaastattycatttaagtgyattacaagayatgaaycrtakaccrattgacattgcagatgatgtggcaacaatggrtaaatcaccacatcaraatgacagaatracactaaaattaaataaaaataactga

SEQ ID NO: 2355 - DNA, 1317 bp, Staphylococcus aureus
atgataaatgcagtagtaatagcagtaatwttaatgattrtgctatgtttatgtcgattaaacgtagttataagcttatttatcagtgcgctagtwggtggcttaatttcaggcatgagcattgaaaaagttataaatgtatttgggaaaaatatagtcgatggtgctgaggtagcattaagctatgchttattaggtggatttgcagcattaatttcatacagtggtatcacagactatttagtaggaaaaatwataaatgcaattcacgctgaaaatagtcgatggtcaagagttaaagtvaaagtgacaataatcattgcattattagctatgagtatcatgagtcaaaacttaattcctgtacatattgcattcattccaattgtcatcccaccattrttaagtctgtttaatgacttaaaaatagatagacgtttaatcggtttgattatcggttttggtttatgtttcccgtatgtgttattaccatatggattcggtcaaattwtccagcaaattattcaaagtggctttgcaaaggcraatcacccaattgagtttaatatgatttggaaagcaatgcttattccttcaatggggtatattgttggcttacttatcggtttatatgtatatcgtaaaccacgtgaatatgaaacacgtaaaatttcagatagtgacaatgttacagagttaaaaccatatatcttaatagtaacaattgtrgcaatactagctacatttttagtacaaacrtttacagattcaatgatttttggtgcactggcmggggtactcgtattctttatttcacgtgcatataattggtatgaattagatgctaagtttgttgaaggtattaaaattatggcttatattggtgtagttattttaacagcaaatggrtttgctggtgtaatgaatgctactggtgatatagatgaattagttaaaactttaacaagtattactggtgataataaattatttagcattatcatgatgtatgtgataggtttaattgtcactttaggtattggatcatcatttgcaacaattcctattatcgcatcattattcattccttttggagcgtcaattggactagatacaatggcattaatcgcattgattggaacagcgagtgcattaggtgactcaggttcrcctgcaagtgattcaacattaggaccaactgcgggattaaatgttgatggccaacatgatcatatacgygatacatgtgtaccaaacttcttgttttataatattcctttaatgattttcggtactattgctgctatggtactataa

SEQ ID NO: 2356 - DNA, 642 bp, Staphylococcus aureus
atgtttacacctatagttataaatttattaaatgatgtaggttcgatttttttagttagggtggggaatcaattgaaagttattgagaaagttcattatgaagatattttagaatcaaaaatagttcgattatttcaggcatttataaaggacaaaatggatcaactttttattacttctgaacactttgctattgacatagacaagctattatttcaacttaatttaaatgttagatatattaaaatggagggtaatacttcgggttatttaagtggaagaacaatctatattaataataatcactcgattaataatacaagattttcaatagctcgtgaattgggccgttatttatttaaaaatacagacttaatgagagatagtaacgataatagtctaaagaatttacatgaaatgatttatgaaagcgacgtaaatcagttttcagtcgacttacttatgcctaaaaagcaaatagaggcattagtctataatttttatgaagtcaataatatcaatttaagttctggtttatctgaaaaagaacgaaacaaactattgaaccttatatcaactaagttggaagtttcgaaagtagctgctggattaaggctgtataatttaggaatacatatttga

SEQ ID NO: 2357 - DNA, 375 bp, Staphylococcus aureus
atgactcatttattagagacatttgagatgtcaatagatcaccaggaagatggtttagttgttatttctatgcctgtyactgataaagtaaaacaaccatttggatatttacatggyggkgcttcgattgctttaggtgaaacagcatgttcattaggatctgctaatytaattgatacaaccaaatttattccattaggtttagagatgaatgcyaaycatattcattctgctaaagatggtcrtgttaytgcgacagctgaaattattcatcraggtaagtcracacatgtatgggatataaaaattaagaatgacaaagaacaattaattacagttatgcgtggtacagttgctattaarcctttaaaataa

SEQ ID NO: 2358 - DNA, 594 bp, Staphylococcus aureus
atggctaactatccacagttaaacaaagaagtacaacaaggtgaaatyaaagtggttatgcacacaaataaaggtgacatgacattcaaattatttccaaatattgcaccaaaaacagttgaaaattttgtgacacatgcaaaaaatggttattatgatggaatmacattccaccgtgtcattaatgacttcatgattcaaggtggcgatccaacagctactggtatgggtggcgaaagtatttatggcggtgcttttgaagatgaattttcrttaaatgcatttaacttatatggcgcattatcaatggctaactcaggacctaatacwaatggttcacaatttttcattgttcaaatgaaagaagtacctcaaaatatgttaagtcaacttrcagatggtggctggcctcaaccaatcgttgatgcatatggcgaaaagggtggtacaccatggttagatcaaaaacatacagtattcggtcaaatcattgatggtgaaactacwttagaagatattgcaaatacaaaagtgggaccacaagayaaaccacttcatgatgttgtaattgaatctattgatgttgaagaataa

SEQ ID NO: 2359 - DNA, 174 bp, Staphylococcus aureus
atggatagattaaaatattcacttaaagttggaattttagcattattattattttgtactttaaattatttagttccaatgcaaagyaatgctttttcaataattatatattcrkcaatttttgctgtgttacttatgcttttagtttatatatttttaggaattttraagaaa

SEQ ID NO: 2360 - DNA, 378 bp, Staphylococcus aureus
ttgaataactacaaaattggccaacatatcaaggtgcgtgtaactggtattcaaccatacggtgcgtttgttgagacccctaatcatactgaaggactgattcatatatcagaaattatggatgactacgttcataatttgaagaaatttctatcagaaggccaaattgttaaagctaaaattttgtctatagatgatgaaggaaagctyaatctatcattaaaggataatgattacttcaaaaattatgagcgtaagaaggaaaaacaatcagtattagatgaaatcagagaaacagaaaaatatgggtttcaaacacttaaagaacgcttaccaatctggataaaacagtcaaagcgagcaattcgaaacgactaa

SEQ ID NO: 2361 - DNA, 381 bp, Staphylococcus aureus
ttgagtaaccaaaatttatttgatgaacttgagaaaaaaggttataaactggaagatatatttacaaaagaagaaataaaaaaatataaagctgaagaccaattragagcgggtaaaactcaatatgtagaaacaggtaaagatactgcaacattatatctttcttctgcatatacaaaaacaatagctgctttaggtgcgggggctattagcgttatttctgcactaacaggwggtttagttggcgcaggtgttggtggtttccttggatctatagctgcatcgaatattgatactagtaagggartatatataaaattaaaaactaaaaagwatgcagccggggaatacgttctgacaggagaaaaatggggatatcag

SEQ ID NO: 2362 - DNA, 243 bp, Staphylococcus aureus
atgatatacaatttcgattatagtttgctgtacgaaagaatggcagagtatagatatagccaaagttctttagcgaacgcaatccctatttcaaggacatctattaatcacaagttgcaaggaaaaaatttattcacacaatgggaaataaaacgaatctgtgaattattagaaatcccrccaacaaaagtaggtagatatttttttgaacaaaatgtacagaaaactgtacaaacatcttaa

SEQ ID NO: 2363 - DNA, 1128 bp, Staphylococcus aureus
atgaaaagtaaatacgaaccattgtttgataaagtagwattaccaaatggagtagagttgagaaatcgatttgtgttagcccctttaacacatatttcttcaaatgatgatggtactatttcagatrtagaacttccttatattgaaaagcgttcacaagatgttggtattacaaktaatgctgcgagtaatgtgagtgatgtcggaaaagcatttccaggacagccrtcaatcgcgcatgacagtratattgaaggactaaaacgattagctacagcaatgaagaaaaacggtgccaaagcactcgtacaaatacatcatggyggtgcacaagcattgcctgaattaayacctgrtggagacgtcgtagcaccaagtccaatttctttaaaaagtttyggtcagaaacaagaacatagtgctagagaaatgacgaatgaagagattgaacaagcaatcaaggattttggtgaagcaacrcgacgtgcaattgaagcaggrtttgatggtgttgaaatwcatggcgcgaatcattacttaattcatcaatttgtatcaccatactataatagaagaaatgatgtwtgggcaaatcaatataaattcccgrtcgctgtgattgaagargtrcttaaakcgaaagaagygtatggyaataaagactttatagttggatacagattatctccagaggaagcggagtctccaggaatcacaatggaaattacagaggaactcgttaataaaattagccatatgccaatcgactatattcatgtttcratgatggatacgcatgcaacgrcacgtgaaggtaaatacgctggacaagaaagactrcctttaattcacaaatggataaatggtcgtatgccacttatcggtattggttcaattttcacagctgacgamgctttagatgcagttgaaaatgttggtgttgacttagtagccattggtagagagctactactrgattatcaatttgttgaaaaaattaaagatggacgggaagatgaaattattaattactttgatccagagagagaagataatcatcacttaactcctaatttatggcatcaatttaatgaaggrttytatccattaccacgtaaagataaataa

SEQ ID NO: 2364 - DNA, 1191 bp, Staphylococcus aureus
atgactaaatctgaaaaaattattgagttaacaaatcattacggagcacataattatttaccattgccaattgtcatttcagaagctgaaggggtatgggttaaagatcctgaaggcaataaatatatggatatgttatctgcatattccgctgttaaccaaggtcatagacatccgaaaattattcaagcattaaaagatcaagctgataaagtgactytagtttcacgtgcttttcatagtgataacttaggwgaatggtacgaaaaaatttgtaaactggcaggtaaagataaagctttaccaatgaatacaggtgctgaagcagtagaaacagctttgaaagcagcacgacgctgggcatacgatgttaaaggaattgagccaaataaagcagaaatcattgcatttaatggtaacttccatggtcgaacaatggcgccagtttcattatcwtcagaagcagaataccaacgtggttatggtccrttattagatggrtttagaaaagttgattttggwgatgtagatgcattgaaagctgcaattaatraaaatactgcagcagttttagtagaaccaattcaaggtgaagcgggtataaatataccrccagaaggatatttgaaagcaattagagaattatgtgatgaacataatgtcttatttattgctgacgaaatccaagcaggattaggtcgttcgggtaaattatttgctasggattgggataatgtaaaacctgatgtctatattttaggtaaagcactaggtggtggwgtcttcccaatttctgttgtattagcagataaagaagtattagatgtctttacacctggctcacatggttcaacatttggtggtaatccacttgcttgtgcwgcatcaattgctgcattagatgttatcgttgatgaggatttaccaggbcgctctttagaattaggagattattttaaagaacaattaaagcaaattgatcatccatcaattaaagaagtccgtggacgtggtttgtttataggtgtggaacttaatgaaagtgctagaccataytgtgaagcwttraaagaagaaggcttattatgtaaagaaacgcatgatactgtcattcgttttgcaccaccattaattattactaaagaagaattggaccttgcacttgaaaaaataagacatgtatttcaataa

SEQ ID NO: 2365 - DNA, 4113 bp, Staphylococcus aureus
ttgaaacgatcaacgaatcaagaaaaatttcttgatacactaattagacttaatactaagattgaagaactaggaaagataaatattttaaataatcatatatattccgaatatttttttagagacctgttaaatattgtatatgggtattcacttgagaatcataataaaaaacaaaaaaatgcaccagcatttgatcttatagataatacgaataaaattattattcaagttaccgcaacgtgtaaaaagcaaaaaatagaggacactctaaaaaaagagtatttaacaaataaaatggaagaaggttatcgattaaagtttatatttattggaaatcaaaataataatattaaaaataagaatttttcaaatccacataatatattattcgatagtaaaaaagatattattttaactcaagacttatgcgaagagtttttgaatttaaacataaataagcaagatcacgctattgaattattaaaaaaagaattatctccgcttttatttgaagattctttgtcatatttaaaagaagaatttattaatgaaaaattagaatttaatatatcgaatttagcttcacgatatactgcgaataatgatgtcgatactattaataataaaattatagaaggtatttctattaccaataattttaaatatactaatatttcatatctaaaagaattaaaaggttatatcgaaaatgatattttagataagatgaaatcaaaatacgcaaagaatatttatttgaatttcaaaaaaatattctctaatttagaacaatcagtcaataattatttggaactggaagaagagtttgaagaaaagaaaaaatacttaagtgaaatttatgaattgatagacgaaattaatattgacccttatatttttctgacagaacataatgaatgtaatatatacaaaataagtgagaatgaaaaattagaacttcaaacttatatgagtaaaatcgaaaaagtattattaaaatatcaaacgtatttaaaagaaacatgtaaagaatgcttgttttatccttatttgctagttcaaggtgaagctggcataggaaaatcacaccttttagcgcatctatctaaaaaacttagagatgaaaatcatattatttatctgtttttgggacaattttttactaaaaatgaagatccatggcatcaaatacttaatgatttagaagttacaaattctgttgataattttttaaggtcaataagtaataaggccaaagaaacaaaaaaaagagcttttattattattgatgcgcttaatgaaggtgaaggtaaaaggttatggggaaattattttcaaagctttatcaaccatataaagaagtattctaatatagctttaatattttctattagaaccccttttgaagatgttatattacccaaaaacgcaatacaagataacaatattgtagtatttcagcatgaaggttttagtaaggaagaaaactataatccaattgtatctttttgtgatttttatggattagagctacctaagttacctatattaaatccagaattcaacaatccattatttttaaaactaatgtgtgagtactgtgtaaataaatttaaggaatttgaccaaactataagtgttgcagagctatttacaaatgttcttaagacagtaaatattaatttatctaaggaagataaatttgattttgataaaaatattaatgttgtacaaaaagtaataaaaggattagttgaattaatgaacgactcagaatttaatcaactaaattatgaggaatcctatactgttgttaataatatagctaaagagtatgttcaaaagtcaaatagatttttagaagcgctaatagatgaaaatatattaattaaaaatactggctataaaggtgaaatgattatttatttttcgtatgagcgtatgggagattactttttatcagaataccttttagagaaatatagaaatgttgataaaagagatttagtaactaaattacagtcagatgaaaaagtgacaaggtattttcaaaaggaagacgatttatcttataatagaggtcttattaatgaactttttattaaattagcaaatgaatttaatatagagctatttgaagtatttccacagtttaaaaacaattataacatgatatattcttttataaatagtttagtatggagaaaagatggtagcataagtaaacatactaaatgctatatatccgataatgttattccttatgatgcatttagaaataattttttagatgtcttattaataaaaatgcctcaaaaaaaccatccgttaaatatttgggctttacataaattattgaaacaatgcaatttaggaaaaagagattttttatggactcaatatatatctataaataatgaaaaggtttttgaaattattaattggctatttagtaactataagaaattagatgaagaaactgcggaaaaatatatgatttttttaacgtggatattttctgcaactaataataaattaagagatctcggtactaaatctttagtaaaattattcaaaacatttccaactaaaattattggtttattaaaattatttgaaaataacaatgatccatatatagtcgaaagattatatgcttctgttttaggggcgacacttcgaatcgacatttgtgaaatacatatagagattgctaattatatttatgaagaaatatttgataaagaaatggtatatcctcatattttaatgagagattatgctaggcaaacaattgaatatattagtttatcaaaagatatatctaatataaatttagaaaaaattaggccaccttataaaagtaattggtataaaaaagaatattcgaatttaaatatagacgattacataaaatctttaaaaaacaaattagatagccatttacatttttctatcgataaaattaaaaactcaatgacaacggaatatggaagaggaactggggcatatggcgattttggcagatatgtatttggttatgctgtacgaaactgggtaaagggttttaaaagtgatcaagacttaagtaatatagcattaatgaggatttttgaaatgggttatgatgcaaaattacatggtgaatttgatatgtgggttaatcgttatgataactttaataattcaattgaaagaattagcaaaaaatatcaatggattgcttactatgaaattttagctaaacttgtagataaatttcctgatgttcaatattctggactatgggatgattatattagagatattgatcctactttactattacttgaaattgataaakaatcaaaaatactagtaccctcaccacttccttcgcatcaatcgaatgaatgggtaaaaaataccaaagtttttgatgaaacaaaattatttttagaaatagatatagacaatcatagatatatatgtttaagctcaaagtttaattttgaaaagagagagaaagaaataccatttgaagatagagactcatgttatttcttagcgatgggatatttttataataaagaagatagtaatgaaattatcaaaggttatgaaaataattatgatagaggtattaatattcctcgagcacatagtatatatttatatgaatattattggagcgaagcttataaaaattataaagagggatatttaactgaatcagatggtaaattatgtccagctatttatgaatatttttgggagttagattattctgttaaggacaaatcaataagtttttatattccgtgtaaagaaatagtagattatttttcattaatacaaacggaagaaggagtatggaaaactaaatttggtgaaacaatatgtattaattctaaattactcgaatttgataatgaatgtttacttattaaaaaagaaagtttattaaactttcttaatactaaaaaattgtctattggatggaaaatatatctagaaaaaatttctcttcgagatagacaagaatggtggtacaatgttttttatgacgatggcaaatataataagaaaataattaagaatgacatgtcaaaaattaggcgtaatttttag

SEQ ID NO: 2366 - DNA, 1245 bp, Staphylococcus aureus
atgactgagaacaataatttagtaacttctactcaaggaattattaaagaagcattgcataaattgggatttgacgaaggaatgtacgatttaattaaagaacctttaagaatgttacaagtgcgtatccctgtacgaatggatgatggcacwgtwaaaacattcacaggttaccgtgcgcaacataatgatgctgttggaccaacaaaagggggcgtgcgtttccacccagatgttgatgaagaagaagtaaaagcattatcaatgtggatgactttgaaatgtggcattgtwaacttaccatacggtggtggtaagggtggtatcgtttgtgatccacgtcaaatgagcattcatgaagttgaacgtttatcacgcggatatgtaagagcaatttcacaattcgtaggtccgaacaaagatattccagcaccagatgtatttacaaactcacaaattatggcttggatgatggatgaatatagtgcattagataaatttaattcaccaggtttcatcacaggtaaaccaattgtattgggtggttctcatggacgcgayagatcaactgcactaggtgtagttattgcaattgaacaagctgcaaaacgtcgtaatatgcaaattgaaggtgccaaggttgttattcaaggtttcggtaatgccggaagtttcttagctaaattcttatatgatttaggtgcaaaaattgtaggtatctctgatgcttacggtgcattacacgatccaaatggcttagatatagattatttattagaccgtcgtgatagttttggtacggtaacaaatttatttgaagaaacaatctcaaataaagaattgtttgaattagattgtgacattttagtaccagcggctatttcaaaccaaattacagaagacaatgcacatgatattaaagctagyatcgttgttgaagctgctaatggacctacaacaccagargcaacacgtattttaactgaacgtggtatattattagttccagacgtattagcaagtgctggtggtgtaacggtttcwtacttcgaatgggtacaaaataatcaaggttattattggtctgaagaagaagtwaatgaaaagctacgtgaaaaattagaagcggcatttgayacgatttacgaattgtctcaaaaycgaaaaatagatatgagacttgcagcatatatcataggtattaaacgtacagcagaagcagctagatatcgtggttgggcataa

SEQ ID NO: 2367 - DNA, 1332 bp, Staphylococcus aureus
atgactcatattcaattagattttagtaaaacgttagaatttttcggtgaacacgaattaaaacaacaacaagaaattgttaaatcaattcacaaaacaattcatgaaggtactggtgcaggtagtgacttcttaggctggrttgatttaccagttgattacgacaaagaagaattttcaagaattgttgaagcatcaaaacgcattaaagaaaattctgatgttttagtagtcatcggtattggtggttcttacttaggtgcacgtgcagcaatcgaaatgttaacgtcatcatttagaaacagcaatgaataccctgaaattgtatttgttggtaatcacttatcatcaacatayackaaagagttagttgattatttagcagacaaagatttctctgtaaacgttatttctaaatctggtacaactacagaaccagcagttgcatttagattgttcaaacaattagttgaagaaagatacggtaaagaagaagcacaaaaacgtatatttgcaacaacggataaagaaaaaggtgctttaaaacagttggctacaaacgaaggttatgaaacgtttatcgtacctgatgatgtaggtggaagatattctgttttaacagcagtaggattattaccaattgcaacwgctggaattaacatcgaagctatgatgattggtgctgcaaaagcacgtgaagaattatcttcagataaattagaagamaacattgcataccaatatgcgacaattcgaaacattttatatgcaaaaggttatacaacagaaatgttgattaactatgaaccatctatgcaatactttaatgaatggtggaaacaattatttggtgaatcagaaggtaaagacttcaaaggtatytatccttcaagtgccaactacacaactgatttacattctttaggtcaatatgtacaagaaggccgtcgyttcttattcgaaacagtkgtaaaagtaaatcatcctaaatatgatattactattgaaaaagatagtgatgatctagacggattaaattatttrgctggtaaaacaatcgaygaagttaacacaaaagcattcgaaggtacattattagcgcatactgatggtggtgttcctaacatggtagtgaacattccacaattagatgaagaaactttcggttaygtcgtatacttcttcgaacttgcttgtgcaatgagtggataccaattaggygtaaatccatttaaccaacctggtgtagaagcatataaacaaaacatgttcgcattattaggtaaacctggttttgaagacttgaaaaaagaattagaagarcgtttataa

SEQ ID NO: 2368 - DNA, 765 bp, Staphylococcus aureus
ttgaatcatattcatgaacatttaaaattggtaccagtagataagattgatcttcacgaaacattcgaacctttaagattggaaaaracgaaaagtagtattgaagcagatgattttatacgtcatcctattttagtgacagcgatgcaacatggtagatatatggttatagatggtgtgcatcggtatacaagtttgaaagcgttaggatgtaagaaagttccagtgcaagaaatccatgaaacacaatattcaattagtacrtggcaacataaagttccatttggtgtgtggtgggaaacgttacaacaagaacatcgcttrccatggactactgagacaagacaagaagcgccatttattacratgtgtcatggtgatacagaacaatatttgtatacraaagatttaggcgaagcacattttcaagtatgggaaaaggttgtcgcaagttatagtggttgttgttctgtagagagaattgcacaaggtacatatccttgtctttctcaacaagatgtactcatgaagtatcagccattgagttataaggaaattgaagsggttgttcataaaggggaaactgtgccagcaggtgtgacacgctttaatatttcaggacgatgtcttaatcttcaagtaccactggcattacttaaacaagatgatgatgttgaacaactgcgyaattggaagcagtttttagcagataagtttgccaatatgagatgytatactgaaaaagtatacttggtggagcaatag

SEQ ID NO: 2369 - DNA, 576 bp, Staphylococcus aureus
ttgtcgtttcatcaagtagaagaatggtttgagatatttcgacagtttggttatttacctggattyatattgttatatatwagagckatwattccagtatttccwttagcactctatattttaattaayattcaagcytatggacctattttaggtatattgattagttggcttggattaatttctggaacatttacagtctatttgatctgtaaacgattggtgrayactgaraggatgcagcgaattaaacaacgtactgctgttcaacgcttgattagttttattgatcgccaaggattaatcccattrtttattttactttgttttccttttacgccaaatacattaataaattttgtagcgagtctatctcatattagacctaaatattatttcattgttttggcatcatcaaagttagtttcaacaattattttaggttatttaggwaaggaaattactacaattttaacgcatcctttaagagggatattaatgttagttgtgttgrttgtattttggattgttggaaaaaagttagaacagcattttatgggrtcgaaaaaggagtga

SEQ ID NO: 2370 - DNA, 843 bp, Staphylococcus aureus
atgaataatagtaaaattatttctaaagttttattgtctttatctctatttactgtaggagctagtgcatttgttattcaagacgaactgatgcaaaaaaaccatgcaaaagcagaagtttcagcagaagaaataaaaaaacatgaagagaaatggaataagtactatggtgtcaatgcatttaatttaccaaaagagctttttagtaaagttgatgaaaaagatagacaaaagtatccatataatactataggtaatgtttttgtaaaaggacaaacaagtgcaactggtgtgttaattggaaaaaatacagttctaacaaatagacatatcgctaaatttgctaatggagatccatctaaagtatcttttagaccttctataaatacagatgataacggtaatactgaaacaccatatggagagtatgaagtcaaagaaatattacaagaaccatttggtgcaggtgttgatttagcattaatcagattaaaaccagatcaaaacggtgtttcattaggcgataaaatatcgccagcaaaaatagggacatctaatgatttaaaagatggagacaaactcgaattaataggctatccattcgatcataaagttaaccaaatgcacagaagtgaaattgagttaacaactttatcaagaggattaagatactatggatttacagttccgggaaattctggatcaggtatatttaattcaaatggagaattagttggtatacattctagcaaagtgtctcatcttgatagagagcatcaaataaattatggtgttggtattgggaattatgtcaagcgcattataaacgagaaaaatgagtaa

SEQ ID NO: 2371 - DNA, 525 bp, Staphylococcus aureus
gtgaaaaaagttgtaaaatatttgatttcattgatacttgctattatcattgtactgttcgtacaaacttttgtaatagttggtcatgtcattccgaataatgatatgtcrccaacccttaacaaaggggatcgtgttattgtaaataaaattaaagttacatttaatcaattgaataatggtgatatcattacatataggcgtggtaacgagatatatactagtcgaattattgccaarcctggtcaatcaatggcgtttcgtcagggacaattataccgtgatgaccgaccggttgacgcatcttatgccaagaacagaaaaattaaagattttagtttgcgcaattttaaaraattagatggwgatattatwccgccwaacaattttgttgtgctaaatgatcawgataayaaymagcaygattcwagacaatttggtttaatygataaaaaggatattattggtaatrtwagtttrmgataytatcctttttcaaaatggackrttcagttcaaatcttaa

SEQ ID NO: 2372 - DNA, 1200 bp, Staphylococcus aureus
atgagtaatacacaaamgaaaaatgtgccagarttgagattcccaggatttgarggcgaatgggaagagaagaagttagggaatcttactaccaaaataggtagtggaaagactcccaaaggtggaagtgaaaactatacaaacaaaggcataccatttttaaggagtcaaaatattagaaatggtaaattaaatcttaatgacttagtttatattagtaaagatatagatgatgagatgaaaaatagtagaacgtactatggtgatgttcttttaaatattacaggagcatcaataggtagaacagccattaattcgatagttgaaacgcatgctaatttaaatcaacatgtatgtattattagattgaaaaaagagtattattataatttttttggacagtatctattatcaagaaaaggtaaaaggaaaattttccttgcacaaagtggaggtagtcgagaaggtctaaacttcaaagaaattgctaatttaaaaatcttcaccccaactatatttgaagaacagcaaaaaataggcaagttcttcagcaaactcgaccgacaaattgaattagaagaacaaaaacttgaattgcttcaacaacagaaaaaaggctatatgcagaaaatcttcacacaagaattgcgattcaaagatgagaatggtgaagaatatccagagtgggaaaacaaattcataaaagacatctttatctttgaaaataatagaagaaaaccaattacttcttcattaagagaaaaggggttatacccttactatggtgcaactggaattattgattacgtaaaagattatttattcaataatgaagaacgattactaataggagaagatggtgcaaaatgggggcagtttgagacgagtagctttattgctaatgggcaatactgggtaaataatcatgcgcatgtagttaaaagtaatgatcataatttgttttttatgaattattatttaaattttaaagaactacgagcatttgtcacaggtaatgcaccagctaaattaactcatgcgaacttatgcaatataaatcttaaaataccttgtctcactgaacaagataaagtaagtgcattgttaaaatctatagacaataaaatgaataatcaaatgaatagaattgagttattaaaagaacgtaaaaaagractattacaaaaaatgtttatttaa

SEQ ID NO: 2373 - DNA, 1230 bp, Staphylococcus aureus
atgagtaatacacaaacgaaaaatgtgccagagttgagattcccaggatttgagggcgaatgggaagagaagaagttagggaatcttactaccaaaataggtagtggaaagactcccaaaggtggaagtgaaaactatacaaacaaaggcataccatttttaaggagtcaaaatattagaaatggtaaattaaatcttaatgacttagtttatattagtaaagatatagatgatgagatgaaaaatagtagaacgtactatggtgatgttcttttaaatattacaggagcatcaataggtagaacagccattaattcgatagttgaaacgcatgctaatttaaatcaacatgtatgtattattagattaaaaaaagagtattattataatttttttggacagtatctattatcaagaaaaggtaaaagaaaaattttccttgcacaaagtggaggtagtcgagaaggactaaacttcaaagaaattgctaatttaaaaatcttcaccccaactatatttgaagaacaacaaaaaataggacaattcttcagcaaacttgaccaacaaattgaattagaagaacaaaaacttgaattacttcaacaacagaaaaaatgctatatacagaaaatcttctcacaagaattacgattcaaagatgaagaaggtaattactataaaggatggaacaaaaagcaattaaaagatgtattagaatttagtaataaaagaactattaatgaaaatgaatatcctgttttaayatcgtcaagacaaggtttaatacttcagtcagactactataaagataggaaaacttttgcagagagtaatattgggtatttcatactccctaaaaatcatataacataccgttcaagaagcgacgatggaatttttaagtttaatttaaatctaatgattgatgtaggtattattagtaaatattaccctgtctttaaagggatagatgcaaatcaatattatttaacattacacttaaactatcaactgaaaaaagaatatattaaatatgcaactggtacatcacaattggtactctcacaaaaagacttgcaaaacataaagactaaattgccatcttatgaagaacaacaaaaaatcggtgattttttcagtgaaatagatagattggttgaaaaacaatcttcaaaagtcggacgattaaaagtacgtaaaaaagaactattacaaaaaatgtttgtttaa

SEQ ID NO: 2374 - DNA, 585 bp, Staphylococcus aureus
gtgtcaaaattgaaaaaagaawtattggaatggattatttcaattgcagtcgcttttgtcattttatttatagtaggtaaatttattgttacrccatatacaattaaaggtgaatcaatggatccaactttgaaagatggcgagcgagtagctgtaaacattrttggatataaaacaggtggtttggaaaaaggtaatgtagttgtcttccatgcaaacaaaaatgatgactatgttaaacgtgtcatcggtgttcctggtgataaagtagaatayaaaaatgatacattatatgtcaatggyaaaaaacaagatgaaccatatttaaactayaatttaaaacataaacaaggtgattacattactgggactttccaagttaaagatttaccgaatgcgaaycctaaatcaaatgtmattccaaaaggtaaatatttagtkcttggrgataatcgtgaagtaagtaaagatagccgtgcgtttggcctcattgatgaagaccaaattgttggtaaagtttcrtttagrttctggccattyagygaatttaaayataatttcaatcctgaaaatactaaaaattaa

SEQ ID NO: 2375 - DNA, 1740 bp, Staphylococcus aureus
atgattttgaaagcatttgaaagctacaacatttcyawaaaawttttcaataacaattgcgccrctaaaactcaaaatttccacmaccaacatcmaaattmtmaacatcgcaacawaaccaaatgttataataaatctattacacaaagagataaattacttatgcaaaggcggaggaatcacatgtctattactgaaaaacaacgtcagcaacaagctgaattacataaaaaattatggtcgattgcgaatgatttaagagggaacatggatgcgagtgaattccgtaattacattttaggcttgattttctatygcttcttatctgaaaaagccgaacaagaatatgcagatgccttgtcaggtgaagacatcacgtatcaagaagcatgggcagatgaagaataycgtgaagacttaaaagyagaattaattgaycaagtcggttacttcattgagccacaagatttattcagygcgatgattcrtgaaattgaaacgcaagatttcgatatmgaacatctrgcgacggcrattcgyaaagttgaaacatcwacaytaggtgaagaaagtgaaaatgactttatcggrctgttcagcgatatggayttragttcaacgcgwytaggtaacaatgtcaaagaacgtactgckttaatytcyaaagtyatggttaatcttgacgayttaccattcgttcacagtgayatggaaattgatatgttaggtgatgcatatgaattcctwatcgggcgctttgcggcgacagcgggtaaaaaagcwggcgagttctatacaccacaacaagtatctaagatactggcraagattgtcacagacggtaaagataaattacgtcacgtgtaygacccaacatgtggttcmggttcaytrytgttrcgtgttggtaaagaracrcaagtrtatcgttatttcggwcaagaacgtaacaatacyacatacaacttagcacgcatgaayatgttrttacatgatgtrcgttatgagaacttygakatccgtaatgatgayacrttggaaaayccagcctttttaggcaatacatttgatgcggttattgcgaacccaccrtayagtgcgaaatggacwgcagattcaaartttgaaaatgaygaacgwttyagtggttacggcaarcttgcgccwaartcyaaagcagactttgcctttattcaacacatggtacattacytagacgatgaaggtaccatggcmgtygtactcccacatggtgtmttattccgwggtgcygcagaaggtrtsattcgtcgytatttaatwgaagaaaagaactacttagaagcygtgattggkttrccagcsaatattttctatgggacaagtattccaacatgtattttagtatttaaaaaatgtcgccaacaagacgacaacgtaytatttatcgatgcatccaatgattttgaaaaaggaaaaaatcaaaaycatttaagcgatgcccaagtcgaacgtattatagacacatataagcgtaarrmaacrattgataaatatagctacagcgcgacaytacaagagatygccgataacgattacaacytaaayataccgmgatatgtygatacattcgaagaagaagcrccrattgatttagatcaagtccaacaagatttgaaaaatatcgayaaagaaatcgcagaaattgarcaagaaatcaatgcatacctgaaagaacttggggtgttgaaagatgagtaa

SEQ ID NO: 2376 - DNA, 3477 bp, Staphylococcus aureus
atgacattacatgcttatttaggtagagcgggaacaggtaagtctacgaaaatgttgaccgaaataaaacaaaaaatgaaagcagatccgcttggagatccaatcattttaattgcgccaactcaaagtacatttcaattagaacaagcctttgtcaatgatccggaattaaatggtagtttaagaacagaagtgttgcattttgaacgattaagtcatcgtattttccaagaagttggtagttatagcgaacaaaagttatctaaagctgcaacggaaatgatgatttataacattgttcaagaacaacaaaagtatttaaaactttatcaatcacaagcaaaatattatggrtttagtgaaaaattaacagaacaaattcaagattttaaaaaatatgcagtaacgcctgaacatttagaamrctttattgctgataaaaatatgcaaactcgaactaaaaataagttagaggatattgctttaatataccgwgagttcgaacaacgcattcaaaacgagtttattackggtgaggatkcattacaatattttattgattgtatgccgaaatcagagtggctaaaacgtgctgatatatatattgatggttttcacaacttttcaacgattgagtatttaataatcaaaggattaattaaatatgcgaagagtgtcacaattatattgacgacagatggtaaccacgatcaattyagtttatttagaaaaccatcggaagtgttacgacatattgaagaaatakcaaatgaactcaatatttctattgaacgtcaatatttcaaccaattatatcgcttyaataatcaagatttaaagcatcttgaacaagaatttgatgyacttcaaatcaatcgagtggcatgtcaaggtcatatcaatattttagaatctgcgactatgagagaggaaataaatgaaattgcrcgacgtatcatcgttgatattcgtgataarcaattacgatatcaagatattgcwattttatatcgtgaygartcttatgcttatttatttgattccatattaccgctttataatattccttataayattgatacaaagcgttcgatgacacatcatccggtcatggaaatgattcgttcattgattgaagttattcaatcwaattggcaartkaatccaatgctacgcttattgaagactgatgtgttaacgrcatcatatctaaaaagtgcatacttagttgatttacttgaaaattttgtacttgaacgtggtatatacggtaaacgttggttagatgatgagctatttaatgtcgaacattttagcaaaatggggcgtaaagsgcataaactkaccgaagatgaacgtaacacatttgaacaagtcgttaagttaaagaaagatgtcattgataaaattttacattttgaaaagcaaatgtcacaagcrgmaactgtaaaagaytttgcaactgctttttatgaaagtatggaatatttygaactgccaaatcaattgatgacagagcgagatgaacttgatttaaatggtaatcatgaaaaggcggargaaattgatcaaatatggaatggcttaattcaaatcctygaygacttagttctagtatttggagatgaaccaatgtcgatggaacgtttcttagaagtatttgatattggtttagaacaattagaatttgtyatgattccrcaaacattrgaycaagtwagtattggtacgatggatttggctaaagtcgayaataagcaacatgtttwcttagtwggwatgaaygaygghacsatgccacaaccagtaactgcrtcaagyttrattacwgatgaagaaaagaaataytttgaacarcargcwaatgtmgagttragtccwacatcagatattttacagatggatgaagcatttgtttgytatrttgctatgacwagagckmrrsraratgttacattttcttayagwctaatgggatcaagtggtgatgataaggaratcagcccatttttaaatcaaattcaatcattgttcaaccaattggaaattactaacattcctcaataccatgaagttaacccattgtcactaatgcaacatgctaagcaaaccaaaattacattatttgaagcattgcgtgcttggttakatgatgaaattgtggctgatagttggttagatgcttatcaagtaattagagatagcgatcatttaartcaaggtttagattatttaatgtcagcattaacgtttgacaatgaaactgtaaaattaggtgaaacgttgtctaaagatttatatggtaaggaaatcaatgccagtgtatcycgwtttgaaggttatcaacaatgcccatttaaacactatgcbtcacatggtctgaaactaaatgarcgaacgaartatgaacttcaaaactttgatttaggygatattttccattcygttttaaaatatatatctgaacgtattaatggygattttaaacaattagacctgaaaaaaataagacaattaacraatgaagcattggaagaaattttacctaaagttcartttaatttattaaattcttcagcttactatcgttatttatcaagacgcattggcgctattgtagaaacaacactaagcgcattaaaatatcaaggcacgtattcaaagtttatgccaaaacattttgagacaagttttagaaggaaaccaagaacaaatgacgaattaattgcacaaacattaacgacaactcaaggtattccaattaatattagagggcaaattgaccgtatcgatacgtatacaaagaatgatacaagttttgttaatatcattgactataaatcctctgaaggtagtgcgacacttgatttaacgaaagtatattatggtatgcaaatgcaratgatgacatacatggatatcgttttacaaaataaacaacgccttggattaacagatattgtgaaaccaggtggwttattatacttccatgtacatgaacctagaattaaatttaaatcwtggkcwgatattgatgaagataaaytagaacaagatttaattaaaaagtttaagytgagtggtttagtkaatgcagaccaaactgttattgatgcattggatattcgtttagaacctaaattcacttcagatattgtaccagttggtttgaataaagatggytctttgagtaaacgaggcagccaagtkgcagatgaagcaacratttataaattcatycarcataacaaagaraattttatagaaacmgcttcaaatattatggatggacatactgaagttgcaccattaaagtacaaacaaaaattgccatgtgctttttgtagttatcaatcggtatgtcatgtagatggcatgattgatagtaagcgatatcgaactgtagatgaaacaataaatccaattgaagcaattcaaaatattaacattaatgatgaatttgggggtgagyaatag

SEQ ID NO: 2377 - DNA, 927 bp, Staphylococcus aureus
atgtttaakagaaaattattagttacaactttgtcgctaggtctaattgtccctatagctacaccatttcaaggctctaaggctactactaatgcagaagatattggcgacgatgcagaagtgattaaacgtacggaagatgtaagtagtaggaaatggggtgtaacacaaaatgtccaatttgatttcgtaaaagataaaaaatataacaaagacgcattaattattaagatgcaaggttttatcaattctaggacaactttcaatgatgttaaacaaaatagagcaaataaaagaatggtttggccatttcaatataatatcggtcttacatcaaaagaccaaaatacgagcttaatcaattatcttcctaaaaataaaatagaaacagttgatgttggtcaaactttaggatataacattggaggtaaattccagtcagtaccatctataggcggaaatggatcatttaattattctaagagtattaaatattcccaaaagagttatgtcagcgaagttgaacaacaaagctcaaaaactattaagtggggggttaaagcaaattcttttgttatagcagggcatcgatggtctgcttacgatgaattattgtttataagaaatacgacaagaggacctaatgctagagactattttgtagacgataatgaattgccccctttaataacaagtggatttaatccgtcttttatcgcgacagtatctcacgaaaaagattcaggcgatacgagcgaatttgaaattacttacggtagaaatatggatgttacctatgcaacctacctycctaaacttggtctttatccagaaagaaaacataatgaatttgtaaacagaaacttkgtggtcaaatatgaagtgaattggaaaacgtmcgaamttaargtaarggggcacaactaa

SEQ ID NO: 2378 - DNA, 1509 bp, Staphylococcus aureus
ttgaatgaagaaatcttacgcgaagtagcagatatttttataggtgatgacagagatagcatttatgattataaaactgggaacgaattagtgaggttttttaatcattactttaataaaggggacatatatcaggctccgtttccatctagatggctatatgttgtgaaacatttgcaaactctgattcaggagagaaagatcaatcaatttttcacattaattttaagcaatcactatattaagtatgaactgaaaattgacgaggttgaagcagcaaagcaggctgctaaagcacttaagttgttcaacaaaagattaaatcattatgggtactacataacaggaactaacaatgctagatattttatggataaggatgaagatacggagtctattggttatggagggtatgcgaatatttatttacagaagtctacaggtcttgctgtaaaaaaattgaaagaggagtatcttactgattcttcaattaaaagtaggtttaagagagaatttgatctcactaaatcttttgatacaaatccattgttcattaatgtgtttgaatttaatgaatcagattattcatacacgatggagttagctgatgaaactttgaaagattacattgaaagcaagacaattagtgagctagaaaaagtaaagataataatgaaaattttaaaagcgatgagtcaagcacatagtgaaaataaaatacacagagatatcagttctaaaaatgtattaatgtttagaggaaaagtcaaaatatcagacttaggattaggtaaaaaccttgatgaaattcattcgcatcaaacctttgatacaaacggtgtaggacaatataaatactgtgcaccggaacagatgtatagtttaaaacaagcagataaacaatctgatgtttttagtttaggaagattgataaattttattatgactggaaatgtagttaacaaccatcacctatttagaggtgtatctgataaggctacgaacagtagtaaagaatacagatttgaagatgcaaatgaaatgttgaaaatgctgcagagaattttagagtatcacagtagtgcaaagcacgtcgaaaaatgtcaagaaaagctgaaaagaggagtgtttgatgatgaaagcgaagaatttattatgacacgaagtgatgaacaattatgtcaaatggttctaagttctaataataatgagcaagcgtgtttaattcgttatatgcaaaaaaacgaatcttcagcatgtgatttaatagagagtattaatagaaagtatcaagagttttgtggaaggtttgaagactacgatccttttgctaaattagcatatatgattttatgtaataacttcagttatagagtgaatgaaacagcagctagagtgctaaattatgttgcttggtctgtaaatagattttcggcacaagacttaattaaaggtttaattaatagaggagtggagcctttgattgaagaaaaattaaaggacaattaa

SEQ ID NO: 2379 - DNA, 3654 bp, Staphylococcus aureus
atgacaattccagagaaaccacaaggcgtgatttggactgacgcgcaatggcaaagtatttacgmaactggacaagatgtacttgttgcagccgcggcaggttcaggtaaaacagctgtactagttgagcgtattatccaaaagattttacgtgatggcattgatgtcgatcgacttttagtcgtaacgttyacaaacttaagygcacgtgaaatgaagcatcgtgtagaccaacgtattcaagaggcatcgattgctgatcctgcaaatgcacacttgaaaaaccaacgcatcaaaattcatcaagcacaaatatctacactycatagtttttgcttgaaattaattcaacagcattatgatgtattaaatattgacccgaactttagaacaagcagtgaagctgaaaatattttattattagaacaaacgatagatgaggtcatagaacaacattacgatatccttgatcctgcttttattgaattaacagarcaattgtcttcagatagaagtgatgatcagtttcgaatgattattaaacaattgtatttctttagcgttgcaaatccaaatcctacaaattggttggatcaattggtgacaccatacgaagaagaagcacaacaagcgcaacttattcaactactaacagacttatctaaagtatttatcacagctgcytatgatgctttaaataaggcgtatgatttgtttagtatgatggatrgcgtcgataaacatttagctgttatagaagatgaacgacgtttaatggggcgtgttttagaaggtggytttattgatataycttatttaactgrtcacgaatttggygcgcgtttgcctaatgtaacagcgaaaattaaagaagcaaatgaaatgatggtcgatgccttagaagatgctaaacttcagtataaaaaatataaatcattaattgataaagtgaarartgattacttttcaagagaagctgatgatttgaaagctgatatgcaacaattggcgccacgagtaaagtaccttgcgcgtattgtgaaagatgttatgtcagaattcaatcgaaaaaagcgtagcaaaaatattytggatttttctgattatgaacattttgcattacaaattttaacwaatgaggatggttcgccttcagaaattgccgaatcataccgtcaacayttycawgaaatattggtcgatgagtatcaagatacgaaccgrgttcaagagaaaatactatcttgcatcaaaacgggtgatgaacataatggtaatttatttatggttggagatgttaagcartccatttataaatttagacaagctgatccaagtttatttattgaaaagtatcaacgstttactwtagatggagatggcactggrcgtcgaattgatttgtcgcaaaacttccgttctcgwaaagaagtactgtcaacgacwaactatatattcaaacatatgatggatgaacaagtcggtgaagtaaratatgatgaagcrgcacagttgtattatggtgcaccatatgatgaatcggaccatccagtaaacttaaaagtscttgttgaagcggatcaagaacatagtgatttaactggtagtgaacaagaagcgcattttatagtagaacaagttaaagatatcttagaacatcaaaaagtttwtgatatgaaaacaggaagctatagaagtgcgacatacaargatatcgttattctagaacgcagctttggacaagctcgcaatttacaacaagcctttaaaaatgaagatattccattccatgtkaatagtcgtgaaggwtactttgaacaaacagaagtccgyttagtattatcatttttaagagcgatagataatccattacaagatatttatttagttgggttaatgcgytccgttatwtatcagttcaaagaagaygaattagctcaaattagaatattgagtccraatgatgactacttctatcaatcgattgtaaattacattaatgacgaagcagcagatgcwattttagttgataaattaaaaatgtttttatcagatattcaaagttaccaacaatatagtaaagatcatccggtgtatcagttaattgataaattttataatgatcattatgttattcaatactttagtggacttattggtggacgtggacgacgtgcaaayctttatggtttatttaataaagctatcgagtttgagaattcaagttttagaggtttatatcaatttattcgttttatcgatgaattgattgaaagaggcaaagattttggtgaggaaaatgtagttggtccaaacgataatgtygttagaatgatgacaattcatagtagtaaaggtctagagtttccatttgtcatttattctggattgtcaaaagattttaataaacgtgatttgaaacaaccagttattttaaatcagcaatttggtctcggaatggattattttgatgtggataaagaaatggcatttccatctttagcttcggttgcatataragctgttgccgaaaaaraacttgtgtcagaagaaatgcgattagtctatgtagcattaacaagagcgaaagaacaactttatttaattggtagagtgaaaaatgataaatcrttactagaactagagcaattgtctatttctggtgagcacattgctgtcaatgaacgattaacttcaccaaatccgttccatcttatttatagtattttatctaaacatcaatctgcgtcaattccagatgatttaaaatttgaaaaagatatagcacaarttgaagatagtagtcgtccgaatgtaaatatttcaattrtrtactttgaagatgtgtctacagaaaccattttagataatratgaatatcgttcggttaatcaattagaaactatgcaaaatggtaatgargatgttaaagcacaaattaaacaccaacttgattatcratatccatatgtaaatgatactaaaaagccmtcaaaacaatctgtttctgaattgaaaagrcaatatgaaacwgaagaaagtggcacaagttacgaacgagtaagrcaatatcgtatcggtttttcaacgtatgaacgacctaaatttctaagtgaacaaggtaaacgaaaagcgaatgaaattggtacgttaatgcatacagtgatgcaacatttaccattcaaaaaagaacgcatatctgaagttgagttacatcagtatatcgatggattaatcgataaacatattatcgaagcagatrcgaaaaaagatatccgtatggatgaaataatgacatttatcaatagtgagttatattcgattattgctgaagcagagcaagtttatcgtgaattaccgtttgtagttaaccaagcattagttgaccaattgccacaaggagacgaagacgtctcaattattcaaggtatgattgacttaatctttgttaaagatggtgtgcattattttgtagactataaaaccgatgcatttaatcgtcgccgtgggatgacagatgaagaaattggtacacaattaaaaaataaatataagatacagatgaaatattatcaaaatacgcttcaaacgatwcttaataaagaagttaaaggttatttatacttcttcaaatttggtacattgcaactrtag

SEQ ID NO: 2380 - DNA, 627 bp, Staphylococcus aureus
atgcaattacaaaccatgagtaattccatatttataaaaaatttgatttttgcaataaatgaatcgttagaatattctgaaaccaactctgtcatggaagttacttttcaaaaggctataggcttcactcaatacaattttgaaggagaaaaattaaaattaaaggatgacttgaaggagttaataagccttgttggacgagaagaagctgtattgatattcgtaaaccgattgaatgaaggtctatattgtattttaaatcaactaatagaatgggataatctaaattatcaattcgccatgtataaagaggctatgcataattacttatttaatacaattgagaaattaaatgatgacacacttttcctcctgcatcaagatggtttaattacattgcctgagcataagtacaaaactgtagccgtaaaaagtacattcggtagtagagattttacttttagatttaaatttccagaagaatcagatacagttaatacacaccaaatgctaaataaagcaatatcaattacaggtagtctagcaaatacacatttggaacaaccccaaaaatacaaggcacattttaaaaaaataccaatcgaaacaaaaaatttgacatcttag

SEQ ID NO: 2381 - DNA, 333 bp, Staphylococcus aureus
attttcaataaatattatacaaaagaagaagttgtaatttctactttgcaaacccttgctagtaaatttgaagatttagatatagacagtcacgacaatttgaatagtttcaaagcacgcatcggcagtactatcgataagttagctaaagctccaccccttaataagtatacatttactgaattaatgattatcatatctataatttacttcaaaaacctgtatattggaagattagataaaccttcatcgaggaagaaaaaaggaggtaatttaatttttgagatagtttataataatcaaatgcttaattcctcaaccgccaaactataa

SEQ ID NO: 2382 - DNA, 480 bp, Staphylococcus aureus
attaacagcgacttttcaagtcttcttctagacattattgaattgattcaatcacatataataatcgtaaataagaatgatcacagtcttatttatctaaatgagatgtcagagtcactcttattatacgtatactcagtcttaatcaatgttacctctattaataagttatttttatacgaagaaaccaatactgtttttagatgtataacttcaagcataaacgaaaatatggattgcataataaatcattctcctaatgaattactgatgtttttgtatgacttagaacaaaggttcaacaattttattaatcgattgaacttaaaagaaccaaaaaacaggcatacctaccctacccttaattcagtttacattgaattaaaccctttgcaattatcagaagacacttatttttcttcaataaacgttgctgaattaataaacagacaatccattcgtaaaaatttgtttaaataa

SEQ ID NO: 2383 - DNA, 903 bp, Staphylococcus aureus
ctgttaatggaaaaaattctatatcaaactgacgaattcaagctcaaaccttcgggatggtacaaaaccatccctcctaaaaaagatgggggtacggagtttgaaataatgttatctggaccgattgctttcacagatcgttttatagaccccgcgactcgtaaagaaaaagtatttctttcggatttgaataatatagagcttgtcgaaaaggcttcaatccttactgctttgcaattaccctccttaattgaatatggatttaccattaatgaaaagcacattagagatttagggttcgtactgcaacaaatgagaagcaccacacctttatcaacaatatactcaggtgtaggaatgcttcatacattacttggaccattaatttcattagaccagccttatttttctaatgagattactaatagcacttctattatatgtgataacaagtacgatttaataccaaaaggcaatttatcagaatggttacaaatgtataaagaagaagtccatgggaacttatctttagaactagatgtgttgtttggcgtatcttcattagtcactgctttccttaagtatcataataacgtcgagttttcaggaactattttctctttcactggccaatcatcaacaggaaaatcgacagccgctatgttagccgcatcggtagctggcaacccaacaaaaggtactgaaaacctattccggagttggaatgcaacaagaaatgcactagaaggatatcttagcggaaattatggtgtacccatagtattagatgaattatcagcggcaacatttcatgatacaacaggtcttctatattcatttgcagagggacaaggacgtcaaagagcaaatataaatggtgatgtcaaaacacctaaaaactag

SEQ ID NO: 2384 - DNA, 2634 bp, Staphylococcus aureus
atttatttaggctatagcccaggggtaggtaaaacgtatgaaatgttatcaaatggtattgatcagtatcaagaaggtgcagatattaaaattggttatatcgaaccccatcaacgccctgaaaccaatgcactggttcaacaattgcctgaaatttcgacctccagccgtaaatttggcagccacacctttcactatatagatgtctctaaaatcatagaagctaatccagatgtggtcttaattgatgaactagcacatacaaacatttcaaaagagcgccatttaaaacgttataaggatatagaagaaattctatcgcatggtatcgatgtctggacaacactcaacatccaacatatcgagagtctaagcggacaaattgcgttaatgacaggtattcaagttacagaacgtgtgcccgaccaattcattacgtcagcagatgcctttgaagttgtggatatttcaccaaatatgttgattcagcgccttaaagcaggaaaagtatataaaaaagaacgcttagaaacagccttttctaatttctttacgtatgaaaatctgacagagctgcgtgaacttacactcagaactgtcgcagatattatgagtcaaaaaggacaacaatataaaactaaacataccgacattacaccgcatattgcggtagctatcagcggcagtatttataacgaacgggtcatacgagaagcaagacgtgctgcctataaagaacatgctaaattcacagctgtgtatattgatgtctttgagacaccgtcagaaagcagaaaacaagatcattatgtccataaaaatctaatgctcgccaaagcgttaggtgcagaaatcaaagtgttgtatgcacaagatattgcgaaagcgttaaccgattggtgtgatctcgcttttgtgacgaagctagtccttggacagtcagaacagccacgttggaaagattactttaaacagtcactcattgaacaaattaatcacgtaccacaccatttcaagttagaaattgtaccgattcattatattcattcagacaaacctacaaatacacctaagcaagctcaaaaatcctctcgtttaactgtagagattatgaagatgcttgtaattcaaacgatctgtgtcttgctcggtatatgggtttacaacttagataaaagcgaatccagtgccattatcttgctgatgttctttatcggtattatcgtgctttctatttggacccaatcctatttaatcggattctttgcgtctatcttaaatgtgtttgtttttaattatttctttacggtgccaagattcactttagaaatgtatcgctttgaatatccgattacgtttgcgaccagtatttttgctagtatctttacgagtgccatcttaaagaatttaaaacatcagcattccttaacagaacggcagttatatcggaccaatattatgctgcaatttaaccagtccattaaagaatcttattcaattgaacgcttattaaatattgctggtgatcagattcatcagctactcaatcaggatgtcacggtattcttaattcaaagtaagaaagtcgctgcttccaactcatttggaaacagaagcatttcaagctcagataagacacatgatgctgagacattgagctgggtcattgaaaatgaaagccgtgccggtaaattaaccgatacctttcctggcagtaaatttttgtgtattcccattggcacaaatccagtcaaaggtgtgatttctatccgcttcaccgacgaaacttacatcgacacctatgacaattcaatattagactctatgttgaacgatattaccctggcaatagagaatgtggatctattaaaacaaaccagacaatccatattgaaagctgaacgagaagccacacgttcaaacttcttgcattcaatttcacatgatattagaacaccactgacttccattatgggcaacttagatatgctgaaataccataacgagcatttaaacgatcaacaacaagcagaactcttaactgcttcttatggcgaagcacaatatctgcataccttagtcacaaatattttatctttgactaagttagaaagctctgacattcaaatacaacgcaccccttatttagtagaagaacttctagaagaatttgaagaaggcctcatacgcagacaccaagcaaatcatgtcattattgaaaatgaggatgacgcttcactcattaatatcgacagtaaattaatactgcaagtgctattcaaccttatcgataatgctttaaagcatgcagaatcacattctgaaataaaactgcacgttcaacatgaaacaaacaaaataaaattcgaaatgatagattgcggaaaaggtattccagaagaagaacgtcaattgatttttaatccctattattcaggagacaactttaaagacaataaaaaagatagtttgggattagggctctatttagtacaactcatcttgaaacaacacaacagtgaattagaatatcaaccgaatacaccacaaggcagtattttttatttttatttgactgttaatccaattgaaatggagggagccatggatgaaaacaacattattggtcgttga

SEQ ID NO: 2385 - DNA, 585 bp, Staphylococcus aureus
atgacacaaggatggtggttcccagtcatggcatctgcattcttaatctttaccattgtcatcatgtttattgctggaacaggacaatatggtttaggcgaaaaaggcactgtagatgcattcgttaatggcgcttcaagtttagtaggtgtatctttaatcattggtttagctcgtggaatcaacttagtattgaataaaggaatgatttctgacacaatcttgcacttttcatcatctatcgtgcaacatatgagtgggcctttatttatcattgttctgctctttatctttttctgtttaggatttatcgtaccatcatcatcaggattagcagtattatctatgcctatctttgcgccattagctgatacagtaggtataccaagatttgttattgttacaacatatcaattcggtcagtatgcaatgttgttcttagcgcctactggacttgtaatggcaacacttcaaatgttaaacgtgcgctactcacactggttacgtttcgtatggcctgttgtcgcgtttgttttaatatttggtggaggcttactcattacacaagttttaatatattcttaa

SEQ ID NO: 2386 - DNA, 903 bp, Staphylococcus aureus
atgaaattcttatcattcaagtataatgacaaaacttcatatggcgttaaagtaaaacgcgaagatgctgtatgggatttaacacaagtatttgctgactttgcagaaggagatttccatcctaaaacattgttagctggtttacaacaaaatcatactttagattttcaagaacaagtacgtaaagcagttgtagcagcagaagatagcggcaaagctgaagactataaaatttcatttaatgacattgaattyttaccaccagtaacacctccgaataatgtgattgcttttggtagaaattacaaagatcatgcgaacgaattaaatcatgaagtrgaaarattatatgtatttacaaaagcagcgtcatctttaacaggagataatgcaamaattccaaatcataaagatattactgatcaattagattatgaaggtgaattaggtattgttattggtaagtctggtgaaaagattccaaaagcattagctttagattatgtttacggctatacaattattaacgatatcactgatcgcaaagcacaaagtgaacaagatcaagcatttttatcaaaaagtttaactggcggttgcccaatgggtccttatatcgttactaaagacgaactaccattacctgaaaatgtaaatattgttacaaaagttaacaaygaaattagacaagatggyaacactggcgaaatgattcttaaaattgatgaattaatagaagaaatttcaaaatatgttgcactacatccgggagatattattgcaactggtacaccagcaggcgttggtgcaggtatgcaaccaccwaaattyttacaaccaggtgatgaagttaaagtgactattgataatattggaacgctgacaacttatatcgctaaataa

SEQ ID NO: 2387 - DNA, 1350 bp, Staphylococcus aureus
atgaaacaagtcataggctatttacgtcaaagtacgatgaaacaacaatctcttgcagcacagaaacargctatcgaagcaatarccgaaaaacatcatattcaacatatcaacttttatagcgacaaacaatcaggacgcaaagataatcgtagtgggtatcgacaaatracrcaattaattcaacaaggrcartgtgacatattatgytgttatcgtcttaatagrttrcatcgtaatytgaaaaatgcattaaaactcatcaaattatgtcaaacataycrtgttcatatcttaagygtrcaygatggttaytttgatatggatcaagctttcgaccgattcaagcttaatatttttatcagcttggccgaacttgaatcagataacattggagaacaagtcagaaatgggcttcaagaaaaagcaaagcaaggtcgattgattacaacccatgcgccctttggttacgaatatcacaacggarcattcatcatcaatcaaaatgagtcaccaacggtaaaggctgtattcaattattacattaaaggtcatggttataagaaaattgcacagttattagaagaagataacacgtatatcaatcgacaaccctatcaagttcgtaacattatyatcaatcctaattattgtggtcgtgtcaacaatcaatatggycaattcgacaatatgtttccttctattgtttccacaagtatatatgagcaagcgcagagacttcgatygcaaaaacaaaycaaacagacaycttcggataaycaactmaaacaaaaaatcaaatgcccatgttgtaatrcaacacttacraatatgaccrttagaaaaaagaatcatacattacgttactacgtctgtcctaaaaacatgaatgcttcwcgctttgtctgtgattttaaaggcatcaatgcacaaacacttgaagataaagtattagaagtgtgcmragacttttatcaaaatcaacgcatctacacaaaaattaaargtgcgattgacaaacgcatcaaaagacaaagaaacatagaaaaacatcacacattgactcaaraacaactgatagaaaagttggcacaaggcatcatygatgcagaaacgttcagagaacaaacgcaatcattacgtcaacaaccgcaacgcactacatctatcaatggrcatcaaatacaamacaccattcaaaatattattcaaaaacgtttcacgttaaacatrytgtayccctayattgawrmmattcwyatyacraaarrtaaaamwctwatrggwatctatttcaaaaatgaaccmytmaayatcgtcaatcaaacmaygcaatcrtcrattgcataa

SEQ ID NO: 2388 - DNA, 1629 bp, Staphylococcus aureus
atgcaacaacttaaaacaaaacgtgtcggtatctatgtacgtgtwtcaacagaaatgcaaagcacagaaggttatagtatcgacggacaaatcaatcaaatcaaagaatactgtgacttccatcattttgaagttaaagatatatacgctgaccgtggtatttcaggtaaatctatgaatcgacctgagctccaacgtatattgaaggatgcgaaagawggctatatcgactgtgttatggtctacaaaacaaaccgattagctcgtaatacatctgatcttctcaaaattgtcgaagatttacacaaacaaaatgtcgaatttttcagtttatcagagcgtatggaagtcaatacttcatcgggtaagctcatgttacaaatacttgcgagtttctcagaattcgaacgtaataacattgtcgagaatgtatttatgggtcaaacgagacgtgcccaagaaggctattatcaaggcaatttgccgctgggctatgacaaaatacctaatagtaaacatgaactgatgattaatcaacatgaagctaatattgtgaaatatatattcgagtcctatgccaaaggccatggctatcgtaaaatagccaatgcattaaatcacaaaggctatgtcactaaaaagggtaaaccttttagtattagttctatcacatatatattagctaacccattctatatcggcaaaattcaatttgcgaaatacaaagattggagtgaaaaacgtcgtaaagggcttaatgataaaccagtgatagctgaaggtaagcattcccccattattaatcaagatttatgggataaagtacaaatgcgtaaaaaacaagtcagtcaaaaaccccaagtccatggcaaaggaacgaatctgcttacaggcattattcactgtccccaatgtggcgcacctatggcagcaagcaataccacgaatacacttaaagacgggactaagaaacgtattcgttactattcatgtagtaattttcggaacaagggttccaaagtatgttcggcaaacagtgtaagagctgatgtgattgaagattatgtgatgaagcaaatacttgaaatagtcaaaagtgataaagtcattcaacgcgtagtaacacacgtcaatcaagaaaatcaagttgatggcgctgcacttcatcacgatattgcttataagcaacaacaatatgatgaagtacaaatcaaactaaataacttgattaaaaccatcgaggataatccggacttaacatcagtaatcagaccaagtattcaaaaatatgaaaagcaactcaatgacattacgaatcaaatcaaccaactcaaaaatcaacaaaatgaagataagcctttatttgatgccaaagaaatcagtaaactattacaacacatctttcatgatattaagcacatagaaaaatctcgactcaaagcattgtatctatcagtgattgatcgcattgatattaaaaaagatggtaatcataaaaaacaattctatgtcacactcaaacttaataacgaaatcataaaacaacttttcaataataaacaactcgacgaagtgcatctcagcacttcgtctttgtttttgccccaaacactatatcttactatttag

SEQ ID NO: 2389 - DNA, 351 bp, Staphylococcus aureus
atgaaaacgaccactcaagaactcaaacaatatataactcgtctattccaactatctaacawtgaaacatgggaatgcgaagcgttagaagaagcagcagaaaatattctaccggaacgttttattaatgattccccacttgcacatcttacacttgaaacttatacctactacaataatgaactacatgacctaagtatctatccatttcttatgtacgctaataaccaactcatcagcgttggttatctgaatcattttgacatggactttttatatctcacagatactaaaaatacgattatcgatgaacgtcatttactaagagaaggagggactcaccatgaataa

SEQ ID NO: 2390 - DNA, 390 bp, Staphylococcus aureus
atgttacatttacatatwttaagttgggtattagcratyattttatttatcgctacatacttaaayatttcaaaaaatcaaggyrgwwcrccatwtttcaaaccrttrcayatgrtkytacgmttatttatgctgttgacgttaatttcaggattttggatattaattcagtcatttatgaatggcggggcaaatcatatgttgcttacattgaaaatgctgtgtggtgtwgcagtagttggattgatggaagtgtcgattgctaaaagaaagagacatgaacaaagtcacamaatgttttggataacaatbgcattaattatcatcacaatggtattaggtgtcattctaccgttagggcctatatcaaaattattcggtattggctaa

SEQ ID NO: 2391 - DNA, 267 bp, Staphylococcus aureus
atggtaattgaccctgaattaggaattgatatcgttaatttrggtttagtatacaaagtgaatgttgatgatgaaggcgtatgtacagttgatatgactttaacatcaatgggatgtccaatgggacctcaaattattgatcaagttaaaacagtattagcagagattcctgaaatwcaggatactgaagtgaatatcgtatggagtccaccttggacaaaagatatgatgtcacgttacgctaagattgcacttggtgtgagctaa

SEQ ID NO: 2392 - DNA, 1815 bp, Staphylococcus aureus
atgaacaaaacaaagggttttacaaartataagaaaatgagatatatkccagggctcgatggtttgagggcaatcgctgttctaggaattattatttaccacttaaayaagcaatggttgacaggtggctttttaggtgtggatacattttttgtgatctctggttatttaattacaagcttattactcaaagagtatgatgacacaggtatcattaaattgaaaagcttttggatacgtcgtttaaaacgtttattaccagcagtcatagttttattaatggttgtagggacagcaaccttattattaaaatcagataatatcattagggttaaacatgatattattgctgcgatattttatgtatcaaactggtggtatatagcaaaagatgttaattattttgagcaattttcatttatgccattaaagcatttatggtctttagcaattgaagaacagttttacatatttttcccagttattttggttacattattgttaacaattaaaaagcgatacaaaataggatttattttttggggagtatcwataatttctttagggttaatgatgtttatctayagtattaatggggatcattcacgagtgtattttggtacagatactagattacagacattgttactgggtgttattttagcttttttatggccrccgtttaaattgaaaaatgatccacctaaagttgtaaaatatgttattgatagcataggtagtttatcatttatagtacttatattattatttttcattattaatgatgagacgaattggatatatgatggtggtttctatttaatatccatattaacgttatttattattgcyagtgtcgttcatccatctacatggatagcgaagatattttcaaatccagtgttagtatttatcgggaaaaggtcttatagtytatatttatggcattttgcagtaattagtttcgtacatagttactatgtagayggacagatacctgtatatgtgtactttatagatataagtttaacaattatatttgcagagctatcatatcgctttatagaaactccatttagaaaagaaggtattaaagctttaaattggcgaycttcttatataccacaatttataagaatggyaattgtagtaaccttgttaattccatttatgttgattttagtaggtgcattcaataaatatggtaaagacattatwggagaaaaagcgaatagctttgataccacwattgaagataattattyaatgcggatagcaccaattgataacatwcacattgatggcttagtaagtgagaagaaaaaggaatcttccgaygtatataataatattaaacctcttttaatcggtgattcagtaatggttgatatcggtgagtcatttaagtcatcagttcctaagtctagaattgatggaaaagtagggcgtcaattgtatcaaaccttacctttagttaaagcgaattattcacaatataaaaaatcatctgatcaagtcgtattagaattaggtacaaatggcgactttactgtcaaacagctcgacgatttacttaatcaatttggaaaagccaagatttatttagttaatacacgtgttccaagaatttatgaggcaaatgtaaatcgattattagctgacgcggcgaaacgaaagtccaatgtcacattaattgattggwataagcgatcacaaggacatagtgaatattttgcaccagacggtgtacatttagagtacaaaggagtcctagctttaaaagatgaaatattaaaagcacttaaaaagaaataa

SEQ ID NO: 2393 - DNA, 2610 bp, Staphylococcus aureus
atggatataaataaaatgacatatgctgttcaaagtgctttacaacaagcagttgaactgagtcagcaacataaattacaaaatatagaaattgaggcaattttaagcgctgccttaaatgaaagtgaaagcttatataaaagtattttagaacgagyaaatattgaggtagatcaattaaacaaagcttatgaagacaaactaaacacgtatgcatctgtagaaggtgacaatatacaatatggtcaatatattagccaacaagcaaaccaattgataactaaggctgaatcatacatgaaagaatatgaagatgaatatatttcaatggagcatattttacgttcggcaatggacattgatcaaacaacaaaacattatataaataataaagtagaagttatcaaagaaattattaaaaaagtaagagggggaaatcacgtgacatcacaaaatccagaagttaattacgaagcattagctaaatatggccgcgacttagtagaagaagttagacaaggtaaaatggatcctgttataggaagagatgaagaaattcgaaatacgattcgtattttaagtcgtaaaactaaaaacaaccctgtgctcattggtgaaccaggtgttggtaaaactgcaattgttgaaggattagcgcarcgtatagttaagaaagatgtgccagaatcattattagataaaactgtttttgagttagatttaagcgcattagtagcgggcgctaaatatcgtggtgaatttgaagagagattaaaagcagtcctaaaagaagttaaagagtctgatggtagaattatattatttattgatgaaatccatatgcttgtaggtgctggtaaaacagatggtgccatggatgcaggcaacatgytaaaaccaatgttagcacgaggagagttacattgtattggtgcaacaactttaaatgaatatcgagaatatattgaaaaagattcggcattagagcgtcgtttccaaaaagtagcagttagtgagcctgatgttgaagatacaatttcaattttacgtggtttaaaagaacgatatgaagtrtatcatggtgtgcgtattcaagatagagccttagttgctgccgctgaattgtctgatcgttacatcactgatcgttttttaccagataaagcgattgatttagttgaccaagcatgtgcaacaattcgtacggaaatgggatcaaatccaactgaattggatcaagttaatagacgtgtcatgcaattagaaattgaagaaagcgcacttaaaaatgaatctgacaatgcgagcaaacagagattacaagaactacaagaagagcttgccaatgaaaaagagaaacaagcagcacttcaatctcgtgtagaatcagaaaaagaaaaaatagcaaatttacaagaaaaacgtgcgcaactagatgaaagtagacaagcgttggaagatgcacaaacaaataacaatttagaaaaagcwgctgaactacaatatggaacaattcctcaattggaaaaagarcttagagaattagaggataatttccaagatgagcaaggtgaagatwcagatcgaatgattcgtgaagttgtaacagacgaagaaattggygatattgtcagccaatggacaggcataccagtttcaaaattagttgaaacagaacgtgaaaaattacttcacttaagtgayatcttgcataaacgtgttgtaggtcaagataaagcggttgacctggtttcagatgcagtagttagagcwagagcaggtattaaagatccaaacagacctattggtagtttcttattcctaggtccaactggrgtaggtaaaactgaattagctaaatcattagctgcatcattatttgattctgaaaaacatatgattcgtattgatatgagtgaatatatggaaaaacatgcagtatcaagattgataggggcacctccaggatatattggacatgatgaagggggtcaattaactgaagcggttcgtcgtaatccatactcagttatyttattagatgaggttgaaaaagcgcatactgacgtctttaatgtattattgcaaattttagatgaaggccgtttaactgattctaaaggacgtagcgttgattttaaaaatactattattattatgacaagtaatattggatctcaagttttaytagaaaacgtaaaagagactggtgaaattacagaatcaacagaaaaagctgttatgacaartttaaatgcatatttcaaaccagaaattttgaatcgtatggatgayatcgtattatttaaaccwytatctattgatgacatgagtatgattgtagayaaaatmttaacgcaattaaatataagattaytagaacarcgaatctcaattgaagtttctgatgatgctaaagcttggctaggtcaagargcttatgaacctcaatacggtgcaagaccattaaaacgttttgtacaacgccaaattgaaacaccattagcacgtatgatgattaaagagggattcccagaaggtacaackattaaagttaatttaaattcagacaataacttaacgtttaatgttgaaaaaattcatgaataa

SEQ ID NO: 2394 - DNA, 708 bp, Staphylococcus aureus
atgaatraaaatgtaatgrttaaaggtttaacwgctttaactattttaacatctctyggtttygctgaraatatttctratcagcctcattcaattgccaargcagaaaagaatrtyaaagaarttacygatgcaactaaggmaccatacaattcagtggtwgcatttgygggtggtactggygtrgttgttggtaaraatacaatcgtaactaacaaacatatcgctaaaagtaatgatattttyaaaaayagagtakcagcacatyattcgagtaaaggtaaaggcggwggaaactacgaygttaaagayattgtagaatatccyggaaaagaagaccttgcgatagttcatgttcatgaaacaagtacagaaggtttgaattttaayaagaaygttagttatacaaaatttgcwgamggmgcaaaarygaaagayagaatttctgttattggttatccaaagggtgcacaaacaaaatataaaatgtttgaatcgacaggaacgattaaycatatcartggaacrtttatrgaatttgatgcgtatgcacaaccaggtaattcaggatctcctgtattgaattctaaamatgaactgrttggtattytatatgcaggtagtggaaaagatgaatctgaaaagaatttcggtgtttatttcacaccacaattaaaagaatttattcaaaataatattgaaaaataa

SEQ ID NO: 2395 - DNA, 405 bp, Staphylococcus aureus
atgagctcaattataggaaaaatagcaatttggataggcatcgtagctcaaatatattttagtgtcgtttttgttaggatgatatctattaatattgctggaggatctgattacgaaacaatttttttattaggattaatattggctcttttcactgttttaccaaccatctttactgcgatttatatggaaagttactctgtaatcggaggtgcactttttattgtttatgctattattgcactgtgtttatataatttcytttcgtcaattttatggctgattggtggtattttgctgatttggaataaatactcaaaagatgaatcgacagacgaaaatgaaaaagttgatattgaaagtacagagaatcaatttgaatctaaagataaaatcactaaagaa

SEQ ID NO: 2396 - DNA, 123 bp, Staphylococcus aureus
atggcaacgatgtacgaagtaagaagtgacatcgttgcttttatttttaatgttacatttgaagcattaagttcatcatrcactgtagtgagcccgcaaatcgcctctgctagacaatcatct

SEQ ID NO: 2397 - DNA, 1146 bp, Staphylococcus aureus
atgattcgaattcaagataatacaataagggatggtatgcaacaaagtaatgttcgaaaaagtctaattataaaaaaagaagtattgaaacaaattaacaagttaaatataaattctgttgaagtaggcatgtgtacaactatcgaggatgaatttaatattcatcaattcagagacattwtaagtcctgaaaaagaattagtagtattgactaggcttaatgaaaaagaaataaaaaaaatagtcaaattraaaattcataatttagtggtaaaaatactattgccaatatctgacttgcatataaaagaaaagcttaatttttcaaataaatattatattcagaaaatcaaagactgcttggatatattaaagaaagataaaaaaggagtagatatttgttttgaagatgsaacaaggacttctagagaaaaattgaaagaatacatggaaattatttcaaaatatcaagttagaacagttacatttgcggacactgtaggatgttcgacaccattagaatacggagatatttttaattactttgtaaaaaaatattctaacataattttttctgctcattgtcataacgatctagggttggctactgcaaatacattagctgcaattttaaatggtgcraagcaaatagaaactacatttttgggaattggtgagagagcgggtaatgctcctattgaggaaataattactattttgacaaaaaaacaaatagaaagtacggaattcactttacccgacgtatataaaactagtattaatatttctaaaattctcgattttcaaatatcagaaaacaaacctataattggtgaaaatatatttaaacatgaatcaggaattcatcaagatggtactaaaaaaaatataaatatgtatcaatatttagttcctagtgatttaggattgaaaaattcacaagttgttcagtttccaataagtaatatttctagtaagaaaatcttgcacaataaatttaaatcaatagttaacactgaagaaattgatgaaaatatttctttytataaacttgtgaacaagttttcacctgaagtagcacctgaagatacagtggatttacttcagataataaaaaggaggagtaaagatggaaattttaaatga

SEQ ID NO: 2398 - DNA, 699 bp, Staphylococcus aureus
atgataattaacgaattaaagtcatgtaagttgaaattttctaagcaagcgctcacatttgtacccattattgtaaccatattgtttatattatttataaattggtatttaaacgtaaatttatggaatggtcgacaaataagtttgtttacagcgagttttaatgcaattacatcgctattaatttctataaacgtctatcaagttatcaattttgaagaaaatattggtcactttaatcatattttaggaaaagctaataggctaaattggttaaatgcatcaatgatttttacttatactattacagccatatgtattctattagcatcaattaatttattgtggcattcacatgatatgaaaataacacttatgtttataggcgtatcattgtttttcaatgtaattatattastgmtamtktttakwtwtagtattttcattaaagatgtaatggctattgttgtcggagttttaatgtttatttttaacgtttattttggattagaagtgcttggagatcattcgtggttctatttaccaatcacatatgctacrygttacgtttatatgtttatcgaagggagtataccagttacattaacattggcratctatattattatcacgttgctattagcagttttactctttaaaggatttaataaatggagcggtagaacaattaaagattaa

SEQ ID NO: 2399 - DNA, 180 bp, Staphylococcus aureus
atgtgygtaaartttactgacgcagaaatagcttatataaaagaatcagttgaaaattatagtagtgaatttgatatttatgacgatgaacaagaacttaaattaaaaatttatgaacaaattatgttaaaaatmrartcygaatacaaggatayctatttattccgtcttattaattga

SEQ ID NO: 2400 - DNA, 783 bp, Staphylococcus aureus
gtgagcaaaatgaaaaaaacagcatttayaytacttttattcattgccctaacgtkgacaacaagtccacttgtaaatggtagcgagaaaagcgaagaaataaatgaaaaagatttgcgaaaaaagtctgaattgcagggarcagctttaggcaatcttaaacaaatctattattacaatgaaaaagctaaaactgaaaataaagagagtcacgatcaatttttacagcatactatattgtttaaaggcttttttacaratcattcrtggtataacgatttattagtagattttgattcaaaggatattgttgataaatataaagggaaaaaagtagacttrtatggtgcttattatggttatcaatgtgcgggtggtacaccaaacaaaacagcttgyatgtatggtggtgtaacgttacatgataataatcgattgaccgaagagaaaaaagtgccratcaatttatggctagacggtaaacaaaatacagtacctttggaaacggttaaaacgaataagaaaaatgtaactgttcaggagttggatcttcaagcaagacgttatttacaggaaaaatataatttatataactctgatgtttttgatgggaaggttcagaggggattaatcgtgtttcatacttctacagaaccttcggttaattacgatttatttggtgctcaaggacagwattcaaatacactattaagaatatatagagataataaaacgattaactctgaaaacatgcatattgatatatatttatatacaagttaa

SEQ ID NO: 2401 - DNA, 1920 bp, Staphylococcus aureus
atgaaaattattaatattggagttttagctcatgttgatgcaggaaaaactaccttaacagaaagcttattatataacagtggagcgattacagaattaggaagcgtggacaaaggtacaacgaggacggataatacgcttttagaacgtcagagaggaattacaattcagacaggaataacctcttttcagtgggaaaatacgaaggtgaacatcatagacacgccaggacatatggatttcttagcagaagtatatcgttcattatcagttttagatggggcaattctactgatttctgcaaaagatkkcgtacaagcacaaactcgtatattatttcatgcacttaggaaaatggggattcccacaatcttttttatcaataagattgaccaaaatggaattgatttatcaacggtttatcaggatattaaagagaaactttctgccgaaattgtaatcaaacagaaggtagaactgtatcctaatatgtgtgtgacgaactttaccgaatctgaacaatgggatacggtaatagagggaaacgatgaccttttagagaaatatatgtccggtaaatcattagaagcattggaactcgaacaagaggaaagcataagatttcagaattgttctctgttccctctttatcatggaagtgcaaaaagtaatatagggattgataaccttatagaagttattactaataaattttattcatcaacacatcgaggtccgtctgaactttgcggaaatgttttcaaaattgaatatacaaaaaaaagacaacgtcttgcatatatacgcctttatagtggagtactacatttacgagattcggttagagtatcagaaaaagaaaaaataaaagttacagaaatgtatacttcaataaatggtgaattatgtaagattgatagagcttattctggagaaattgttattttgcaaaatgagtttttgaagttaaatagtgttcttggagatacaaaactattgccacagagaaaaaagattgaaaatccgcaccctctactacaaacaactgttgaaccgagtaaacctgaacagagagaaatgttgcttgatgcccttttggaaatctcagatagtgatccgcttctacgatattacgtggattctacgacacatgaaattatactttctttcttagggaaagtacaaatggaagtgattagtgcactgttgcaagaaaagtatcatgtggagatagaactaaaagagcctacagtcatttatatggagagaccgttaaaaaatgcagaatataccattcacatcgaagtgccgccaaatcctttctgggcttccattggtttatctgtatcaccgcttccgttgggaagtggaatgcagtatgagagctcggtttctcttggatacttaaatcaatcatttcaaaatgcagttatggaagggatacgctatggttgcgaacaaggattatatggttggaatgtgacggattgtaaaatctgttttaagtacggtttatactatagccctgttagtactccagcagattttcggatgcttactcctattgtactggagcaagcctttagaaaagctggaacagaattgttagagccatatcttagttttaaagtttatgcaccacaggaatatctttcacgggcatataacgatgctcccaaatattgtgcaaatatcgtaaatactcaactgaaaaataatgaggtcattattattggagaaattcctgctcgatgtattcaagattatcgcaatgatttaactttttttacaaatgggcttagtgtttgtttagcagagctaaaaggatatcaggttaccactggcgaacctgtttgccagacccgtcgtctaaatagtcggatagataaagtaagatatatgttcaataaaataacttag

SEQ ID NO: 2402 - DNA, 642 bp, Staphylococcus aureus
atggaaattttaaatgattctgtaaaaagttttgaaaaactttatttacaattacaagatggttttccagtgattgttcctactgatactaattataatttatgtagtttaccwaacaaygatctttgtatcgataaaatatttgaatataaaaagmgatcgaaagataagccattatcattatttattgataagccagaggattggaaattgtatggagataatcaaaatacggaaatagttgataaactagttgaaatattttggcctggaccattaaatattattttaaaaaataaaacaagctataattatatgctcaataattcagatagtatagctataggatgtgtrcaaaataaaacgatgagaagrtttatttcatatattaattcacctatagcaattacttcagcaaatatmtctggaactgccratgatattttaataactgaaaatgaagcrattaagcacatgggygaaaatgtaagatatatgctaagaagtcaaaataaaactaactataaaacrtctagtacgattattaaagtgacagataataaaattgaattattaagagaaggagatataaagtttgaagaaataaaagaaagactaggtacaggtattatttatgaataa

SEQ ID NO: 2403 - DNA, 759 bp, Staphylococcus aureus
atgatacatttaaagatagaaggtatcaaatttaaaaattctttcagtatgtatgttttattaataagtccgctggtatttctttgttttgctattttcacagtcttattcgccaaaagtaatacgggaacagcgaatagtgtgtcaccatatataactttactatttaatatttggccaattgctttcatcccgattgtattatgtatggcttgtaattcgttatttaaaattgaaatgagaaataaatcatttaattattacttaagtaataattggkcgattacaaaagaaataagagcaaagattttcattttatcaatagcatttttggtacattgctttttagtatttattattgcttatataggtgacctaattattaatccacatccggttaatgctatgttgttattggtgacaatattgttgatgtatgtagtatctctaccattgataccgctcaactttttattaactcgatactttggtgtgttcgtatcaatattaataaacttagtattatcagtcatttgtgtcttgtttttaacattgaagagtttattttgggtgttgccgtgggggataatgcagagaatcccgcttattacgcttggtatactacctaatggtttagttgtaaaccataattcaaaatactttaatgatctcaatgccttatatatttcgattattgttagcatcattattttcgcgatagtaacatttttaaataataagaaaagttggcgattaaaa

SEQ ID NO: 2404 - DNA, 777 bp, Staphylococcus aureus
atgaaaaaatttaacattcttattgcattactcttttttactagtttggtaatatctcctttaaacgttaaagccaatgaaaacattgattcagtaaaagagaaagaattgcataaaaaatctgaattaagtagtaccgcgctaaataatatgaaacattcttatgcagataaaaatccaataataggagaaaataaaagtacaggagatcaatttttagaaaatactttgctttacaaaaaattttttactgaccttatcaattttgaagatttattaataaacttcaattcaaaagaaatggctcaacatttcaaatctaaaaatgtagatgtttaccctataagatatagcattaattgttatggtggtgaaatagataggactgcttgtacatatggaggtgtcactccacacgaaggtaataaattaaaagaacgaaaaaaaataccaatcaatttgtggataaatggtgtacaaaaagaagtttctttagataaagttcaaacagataaaaaaaatgttaccgtacaagaattagatgcacaagcaaggcgctatttgcaaaaggatttaaaattgtataataatgatactctcggaggaaaaatacagcgcggaaaaatagagtttgattcttctgatgggtctaaagtctcttatgatttatttgatgttaagggtgattttcccgaaaaacaattacgaatatacagtgataataaaacattatccacagagcaccttcatattgacatctatttatatgaaaagtag

SEQ ID NO: 2405 - DNA, 579 bp, Staphylococcus aureus
ttgaaaataggttatgcaagagtttcaactggtttgcaaaatttgaatttacaggaagatcgattaaatcaatatggttgtgaaaaaatatttagcgatcacataagtggagcaaaaagtaaacgtcctggtttagatagagccattgaatttgcgaggtcaggagatacgattgttgtttggagactagatagactaggacgtaacatggcagatttaatcacattagttaatgaacttaataatcgaggcgtgagttttcatagtttagaagaaaatataacaatggataaatcaagttctacaggacaattgttatttcatttattcgcagcatttgcagagtttgaacgtaatttaattttagaacgttcttcagcaggtcgaattgcagctcgtgctagaggacgctatggaggtcgacccgaaaaattaaataaacaagatttgactttactcaaaacactttatgataatggaaccccaattaaaactattgcagagcaatggaaagtttcacgtacaacaatctatcgttatctcaataagttaaataaccaagaaaataaagataaataa

SEQ ID NO: 2406 - DNA, 1800 bp, Staphylococcus aureus
rtgtcaatwgtttattataaatatttgaaagaaggtgtyraaatggctaarttaytaataatgagyrtagtaagcttttgttttatatttctattgttaktmttttttaggtacatattaaaacgctattttaattatakkttaaattataaagtttggtatctaactstkcttgcwggattaattcctttyatyccwattaaattctctyttwtwaaatttaataatgtgaataatcaagcgcccacagttgaaagtaagtcacacgacttgaaccataacataawtaccaccaaacctrttcaagagttcrcaacagatatccataagtttaattgggattcaattgataatatcwgcacagttrtttggatagttttagttattattttaagttttaaatttttgaaakccttattatatcttaaatatttaaagaaacagtcactttatctaaacgaaaatgaaaaaaataaartagatacgatacttttcaaccatcaatataaaaaaaatattgtgattcgaaaagcagagrctattcaatctccaataactttttggtatgggaaatatattattttgattcctagttcatattttaaaagtgtaattgayaaaagactaaaatatataataytgcatgaatatgctcatgctaaaaatagagatactttacatttaattatctttaatatcttctctattattatgagttacaatccattagtacatattgtaaaaagaaagataattcatgacaatgaagtagaagccgatagatttgtccttaataatattaacaaaaatgaatttaaaacttatgcggaatctattatggactccgtattaaawryyycatttttyaayaaaaatatattaagccattcatttaatggtaaaaartcattactcaaaarwagattaattaatataaaagaagccratctgaaaaarcagtcmaaattaattctaatttttatttgtatttttacttttttkmtcatgrtaattcaaagccagtttttratggggcaatccwtaactgattataattataaaaagcccttacamarcgattaccaaattttagatraaagtaaaawttttggttcaaatagtggatctttcgtyatgtacagcatgaagaaagacaaatactatatttataaygaaaaagaaagtagaaaaagrtattctcctrattcaacttayaaaatttatttagcwmtgtttggacttgaccgwcatattataartgatraaaattcacgtatgtcatggaatcataarcattaycytttygakkcttggaataaggaacaagatttaaatacagcaatgcaaaattcagttaattggtacttcgaacgtattagyratcaaataccaaagaactatactgcgrctcaactcaagcaattaaattatggtaatraaaatttgggaagttataaaagctattggatggaagatagtttgaaaatatctaatcttgaacaagtaatagtttttaaaaatatgatggaacaaaataaccattttagtaaaaaagcaaagaatcaattatcttcttcattattgattaagaaaaatgaaaagtatgaactgtatgggaaaacaggtacaggtatagtaaacgggaagtataataatgggtggtttgtaggttacgtaattacaaatcatgataagtattattttgctacacatttatcagatggaaasccrtctgggaaaaatgctgaattaatmagtgaaaaaatattaaaagraatgggtgttttaaatggccaataa

SEQ ID NO: 2407 - DNA, 381 bp, Staphylococcus aureus
atggccaataagcaagttgaaatatctatggctgaatgggatgttatgaatataatatgggrtaaaaaatcagtatcagctaatgaaattgtagttgaaattcaaaaatataaagaagttagygataaaacgattagaacattaatcacaagactatataaaaaagagattataaaacgatacaaatcagaraatatttatttttactcatcaaatattaaagaagacgatattaaaatgaaaactgctaaaacctttcttaataaactgtatggaggggayatgaaaagtttagtgytgaattttgcgaaaaatgaagaattaaataacaaagaaattgaagaattgcgagayattttaaatgatattagtaaaaagtaa

SEQ ID NO: 2408 - DNA, 1125 bp, Staphylococcus aureus
atgaataagttaatacttgggatttatttrtaccgaattttttcacgagcrtacttttatttaccktttttattaatttactttttgrttcaaggttattccataatacaattagaaatattaatggcgtcttatggcattgcagcatttttattctctctatacaaagagaagtgttttaaaatttgtaacttaaaagattctaataaattagttgttagtgaaatattcaaaatcatcggtttattgttgttattatatcaaaatcaatatttaattttagtagtggcacaaatattattagggttaagttactcaatgatgrcgggtgttgatacmgcaataattaaaagaaatataacaaatgagaaatacgtacaaaataagtcaaatagctayatgttcctatcattattaatttcagggattataggtagttatctttatggaataaatattaaatggcctataataatgactggtatattttcaattctaacaattataattattcgmtgcacattagttgaaaatagggaattaaatttaataggagaaacaaagggaaagataaagaaatttctaccrgaagagaagttttggatattgcattattcttttttaagagcgttaatattaggattttttataggatttattccaattaatatatataatgatttaaaactgaataattyacaatttatttcagtattaacttgytacacagttatgggttwtktatcttcacgttatttaacyaaatacttgaaytataagtttgtgtcagaaatttgtttartaatatttttaataatatatacatatcaaagtttcatagcagttactatttctatgatatttttaggtatttcttcagggttaactcgtccacaaactataaataaactttctagcagtagtaacttaagagtgatgcttaattatgcagaaacgttatattttatttttaatatcgcatttttacttatkggtggttayytatatwcaatwggaactattcaatayttaatrttatttatkkcrttattrayktttatatatttamtaayawtattttattttacaaggagagakcaacatgaaamtmaamacagaatttaa

SEQ ID NO: 2409 - DNA, 693 bp, Staphylococcus aureus
atggcaaaattagttactgaaaacatttcgaarcggtttaaaaatcaagatgtattaaagcatattaatatcactttagaaaataacgaagtttatggattacttggtattaatggagccggtaaaacgacacttatgaaaattatatgtggcatacttcaacaagattcaggggaaattaaattagataatagaccaatgacacgaaatgatttgcacaaagttggttcgcttattgaaacacctgcgacatataatcatttaagtgcacaagataatttgaaaattgtgtgtttaaatgaaagcgttgatttcagcgaaattaatagtgttttaagcttagtcaatttaaatgtcgataaaaagaaaaaggttaaggacttttctttaggtatgaaacaaagacttggaattgcaatggcattaattaaaaagccagaaattttagtattagacgaaccatctaatggtttagacccatatggaatccaagaacttagagaacttctaaaattattaacagaacaaggtactagtattattatttcaagtcacattttatctgaaatccaagttttagcagatcatatcggtattattcatgagggtgagctaaaatatcagcaaagaaataacaaagatgaaaacttagaagagatattcttcaaaataacgaaaggtgattacaaatga

SEQ ID NO: 2410 - DNA, 3552 bp, Staphylococcus aureus
atgaacaaraaygtgttgaagtttatggtctttataatgttattaaatatcatcacrcctttatttaataaaaatgaagcattkgcagcacgagatatttcatcaacgaatgttacagatttaactgtatcaccgwctaagatagaagatggtggtaaaacgacagtaaaaatgacrttcgacgataaaartgkaaaaatacaaaatggtgacaygattaaagtggcatggccgacaagyggtacagtaaagatagagggttatagyaaaacagtaycattaactgttaaaggtgaacaggtgggtcaagcagttattacrccagacggwgcaacaattacattcaatgataaagtagaaaaattaagtgatgtttcgggatttgcagaatttgaagtacaaggaagaaatttaacgcaaacaaatacttcagatgacaaagtagctacgataacatctgggaataaatcaacgaatgttacggttcataaaagtgaagcgggaacaagtagtgttttctattataaaacgggagatatgctrccagaagatacgacacatgtacgatggtttttaaatattaayaatgaaaaaagwtatgtatcgaaagatattactataaaggatcagattcaaggtggacagcagttagatttaagcacattaaacattaatgtgacaggtacacatagcaattattatagtggaycaaatgcaattactgattttgaaaaagcytttccaggttctaarataactgttgataatacgaagaacacaattgatgtaacaattccacaaggctatgggtcaywtaatagtttttcaattaactacaaaaccaaaattacgaatgaacagcaaaaagagtttgttaataattcacaagcttggtatcaagagcatggtaaggaagaagtgaacgggaaakcatttaatcatactgtgcayaatattaatgctaatgccggtattgaaggtactgtaaaaggtgaattaaaagttttaaaacaggataaagataccaaggctcctatagctaatgtaaaatttaaactttctaaaaaagatggatcagttgtaaaggacaatcaaaaagaaattgagattawaacagatgcaaacggtattgctaatattaaagcgttgcctagyggagactatattttaaaagaaatagaggcgccassaccgtatacatttgataaggataaagaatatccgtttactatgaaagatacagataatcagggatattttacgactattgaaaatgcaaaagmgatagaaaaaacaaaagatgtwtctgctcaaaaggtttgggaaggcactcaaaaagtgaaaccaacgatttatttcaagttgtacaaacaagatgacaatcaaaayacaacaccagtagacaaagcagarattaaaaaattagaagatggaacgacaaaagtgacatggtctaatcttccrgaaaatgacaaaaatggcaagrctattaaatatttagttaaagaagtaaatgctcaaggtraagayacaacaccagaaggatatactaaaaaagaaratggtttagtggttactaatactgaaaaaccaatcgaaacaacatcaattagyggtgaaaaagtatgggacgacaaagacaatcaagatggtaagagaccagaaaaagtcagtgtraatttattggctaayggrgagaaagtaraaacgktagaygtracatctgaaacaaactggaagtacraatttaaaracttaccgaagtatgatgaaggaaagaaaatagaatatacagtgaccgaagatcacgtaaaagactacacaacagacatcaacggtacgacaataacgaacaagtatacaccaggagagacatcggcaacagtaacraaaaattgggatgacaataataaccaagacggaaaacgaccaactgaaatyaaagttgagttatatcaagatggaaaagcaacaggaaaaacggcaayattaaatgaatctaataactggacmcatacgtggrcaggattagatgaaaaagcaaaaggwcaacaagtaaaatacacagtcgaggaattaacaaargtyaaaggytatacaacacatgtggataacaatgatatgggtaacttgattgtgacgaataaatatacgccagaaacaacatcaattagyggtgaaaaagtatgggacgacaaagacaatcaagatggtaagagaccagaaaaagtcagtgtgaatttattrgctrayggagagaaagtaaaarcgktagaygtgacatctgaaacaaactggaagtacgaatttaaagacttaccgaagtatgatgaaggaaagaaaatagaatatacagtgaccgaagatcacgtaaaagactacacaacagacatcaacggtacracaataacgaacaagtatacaccaggagagacatcggcaacagtaacaaaaaattgggatgacaataataaccaagacggaaaacgaccaactgaaatyaaagttgagttatatcaagatggaaaagcaacagkaaaaacggcaahattaaatgaatctaataactggacmcatacgtggacaggattagatgaaaaagcaaaaggwcaacaagtaaaatacacagtcgaggaattaacaaargtyaaaggytatacaacacatgtggataacaatgatatgggcaacttgattgtgacgaataaatatacgccagaaacaacatcaattaryggtgaaaaagtatgggacgacaaagacaatcaagatggtaagagaccagaaaaagtcagtrtraatttattggctaayggagagaaagtaaaaacgttagacgtgacatctgaaacaaactggaagtacgaatttaaaracttaccgaagtatgatgaaggaaagaaaatagaatatacagtgaccgaagatcacgtaaaagactacacaacagacatcaacggtacracaataacgaacaagtatacaccaggagagacatcggcaacagtaacaaaaaattgggatgayaataataaccaagacggaaaacgaccaactgaaatyaaagttgagttatatcaagatggaaaagcaacaggaaaaacrgcaayattaaatgaatctaataactggacmcatacgtggrcaggattagatgaaaaagcaaaaggwcaacaagtaaaatacacagtcgakgaattaacaaaagttaawggytatacaacrcatgtggataacaatgatatgggyaacttgattgtgacraataaatatacgccrraaaaaccgaataaaccaatctatcctgaaaaaccaaaagacaaaacaccaccaactaaacctgatcaytctaataaagttaaaccaactcccccagataagccatcaaaagtggataaggatgatcaacctaaagataataaaaccaaacctgaaaatcctctaaaagaattaccaaaaactggtatgaagattataacttcatggattacatgggtatttataggtatattgggaytgtatttaattttaagaaaaagatttaactcataa

SEQ ID NO: 2411 - DNA, 516 bp, Staphylococcus aureus
atgaaamtmaamacwgaatttaaaggraayaatataccatatgaataygcrgcaggygcagatrtragtgattywatwaayggsaatccaattaartcattyccrtttgaartaaywgaaytwccrraagrkactaaatatcttgcwtggtctytratwgaytatgatgcaathccwgtwtgyggmtttgcwtggattcattggagygtwgctaatgtaagtrtyastggyrattcaatttctatwaaagcagatttatcaagaacaaagggygactatgtacaaggtaaaaatagcttyactagtggkttgttrgctgaagatttttcagaaatagaaaatcactatgtaggaccwacaccacctgatmaagatcatcaatatgaattaacagtttatgcgttagatcattctttaaatttgaagaatgggttctacttgaatgaatttttaaaagaagtaaatcaacataaaatwgatcaaacaagtattaaccttataggaagaaaaatttaa

SEQ ID NO: 2412 - DNA, 1374 bp, Staphylococcus aureus
atgaaaatcataaagcgcgctattattagtttaataatattgagtcttttaatatctattacaatgagtaatgcatcagcgtcagaagaactatattacagtgttgaatacaaaaatacagcaacatttaacaagttagttaaaaagaagtccttaaacgttgtctataatataccggaattacatgtggcacagattaaaatgacgaaaatgcatgctaatgctttagcaaactataaaaatgatattaaatatatcaatgccacatgttcaacttgtattactagcgagaaaacaatagacagaacatcaaatgagtcattattttcaagacaatgggatatgaataaaataaccaataatggtgcatcgtatgatgatttgccaaaacatgctaacaccaaaatagcaatcatagatacaggtgtgatgaaaaaccatgacgatttgaaaaataatttctcgactgattctaaaaatttagtacctttaaacggttttagaggtactgaaccggaggaaacaggtgatgttcacgatgtcaatgataggaaaggacatggcacgatggtgtcgggtcaaacgagtgctaatggtaagttaataggtgttgcaccgaataacaaatttacaatgtatcgcgtgtttggtagtaaaaaaacagaactgctttgggtatcaaaagcgattgttcaagctgcaaatgatggaaatcaagtcattaatattagtgttggtagttatattattttggacaaaaatgaccatcaaacatttagaaaagatgaaaaagtagaatacgatgcgttacagaaagcaatcaattacgccaagaagaaaaaatctatcgttgttgctgcagctggtaatgatggtattgatgtcaatgacaaacagaaactaaaattacagcgtgaatatcaaggtaatggcgaagtgaaagatgttcctgcatctatggacaatgtcgttacagtaggatctacagatcaaaagagtaatctatctgagttttccaattttggtatgaattatacagatattgctgcgcccggaggatcatttgcttatttaaatcaattcggtgtggataaatggatgaatgaagggtatatgcataaggagaacattttaactactgccaataacggaagatatatttatcaagctggaacttcattagccacacctaaagtttcgggagcactagctttaatcattgataaatatcatcttgaaaaacatccagataaagcgattgaattgttatatcagcatgggacatctaagaataataaaccatttagtagatatgggcatggtgagcttgatgtgtataaagcattaaatgtagcaaatcaaaaagcaagttaa

SEQ ID NO: 2413 - DNA, 435 bp, Staphylococcus aureus
atgaaattaaaatcatttataactgtaactttggcactgggcatgatcgcaacgactggcgctactgtgrcargtaatgaggtatctgcagcagaaaaggacaaactaccggcaactcaaaaagctaaagaaatgcaaaatgttccatatacaattgcagtagatggcattatggctttyaatcaatcttacttaaatttaccaaaagatagccaattatcatatttagatttaggraataaagttaaagctttrttatatgatgaacgyggtgtaacacctgagaagattcgaaatgcaaaatctgccgtttacacgattacttggaaagatggyagtaaaaaagaagtggatytwaagaaagatagytayacagcaaacttgtttgattcaaattcaattaarcaaattgatattaatgtaaaaactaaataa

SEQ ID NO: 2414 - DNA, 519 bp, Staphylococcus aureus
atgggagaaaatgtattgatttgtttgtgtggctcagttaatagtatcaatattagccactatattattgaattaaaatcaaaatttgatgaagtaaatgtaatcgcgtcaacaaacggtagaaagtttattaatggtgaaatattaaagcaattttgcgataactattatgacgaatttgaagacccttttttaaatcatgtagatatagcaaataaacatgacaagattattattttacctgcgacttctaatacgattaataaaattgcaaatggtatatgtgacaatttattattaactatttgtcatacagcttttgaaaaactttctatatttccaaatatgaatttacgaatgtgggaaaatccagttactcaaaataatattcgattattaaaagattatggtgtatcaatatatccagcaaatatttcagaaagttatgaattagcgtcaaaaacatttaaaaagaatgttgtcgcacctgaaccatataaagttctggaattcatttga

SEQ ID NO: 2415 - DNA, 2919 bp, Staphylococcus aureus
atggctatgaaaagaattttaactacttcacagcgtgaacaacttctttctgtagaccacttatcagaagaggattttaaagcgtattttagtttttctgattatgatctggaggttattaatcaacaccgtggaaaggtcaataaactaggatttgcgatacaactttgtttggcccggtatcctgggtgttctttaagtaattggccgattaaatcaaccagactaacttcttatgtgagtcgacagctccatcttgatgcaattgatttaaattcatatgatcatagaaatacacgtgcaaatcacttcaacgagatcttagaagtattcaactatcatcgattcggtagtgctaatacacaaaaacagttaatagaatatttaattgaactagctttagaaaatgatgactctatctatctaatgaaaaaaacaattgatttcttaactcgaaaaagaattatttttccatctatagctacacttgaagacattataagccgctgtcgagataaagcagaaaacaacttattttcaatattgctctgttcattaacagatatacaaattgaaaaactagagagtttgtttcaaatttatgaagagacgaaaataactaaactcgcttggctaaaagacattccaggtaaggcaaatccagaaagctttatgagtatttgtaaaaaagtggaagtgattgcttccatgggactcgggacaattaatgtctcccatattaatcggaacaggtttcttcagctagctagactaggggaaaattatgatgcatatgacttctcccgttttgagcttgaaaaaagatactctttacttattgcttttttagtcaatcatcatcaatatctgatcgatcaactgattgagattaatgaccgcattttagcaagtattaaacgcaaagggacacgtgattcacaagaacagttaaaagaaaaaggaaaattggctactaaaaaattggaacattatgcttctttaattgatgctcttcactttgcaaaagataatgatagtaatccttttgacgaaattgaacgaatcatgccttgggaagatttagtacaagatggagaagaagctaaaaaaattacaggtaataaaaatcatggctatttagaaatggttcgaaataaagctaattacctccgaagatacacgccaatgttattgaggaccctttcgttcaaagcaactccggcagcaaatccagtcctcatggccctaactcaactaactgatttacacaatagtggtaaaagaaaaataccggcagatacttctactgattttgtgagtaaaaaatggaaaagccttgttcggccagaagaggggaaaatagatcggtcttactatgagttagtagctttcaccgagctaaagaacaatattcgatcaggagatatttcagttgaaggaagtatgatccatcgaaatattgatgattacttagttgatttatctgcttgtattgattcagaaactattccagacacgtttgaggactatttaaaggatcgggaaataattttagatttacagcttcaattttattcgacagttgataagagaatttcaagagcaaaccttaaaaagttggaaaaagttacacctagcgaagcagaaatatatagaaaaaaactttattcaataattcctaagataaggcttagtgatcttttaattgaggtggacagttggaccaacttttcacaagaatttagtcatgattctacagggaaaccgccgagtgaacaagaaagaaaaattatttttgctgctttgctgggtttagggatgaatattggtcttgaaaaaatggcccaatcaactcctggaatttcttattctcagttagccaatgccaaacaatggcgcttttataaagaagctctgactcgtgctcaatctgttttggttaattatcagttaaagcttcctgttgcagacttttggggtgaaggaaaaaccactgcttcagacggaatgcgcgtcccagtgggcgtctcagctctaaaatccgatgttaatccacattacaaaagtatggaaaaaggagctacaatgattcgatcaataaatgataggcatacgactcatcatatcgaggttgcttcaactaatacaagggaagctactcatacccttgatggcctactttatcatgaaacagatctagatattgaggaacattttactgatacaaatgggtattctgatcaggtgtttggaatgaccgcattactaggctttgattttgaacctcgcatcagaaatataaaaaaatcacaattattttctatcaaatcaccttcctactaccctaacttatcagaagatataagcggaaaaatcaatgtaaaaattattgaagaaaactatgatgaaattaaacgaatcgcctattcgattcaaacagcaaaagtatctagttctttactattaggaaagctaggctcatacgcacgtaagaatagagtagctcttgcactgagagaactaggtcgcattgaaaagagcatttttatgatagattatattacagatagtgagctacggcgaaggatcactcatggactaaataagacagaagcgattaatgctttagctagagaactattttttgggcgacgcggaaaatttatggagcgcgatattcgccgacaacttcaaagtgctagtgcgcttaatgtgttaataaatgcaataagtatatggaacgccgtctacttacaagcagcttataattatctcgtcaaaatagatcccgaagtaactaagtatatgaagcatgtatctcctattaattgggagcatatcacttttcttggagagtataaatttgacttgttatctattcctaaacacttaagagaattgaatataaaaaataaatag

SEQ ID NO: 2416 - DNA, 942 bp, Staphylococcus aureus
atgaacgtgggtattaaaggttttggtgcatatgcrccagaaaagattattgacaatgcctattttgagcaatttttagatacatctgatgaatggatttctaagatgactggaattaaagaaagacattgggcagatgaygatcaagatacttcagatttagcatatgaagcaagtktaaaagcaatcgctgacgctggtattcagccygaagatatagatatgataattgttgccacagcaactggagatatgccatttccaactgtcgcaaatatgttrcaagaacgtttagggacgggcaaagttgcctctatggatcaacttgcagcatgttctggatttatgtattcaatgattacagctaaacaatatgttcaatctggagattatcataayattttagttgtcggtgcagataaattatctaaaataacagatttaactgaccgttctactgcagttctatttggagatggtgcaggtgcggttatcatcggtgaagtttcagawggcagaggtattataagttatgaaatgggttctgatggcacwggtggtaaacatttatatttagataaagatactggtaaactgaaaatgaatggtcgagaagtatttaaatttgctgttagaattatgggtgatgcatcaacacgtgtagttgaaaaagcgaatttaacatcagatgatatagatttatttattcctcatcaagctaatattagaattatggaatcagctagagaacgcttaggtatttcaaaagacaaaatgagtgtttctgtaaataaatatggaaatacttcagctgcgtcaatacctttaagtatcgatcaagaattaaaaaatggtaaamtcaaagatgatgatacaattgttcttgtcggattcggtggcggcctaacttggggcgcaatgacaataaaatggggaaaatag

SEQ ID NO: 2417 - DNA, 1245 bp, Staphylococcus aureus
atgattgatmtgaatctaatattgaagaagaagtttcaagagatttcagaagtagatgatttcatttcaaaagcatctactgaaaccgattattttgaaccttcaactttatcacatggtataccaggtatcattttgtttttagatgcttatcaaaaagttttcgatattaatactgagcaaattgtgcataagtacatcatgaaattagcaccatatttacagagtggtcaatataacaattctttgtttggtggactttcaggtattgcattttcaatggatttagcatcgcaaaatggcaaaaattatcaaaatattttaaataatattgatggtcacattgtaaatgaaatagaaaataaatttgatcaaatattacaagaaccattaaatccattaaattatgatactgtcagtggattagctgggatagggagatatttgctaaatagagtagatgagaatgaatttaatgttaaagcattaaaaagcatattagtatactttaaagatattcaatattctaaaaatagctgggtagtcccacaagaaagtcaatttttagagtctgataaaaattattttactgaaggtaatatcaatcttggccttgcacatggagtgctaggaccgatgtctttatttgcattatgcgtgattaaaggaattacgattgaaaatcatcagcacatattaaaagacatgtacaaatttatcatggacgaaaaattttgtaaccacgaaagatggttgcagcgttacgatttaatttctgaacgtaatcatttcaattttattcggaatggttggtgttatggcaatacgggtgtaatgacgacgttgtttttaatcggccaagcattacaagatgatgaaataattaaaatgtctaaaaaagtgatgctacaagtagtaaatgataaagatgaaaatttaataagtccaactatttgtcatggattgtcatcacaaatattaatgttaacaattatgaatttgaattttgaattaaatgaagtgtctgattatatcactgtattaataaataaactgatttctcattataaggaagattatctggtgaattttatagacattaatgaaaataagcaagatgtatttaaaagtaggaaagttggccttttagaaggtgaattaggggtctatctaacattgatgacactgaaaaatacaaaaattctcaatgaaaaaaattggaccaatgcgtttttaattagctga

SEQ ID NO: 2418 - DNA, 741 bp, Staphylococcus aureus
ttgaggagttttaaaatgattaataaaattaaaatattattttcgtttttagcattattactttcattcacatcatatgcgaaagcagaagatttacacgataaaagtgagttaacagatttagctttagctaatgcatatggtcaatataatcacccattcattaaagaaaatatwaagagtgatgaaataagtggagaaaaagatttaatatttagaaatcaaggtgatagtggcaatgatttgagagtaaagtttgcaactgctgatttagctcagaagtttaaaaataaaaatgtagatatatatggggcatctttttattataagtgtgaaaaaataagtgaaaatatttctgaatgtctatatggaggtacaacactaaatagtgaaaaattggcacaggaaagggtgattggtgctaatgtttgggtagatggtattcaaaaagaaacagaattaatacgaacaaataagaaaaatgtgacattgcaagaattagatataaagatcagaaaaatattgtccgataaatataaaatttattataaagacagcgaaataagtaaaggtctaattgaatttgatatgaaaactcctagagattactcattcgacatttatgatttaaaaggagaaaatgactatgagatagataaaatttatgaagacaataaaactttaaaatctgatgatataagtcatattgatgtaaatctatatactaagaaaaaagtataa

SEQ ID NO: 2419 - DNA, 1245 bp, Staphylococcus aureus
atgagtcaaaatawaagagtagttattacaggtatgggagccctttctccaatcggtaatgatgtcaaaacaacatgggagaatgctctaaaaggcgtaaatggtatcgataaaattacacgtatcgatactgaaccttatagcgttcacttagcaggagaacttaaaaactttaatattgaagatcatatcgacaaaaaagaagcgcgtcgtatggatagatttactcaatatgcaattgtagcagctagagaggctgttaaagatgcgcaattagatatcaatgawaatactgcagatcgaatcggtgtatggattggttctggtatcggtggwatggaaacatttgaaattgcacataaacaattaatggataaaggcccaagacgtgtgagtccatttttcgtaccaatgttaattcctgatatggcaactggrcaagtatcaattgacttaggtgcaaaaggaccaaatggtgcaacagttacagcatgtgcaacaggtacwaaytcwatcggwgaagcatttaaaattgtgcaacgcggtgatgcagatgcaatgattactggyggtacrgaagcwccaatyactcatatggcaattgcwggtttcagtgcaagtcgagcgctttctacaaatgatgacattgaaacagcatgtcgtccattccaagaaggtagagayggttttgttatgggtgaaggtgctggtattttagtaatygaatctttagaatcagcacaagctcgaggtgcmaatatttatgctgagatagttggctatggtactacaggtgatgcttatcatattacagcgccagctccagaaggtgaaggyggttctagagcaatgcaagcagctatggatgatgctggtattgaacctaaagatgtacaatacttaaatgcccatggtacaagtactcctgttggtgacttaaatgaagttaaagctattaaaaatacatttggtgaagcagctaaacacttaaaagttagctcaacaaaatcaatgactggtcacttacttggtgcaacaggtggaattgaagcaatcttctcagcgctttcaattaaagactctaaagtcgcacckacaatwcatgcggtaacaccagayccagaatgtgatttggatattgttccaaatgaagcgcaagaccttgatattacttatgcaatgagtaatagcttaggattcggtggacataacgcagtattagtattcaagaaatttgaagcataa

SEQ ID NO: 2420 - DNA, 2994 bp, Staphylococcus aureus
atgaacactatttacgaaccgtcaagtatttgtatgattagaacacctttattatcagttgaatttttcaatttatttttaaatactgaacaaattaaatatagcgacttacaattaaatgctcagatgaaagaatcaatcctaacaacaacatttaacttatattgtactttacaagaaataaattttgatggcgataacaagaaggttagagatgctaaagaaagtttattaaaatatttaattagaatgtcaacacgtccaactccatttggattattaagtggtattaatttggggcattttgtaaatgaaccaacacgtcttaaagttggaaatagtattcaaaaatatgtgaaagtcgatggcgaatggttgtataaactggttagttatattgagagtattgatgaatattatcaaaatttgaaagttatttggaatagtaaagcacatattatcaatgatcgaatatatttaaatgaacaaagtgctatttatttaaacaacaataaagatacatctttttccattaaaaatagcgaattactcgtattcatcaaaaccactgtgacgaataataatattactttttcaaatttagctgaaaagataaatcaagaatttgaaattaatgatattactaaagtgaaagtatatatccataatcttgtctcaaaggaaattatatattcaacaatcagaccaccgttatcatatagcgataatttaaattatattttaaataaactttctttacataatgatgattttgtgaaaaaaattagagaaatccagaaattgatattagcttatgaaaaaactgaaattggatttggcgaggaattatataaagacattattcatcatatgaaggcactattcaaatgtaaaaactatcttcaaattgataccaaaattgacatgattaacaattatttacatcaagatatagcaacaaatatatctgaagcagcgtacttattgtggcttttatcaagaaataatattggattcacagatttgaaagttcttcacaaccgttttattgaaaagtatggatttgaacaactcgtgaatattaaagatttgatttcagatataacaggtttcgggacaacaatttttcaagaagaagaaaccgatggaaataatattgtaatgcttaagcaaaaatttttacatgccttgagaaataacgatgagatagtcataaatgaaaaagatgtagagtcattgattaacgataatgaaatcaatcattatcatgcgccaatgagtgcagatgtttatgctgaactttatttaggacgtttttacaatcagtacaatgagctcattgttattagtcctttaacggcgtcttttaatgctggcgctacatttgggcgatttcatcatttaattgatactgaaactttagcaaaattagaacatgaaaaaggacattattatcagaagatgatatgtgatgacaatgtagaaatgatttctataaataacataccgaaatatccgagaaatcataatgtattaactaatcatgactcatacgaatattcattgaatttaggaagtagtaatagttattcaaagtatgagcttaccttagatgatatttatgttggtgctacctttaacaaattatatttatattctagccaactaaataaaagggtamtatttgaatcaaacaatatgtataactttttaaaagaatgtaatttatatcgattgttacgagaaatttcaatggaatctgtgaaatgcattgaayctatgaatgatgtgagtattgattcatttagttattcaccacgaatcagatataaaaatgtcattcttaaaccagcatattggaaaattaacgagatggtattacctttacctaaaaatgaagaatgggatcaacaatttttgaaatatcaagaacaattcaatatacctaatatcgtgaatttagtttatggagataacaagcttctactaaatttatcattagctaatcatagatatttattgatgaaagaatataagaagcataaacgtgtacgtttagtagaatcatttttacctcaatcaaagaatgatcatgtgtatgaaattgttacaccaatttataaaaaatcatcttatcgaggacccgaaatcgaaattccaaaatataaaaatacagatattgaatatgacaaagactggtttgcattacatattcatatcgataagccatcgcaagatacatttatcatcgacaatttgtatccatttgtaaaacatcttaaagataagggagatatagawmaatattttttaatgcgttatatcaaacaaggtgacattttaaagttgaggttattcaggaatgacgaaaattacgcagaaatatacagcatcttgaagaattggttaccacatgttcgacaaacgacagaagtttcagattatgaatttgtatcatacgagccagaattttttagatatggtggaaagaacacgattaatgaaatagaagccttctttgaatatgacacgaatttagctgtcaatattattgaaaatgattttaagtttgatcgaccatatattgttgctatttcaataatgtatttatttgagatgttttcaatttctaatgaagagcgtatggaaattgttaataactatgtacctacatcatttaaaagtaaagatattagaccttttaaaaatgaacttgtaactatatgtaatcctgctaataattttgaatatatggctaaacactatagtggtatttatcgaattttaaaagatggcaaccaaattttgagcaaattaaatgaagggcttaaaaaaactttaactactaaaaggtcaaggattattggcagcttaattcatatgcgctgcaatcgaatatttggcattgataaggatcaagaaacatttgttttatctattgtaaaagaaattgttaaaactcaaaagcattggtgtggtgacaaaaatgattga

SEQ ID NO: 2421 - DNA, 465 bp, Staphylococcus aureus
atgaaagaacgctatggaacrgtatataaagggaaagaagarttyrtaaataaagactcaggagaagtaatacagtttgataagctatayagagcacaaacaggtggaaacttcgtraagatgtayatggaactgtttgkasaaatgttgggattaatgaataaaagaggrgaagtaatgcagtacctttttaaagacttaaayctatcaagyaatacagtaataaaaacagttcgagaacttgctaaagaaacaaatacaagtacaaaaacmgtaacagaaacccttaaaattatggaaaaaggaaacattataaaaagaaagactggagttataatgataaacccagccttattaatgcgtggagatgatagyaaaaaacgttatctcttactagaatttgarcarttcgatagagaaaacgaattagaacacgctttaaatgaatatgaaagttttaagtaa

SEQ ID NO: 2422 - DNA, 195 bp, Staphylococcus aureus
atgaataatrtaaatacacttgagagrcgtttaaaggacgctcagagaataaaaarrtatctcataaagaataatgcctcaaaaacaaaaataagcgaaataaagcgtatagagaacttcttagasstagaattaaataaagaaaaggtagttaataccttaacyaatttatattttggtaatcaacaagattaa

SEQ ID NO: 2423 - DNA, 849 bp, Staphylococcus aureus
atgaaattaatgccaggttcrccatttaacgatgctaaattaaatgctgaacaaaaagaaattttaaatgaaaaatatggattaaatgatcctgtagcwacgcagtatttacattatttaaaaaatgttgttacaggsgattttggtaattcattccartatcataatcaacctgtgtgggatttgattaaaccgagactaytaccttcttttgaaatgggtcttacagcaatgttcatcggtgtgatactgggwcttattttaggtgttgcagcagctactaaacaaaattcttgggttgaytatacaactacagttatttcagttattgcwgtatctgtaccatcttttgtacttgctgtacttttacaataygtatttgcagttaaattaagatggttcccagtagctggatgggaaggtttttcgaccgcggtattaccgtcacttgcattatctgcagctgttttagcaactgtcgccagatacataagagcagagatgatagaggtattaagttcagactayattttattagcgagagctaaaggtaattcgacaatgcgtgtactttttggacatgcacttagaaatgctttaattccaattattacaattatcgttcccatgttagcaagtattttaacaggcactttaacaattgaaaatatttttggrgttcctggattaggggatcaattcgtacgttcaattacaacaaatgatttctcagtaatcatggcaatcacactattatttagcacactgtttatcgtttctatttttattgtagatattttgtacggtgtgatagatccacgaattcgtgttcaaggaggtaaaaaataa

SEQ ID NO: 2424 - DNA, 144 bp, Staphylococcus aureus
atggaaaaagttcttgatttagacgtgcaagttaaagcaaacaataactcaaatgattcagcaggtgacgaacgtattacaagtcatagtttatgtactcctggttgtgctaagactggtagttttaatagcttctgctgttaa

SEQ ID NO: 2425 - DNA, 424 bp, Staphylococcus aureus
aagcttgaaaattcgtaatgattttgtagacgtacttcaagaaaaattgaaacatgttgatacagaggaattaaaagatatattaggcagaggtatttacaaagtacgagaagaaaatgaccgtatgctgcaagaagtaaaaaggtcacatgaacattatcaaacaagacaaaaatatttattcactggtattggtgcaatgttgttagtctttatgttatttgctttgattatgacgattggtagtgactttatgagttttctacatgttgatacattacagaatgccatagcaggcaaattaaaagcgtctgaaggctttatgacatttgtttggtatattgcttatggtttaccttatgtattagcgataggtctatttattggcttgtacgaatggattagagcaaagttccatgattaa

SEQ ID NO: 2426 - DNA, 975 bp, Staphylococcus aureus
atggcaacaactaaattaggcaataccaaatcggcaagtcgagcaatcaattacgcagagaaacgtgcagaagaaaaaagtggtttgaattgtgatgtagattatgcaaaatcagcttttaaacaaacaagagccttgtatggcaaagaagatgggattcaagcacatacggttattcaatcttttaaacctggtgaagtaacgccagaacaatgtaatcaacttggcttagagctagcagaaaaaatagcccctaatcatcaagtagccgtatatacgcatacagataaagaccattatcataatcatattgtaattaattcagttgatttagaaactggtaaaaaatatcaaagtaataaaaaacaacgtgacttagtaaaaaaagagaatgacaatatctgtcgtgaacatggtttgagtgttacagaacgtggcattgccaaaatgagatacacacaagcagaaaaaggcattgtctttgatagagatgaatattcttggaaagatgaattacgagatttgattgaaaatgcaaaaacccatacaagcaatttagagacgttttcagagcatttagaagaaaaaggggttggagttaaacttcggggcgaaacaatctcatataagcctgaaaatgaaaataaatgggtaccgtggacgaacactaggctcagaatacgtggacgaacactaggctcagaatatgagaaaggggcaattgatcatgagcatgaaagacatcaaaaacaacaaagagaacccgaatacgcagatgaattcaaaatcaactgggacgccgtcgagcagcacacagaacagcttaaacaacgaagagttgagcgagctcaagagacaaaacaagctcatagtaaaatatctagcagagatacaagagaatcagaaaatcagagagaaagagcaaaaggaaataacatccgaattgaaagaggcgacgaaggactttcgagataa

SEQ ID NO: 2427 - DNA, 1000 bp, Staphylococcus aureus
atgaaaatkraaaaattagkcaaatcatcagttgcttcatcaattgcactgcttttgctatcgaatacagttgatgcagctcaamatatcacacctrwaagmgagaaaaaagtagatgacaaaatcactttatacaaaacaacagcaacatctgataatgataaattgaatatttytcaaattttaacgtttaatttcattaaggataaaagttatgacaaagatacrttagtacttaaggcagccggaaacattaattcaggttataaaaakyctaatccaaaagattacaattactcacagttttattggggcggtaagtataatgtttcggttagttcagaatcaaatgatgctgtaaatgttgttgactatgcacctaaaaatcaaaatgaagaattccaagttcaacaaacattaggttattcttatggcggagatattaatatatctaatggcttatcaggtggattraatggatcaaaatcattttcagaaacrataaattataaacaagaaagttacagaactacgattgatagaaaaacaaatcataaatcaattggctggggtgttgaggcscacaaaattatgaataatggttggggaccatatggtagagatagttatgacccaacatatggtaatgaactgtttttaggyggtagacaaagtagttcaaatgctggwcaaaatttcttgccaacacatcaaatscctttattggcgcgtggtaactttaacccagaatttataagcgtactttctcataaacwwwwtgatacaaaaaaatctaaaatcaaagtaacttaccaaagagaaatggatagatatactaatcaatggaatcgayyacactggrttggwaataactacaaaaatcaaaatacagtaacgtttacatctacttatgaagttgactggcaaaaccatactgttaaattaatcggtacggattctaaagaaactaatcctggagtataraattgtatatgattaa

SEQ ID NO: 2428 - DNA, 1071 bp, Staphylococcus aureus
atggctgaaaataaaaacaatttgtcgattaacgacgatcattctaatgcagctatgacgcatacctctgacgctatckcatcatctgattttattattagagaattagayttgaatcaggaacctgaaatgcaacgagaaagcaaaaacttttggcaagatgcttgggctcagttaaaacgaaataagttagctgttgtcggtatgataggtttaattatcattgtaatatttgcttttatcggtccagttataaataaacatgattatgctgaacaaaatgtasaacatagaaatcttccggcaaaaatacctktattagacaaagttccatttttaccttttgatggtaaagatgcagatggcaaggatgcttataaagcagcaaatgctaaagaaaattattggtttggtactgatcagttgggtcgagatttatggacaagaacatggaaaggtgctcaaatttcattgtttatcggtgttgttgcagcgatgttagatatttttattggygttgtatatggtgcgatttctggattcttcggtggacgtgtcgatacgattatgcaacgtatacttgaagtcatagcatctattccgaatttaattgtcgtaattttatttgtattaatttttgaaccatccatttggacaattatattggctatgtctatcacaggctggttaggcatgagcagagttgtacgtggagaatttttaaaattraaaaatcaagagtttgtcatggcttcgaaaacattgggggcttcwaaattcaaattgatatttaagcatattttacctaatacrttaggtgctatcgtggttacatcaatgtttacagtacctagtgctattttcttcgaagcatttttaagtttcattggtataggtgtaccygcacctcaaacatcgttagggtcattagtaaatgatgggcgmgcaatgttattaatttatccacatgaattatttataccagcaatgattttaagtttattaattctattcttttacttatttagtgatggattacgtgatgcatttgatccgaaaatgcgtaaataa

SEQ ID NO: 2429 - DNA, 936 bp, Staphylococcus aureus
atgtttaagaaamaaatgttagctgcaastttgtcagtaggactgattgcrcctttagcatctccgattcaagaatctagagcwaatactaatatwgaraatattggygatggtgcygaagtaatcaaacgtacggaggatgtaagtagtaagaaatggggcgttactcaaaatgtycaattcgactttgtaaaagataaaaaatataacaaagaygctttaattgttaaaatgcaaggttttattaattccagaacttcattttcrgatgtgaagggtagwggatatgaattractaaacgwmtgatttggccattccaatataatataggactgacgactaaagatccaaatgttagcttaatcaattaccttcctaaaamcaaaatagaaactactgatgttggtcaaacattaggatataacattggaggtaatttccagtcagcaccatctataggtggcaatggctcatttaattattctaaaacaattagttatacccaaaagagttatgtcagtgaagtagacaagcaaaactcaaaatcwgttaaatggggtgttaaagcaaacraatttgttacscctgatggwaaaaaatytgcgcatgatagatatttattcgtacaaagtccaaatggtccaacaggttcagcaagagaatattttgctcctgataatcaattgccacctttagttcaaagtggctttaatccatcrtttatcactacactatcacatgaaaaaggttcaagtgatacgagtgaatttgaaatttcatatggtagaaacttagatattacatatgcgactttattccctagaactggtatttacgcagaaagaaagcataatgcatttgtaaatagaaactttgtagttagatatraagttaattggaaaacacacgaaattaaagtgaaaggacataattaa

SEQ ID NO: 2430 - DNA, 1387 bp, Staphylococcus aureus
atggcaacaactaaattaggcaatacgaagtcggcaagtcgtgccattaattacgcagaagaacgtgcagaagaaaaaagcggcttaaattgtgatgttgattatgctaaatcatattttaagcaaactagggcgttatatggcaaagagaatggtgttcaagcacatacagtcattcaatcttttaagcctggcgaagtaacagctaaagagtgtaatgagataggtttagaattagctaaaaaaattgcaccagattatcaagttgcagtttatacacatacagacaaagaccattatcacaatcacattattattaattcagtaaatttagaaacaggcaacaagtatcagtcaaacaaagaacaacgtgattttataaaaaaggcgaatgatcagttatgtgaagaacgtggtttatctgtgccagaaaagtcatcagaaatcagatatacgttggcagaacagaacatgatagataaagataaaaggtcatggaaaaatgatataagaatggcagttgaagaaacaaaggataacgcagtagcgtttgaagaatttaatactttgctaaaagaaaaaggtgttgaaatcacgagagtaacgaaaaacaacgtaacgtatagacacattgaagaagataaaaaagtacgtgggaataagttgggcgattcttatgacaaaggagtgattgaaaatggctttgcaatcgagaaattcagacgagaacgagaagaagaacgagaatacgatgaatatgcagacacgttcgaagttgactgggacgcattcgcagaaaattcagaagaccttagaaaacgaagaattgcaagaactgaagaaacaaaacaagctagtaataaaatatatatcagagatgaaagaacaacaggacttgagagaaaaggaattgcaggcaatcaagtcgagtttgaaaaagacgacggaggactttcaaggtagaggtaaaaaagtccataatgattttgttcgtttgttacaaaagaatttaaatcgagtgaatgcagaagatattgagatagaggttcgaaaagatgtttatggagttcgagaagaaattcattcgatgttgcgtgaagttaaacaatcacatgaacattatcaaaaaagacaaaagcaattatttactggtattggtgcaatgttattagtgtttatgctttttgctttgattatgacgattggcagagattttatgggctttttacatgtagatgtattacagaatgccatagcaagcaaaataaaggcttctgagggctttatttcagttttatggtacattgcttatggtttaccttatatactcgctatagggctatttatttggttgtatgagtggataagagcaagattccatgattaa

SEQ ID NO: 2431 - DNA, 627 bp, Staphylococcus aureus
atggaaaaaaatgtagaaaaatcattcataaagataggtttatattttcaaatagcttatatagtactcatggctataactttatgtgggtttgtaatttgctatggactaattttcggccttttctatttattrtcaggtagcasagctgattattyaatagtaacratagttatatcggcaataatttctatatttgtaattatactttcaatcgtacctgtcatcgtattggcatctgacttatttaaagaaaggatttcaaawggtgtcatattaattgtattggctattatygctttagtattatgcaactttgtatctgcaatactctggtttgtttcagccatatctattttaggtagaaaaaaattagtakctrcakcagatactaccactattcaaaaaagtaaagggaacgcaaatcaagcatcacataaagacacgtgtaaaaaggaacttgatagtcaagacatgatggaacatcctgagkttaaaaatcccacgactaaaaacctwgaaggattwaacgaagaartacataaagatgaagctacaactaaagttgwcagtgataayacgsaaccgcckattgaatcaaaagrccatgtctcgaaaaaagattga

SEQ ID NO: 2432 - DNA, 1530 bp, Staphylococcus aureus
atgaaatctttatttgaaaaagcacagcagttcggcaagtcctttatgytacctatcgcaatcttaccagctgcaggtctattgttgggtatcggtggtgcattaagtaatccaaacaccgttaaagcataccctattttagatattaccttattacaaaatatttttacattaatgtcagctgcaggtagtattgttttccaaaatttaccrgtcatctttgcaattggtgtcgcaatcggattatctagaagcgataaaggtactgcaggtttagctgcrctgctcggtttcttaattatgaacgcaactatgaatggcttattaactatcacgggcacattggcaaaagatcagcttgcacaaaatggacaaggcatggtgctcggtatacaaacggttgaaaccggtgtttttggcgggattatcacaggtattatgaccgcaatacttcacaacaaatatcacaaagtggtattaccaccgtatttaggtttctttggtggctctagatttgtccctattgtcacagcatttgccgcaatctttttaggtgtattgatgtttttcatttggccaagcatacaagccggcatttatcatgtkggtggatttgtaacgaaaacaggtgccatcggtacttttgtttatggcttcatcttaagattgttaggtccactcggtttacaycatattttttacttaccrttttggcagacggcacttggtggtactttagaagtcaaaggkcacttagttcaaggtacgcagaacatcttctttgctcaacttggtgatccagatgtgacgaagtattattcaggtgtgtcacgctttatgtcaggccgttttattacgatgatgttcggcttatgtggtgccgcacttgcaatttatcacacrgctaaacctgaacataaaaaagttgtcggcggtttaatgttatccgctgcactcacttcatttttaacaggtattaccgaacctttagagtttagtttcttgtttgtcgcacctattctttatgtaatccatgccttctttgatggattagcatttatgatggcagacattttcaacattacaattggtcaaaccttcagtggaggctttatcgatttcttactytttggtgtgctacaaggtaatagtaaaacaaactacctataygtcatacctattggaattgtgtggttctgtttgtattacatcgttttcagattcttaattacgaaatttaatttcaaaacacctggtcgwgaagataaagctgcagcacaacaagttgaggctactgaaagagcacaaactattgttgctggtttgggaggcaargataacattgaaatcgttgactgttgtgcaacgagactacgcgtyacacttmatcaaaatgacaaagtcgataaagtaytactcgaaagtactggtgccaaaggtgtaatccagcaaggcactggtgtgcaagtaatttayggkcctcacgttacagttatcaaaaatgaaattgaagaattgctcggggattaa

SEQ ID NO: 2433 - DNA, 1083 bp, Staphylococcus aureus
atgactgaaagaatattagaastaaatgatttgcatgtttcctttgatattacagcaggggaagtgcaggcagtgagaggygtagatttttatttraacaarggggaaacattggcaattgttggtgaatcaggttcaggtaaatctgtracaacaaaagcaattacaaaattattccaaggggacacaggaagaattaaaaagggagaaattttatttttaggggaagatttagcaaaaaaacctgaaaatgagttrattaaattacgtggmaaagatatttcaatgatctttcaagatccaatgacatctttaaacccaackatgcaaattggtaaacaagtcatggaaccattaattaagcacaaaaattatagtaaagcacaagctaaaaagckcgcattggaaatactaaatcttgtaggwttaccaaatgcagaaaaaagatttaaagcatatccwcatcaattttcaggtggacaaaggcaaagaattgttattgcaaccgcattagcttgtgaacctaaagtgctsattgctgatgaaccaacgactgcattagacgtaacgatgcaggcacaaattttagatttaatgaaagaactacaacaaaaaatcgatacwgcaattatttttataacgcatgatttaggggttgttgcgaatattgctgatagagtggcagttatgtatggtggtcaaatggttgaaacaggagatgttaacgaaatattttatgatccaaagcatccatatacatggggattattatcgtcaatgcctgatytatcaacaacaaatgacacaccattactagcgattcctggagcgccacctgatttattacacccacctaaaggtgatgcatttgcgagacgtagtcaatatgcattagatattgattttaaagtagaaccrccgtggtttaaagtttcaccgacacattttgtgaaatcttggttattagacgcacgtgcaccaaaagttgaactacccgagctggtaaaacaacgtatgaaaccgatgcctaataattatgaaaaaccactcaaggtagaaagggtgtcgttcaatgaaaaatga

SEQ ID NO: 2434 - DNA, 1095 bp, Staphylococcus aureus
ttggaggaaatgacgatgaggatagcgattcttggcgctacwaacattaagcatatgtcattattatcacattatttaaaccayattgatttgaayatyaatgargtggacattatatayactgacaaatatgatatcgaagaamatatccaaggcatyaataattactataaatataragtagatattaaagaagattggwcwtttatcaaaaaagctattgcttactatcgatttagrccataygcyawgaaaattctyraagaaaatcrttatgattttgtcatagtatggggaagttayacaggmcacttatttaaaagktttytagaaaramrctayaaarataaattyattttaaatatmagrgaytayttttttgaaaataataaacttattaagtatagaatgaaaaaratygttgatgcyagcaggstracaacattatcttcagaaggttttcttaaatttttacctaaatctgaaaaatatagaattatttatagttataacatgartattattagagaaagtaatgtrascgawgrrttyaaaaaamgatggccaattaatataggttttatwggyaatgtyagatttaaygagataaatcaaaarttgataaaggaactggcaaatgattcaaggttccatatgcaatattttggaacagggtckgaaraattagaagyctttgcwcgagaaaattwtattaataatrtwacrttttctggyggbtttgayttgraagaaacaccgaaatatttaaatgaaattgatatacttaataatttgtttggtaatmaaaatattgctttagatactgctttatccataagaatgtattatgcgttgtttttaaayaaacctattattacaacagaygatacattcaccgctacagaagctaataaattcggactgggttttagtrttaatccagaaaatttaaaaggtattggtgatgaattgatggattggtataacaatttgratgtaatkgacattaatcataaaagagaagcttatagaaaygatgtaattgraaataataaacagttctatcaagagataggcaggatatttaatgartaa

SEQ ID NO: 2435 - DNA, 1395 bp, Staphylococcus aureus
atgartaagatatayaatgtcacttcatatgttatygccattttaatgtttccttgccttatgttaggtgataaacctttattrtttttagcacctataagttatggagtaggaaagctctttataagcttctcraataatccgaattttaaattttcgaaaattgtatacgatgttttaggttttcttagattagtatttatacctgctatgatagtgtttttccaggattcaactatagataatttaccattaggacaagmttattttaatcaagcrgttatttatatgagtgtrgagtttatcataggctcrctatttatattratactatctaaattattcaaacatgaagtgrtatcaagaartagctttacactttctggwtcatcaatttattacattgtgtttggtcttgttatttgtgggatttttgtagcttttccygaagtgcgyaaaaayatatcatttttaattattaaaacagatgcaatgggaagaggaaccgaagyaacaagtggtttaaatgtyctttttgtaatgctrtttcaacttgccttagcrttattattcttaataatcgcatatgcttcatataaaaagtataaagagaatcctaaaattatttatgttrtawtrccgctagctataggrattttaaatattagtttaattgttggtgaaagaagaagttaycaactttatacratggttgctgttttaacagtggtgtcamtcttgttttctaagcayaaaagacgtatcaatatcrttattatwtctgtwggwattttcgtattagcattgatgacactatataaagaattgtatgtgtttaattatagttcatatagcgaggcgttaaatagtacragtgtaagtaatcttaaratagttgacacgttgcartcatatttttatggacctagcaatattgcagcttctatagactatttgaattactataatggttcgttyaaacaatatttatttgataatacyagagctgtttttggstttaatttcttyktagataaaaagcagttgattactagccaactttttaaccaattgatatatggtagtaaacaattgactggtcatctwatttcgagtgctggatatggaattatttattttggacccttattcttctatttgaatttaattgcaaatatcttttttgcatttctgagtgagtatattattcggaagagtcattcgttagaagtgatatttattggtacatatatttatatgagacttattacgagtatttttagtcacccgacaccattaatcacattgatttctatgattttagttgtatatgttatagctattatcccaggcattataataaaaaaatttactaaaaaagtagggatagaatga

SEQ ID NO: 2436 - DNA, 558 bp, Staphylococcus aureus
atgattgtaaaaacatttatgaaatcgaaaatatttagattaatgaatacaccactattattattttataagaaagaatatttaactggatattattttgaaaataaagtggctggatggttatgggcrtggaaagctgttccgttcaagytgttaggaataaatacragyttgccatttcctgcagatataactgttagaatgcataaccctaataacattgtttttgataaaaatgatattcatattttycaatcgcccgggacgtattttaataatttttcagcagttatatatataggtagaggtgtttatatagcgccwaacgtaggtattattacagctaatcataatattaaaaatttgaagtcacatgcaccaggtgaagatgtcaaaatagggaattatagttggattggaatgaactcagttatattaccaggagtagaattgggggaacatacaattgtaggggctgggtcrgttgtaacaaaaagttttccagaaggtaacgttgttataggtggcaatccagcgaaartcatcaagaaaatctga

SEQ ID NO: 2437 - DNA, 1251 bp, Staphylococcus aureus
ctgaggttaattatgagattaaataaatttattggcgattcgttyttaatgattttaagyagtggcatcgctcaagtcatattaatcatcactaccccaattattacaagactatattcacctrcagaatttggtgagtttacaattttttcaaatatcgcaatgattttaataccaataataaatgcragatacgatttrttgattgtgaatrcyaaaaatgaccgtagtgctaatatactttcacaaatcagttttttgatatcattgcttattttattaatactgataccaatayttgcsattagtgcatgkttrtacccaaactttatattagattttattttcattattattatgttgtttttggtaagtttaacaaacatwtttacaaattatctaaataaggaamgraartataaagtgttaagtttgatyaatgtgtttagagctggatcaatggctttacttcaaatyattttcggacttttakcattaggaagtytaggattaattattggtttttcattatcctatatcrcaggcattacactaggatataaaacgtttaaaaagcactttaatattgtgagarataargaagaaactaaagcattatttttagaaaataaaaatcagttagtttattcaacaccatcaatattattaaatagtttgtctttctcrgttgttgtgttctttataggtattttgtataccaatacagaagtrggtatttatggtatggcyataagagtaytaggyataccagtgacaattatttcaytagggttatcaaaaatatttatgcaacaagcyaatgactattatattgaayrtggtaacttccgaaatttattacttaaatttagttccayactrgttatmgtttckataattctttatgtgccactttatttrttyagtgaagaattagtcaatatattattaggacayagytgggttgacgcaattacagttataaaaattgttatyccattatttgttataaggctgattgtatcaacggtatcactttctgtgattgtattacaaaaacaacagttagaattaatactrcaagcgttatttttaataggtactactgyaacatttgttatatcaaaaatgcttaatytaacttttttaaactttgtatctattaatacarytgttttaatcgtatcktacatgatatttttcatagcactctattattttgctaaaaataaacagttcaaaaattcttag

SEQ ID NO: 2438 - DNA, 942 bp, Staphylococcus aureus
atgaaaaatgatgaagtgctattatcyattaaaaatttaaagcaatattttaacgcaggaaagaaaaacgaagtgagagcgattgaaaatatttcgtttgawatatacaaaggrgaaacattaggtttagtaggagaatcggggtgtggtaaatctacaactggtaaatcaattatyaaacttaatgatattacaagtggagaaattttgtatgagggtattgatatacaaaagattcgtaaacgtaaagatttgcttaaatttaataaaaagatacagatgatttttcaagacccatatgcgtctttaaatcctaggttaaaagtaatggatatagtagctgaaggtattgatatccatcatttagcaactgataarcgtgaccgwaaaaaacgtgtctatgatttacttgaaactgttggattaagtaaagaacatgccaatcgytatcctcatgaattttcaggtggacaacgccaacgtattggaattgcccgtgyattagccgttgaaccagaattyattatmgcrgaygaaccwatwtcrgcattggatgtttcaatycaagctcaagtagtyaatttrttattaaaattacarcgtgaaaraggkattacrttcctatttatwgcwcatgatytatcratggtgaagtatatytcwgatcgwattgcagtsatgcattttgggaaaatwgtwgaaatyggaccrgcagamgawatttatcaawatccattacaygattatactaagtctttattrtcrgcmattccwcaacckgatcctgaatcrgaacgyagtcgyaaacgatttagttatattsatgatgaagcaaataatcatttaagacaattacatgaaatwagaccrmakcaytttgtctttagtactgaagaagaagcggcacractacgaraaaatwwrttggtracacaarattaa

SEQ ID NO: 2439 - DNA, 555 bp, Staphylococcus aureus
atgacagatgtaatyattgtacattctatgcatggaaatagtagaaatcattggtatcagtggttggagcataacttaactttagaaggatatgacgtaacattatttaattttgaatcccctgaagcgaakacagtggatcagtggattgaagctatgacgaaacaaattaatgtacgcaaaaaggatacatattttgtaacacatggtttaggttcaatcacagctttaaaatatattgaaatgattgatcagccgattgaaggctttttyagtatagcgggctttaaagaagatgcagaaaatatagatttagatatygatttaagtaatgtaacyattgattacgataatattaaaaagaaagttgacaatttttacggattgagttctaaaaatgacaaatacgtttcatataaagaracycagcgtttaatgaatgcattagaggggaacttgcraatcgtggaagatggagggcacttcttagaagaggatggcttcgaaacatttacagcgttgcaagatcggatgcaagattacatgacacgatag

SEQ ID NO: 2440 - DNA, 3076 bp, Staphylococcus aureus
ttgacaaagaaatatttaaacacccagaatgaaatatcagcattttggaatactcaaaagatatttaaaaaatcaattgacaatagaaaaggacaggaaagttttgttttttatgacggccccccaactgcaaatggccttcctcatgctggccatgttcttggaagagtaatcaaggatttagttgcaagattaaaaactatgcaaggtttttatgtagaaagaaaagcaggatgggatacccatggcttaccagttgaattagaggttgaaaaaaaaattggaattaaaggaaaacaagacattgaaaagtatggaatagaaaattttataaatgaatgtaaaaaaagtgtatttaattatgaaaaagaatggcgggatttttctaaagatttaggatactgggttgacatggactccccctatataactcttgagaataattatattgaaagtgtatggaatatattatctacattccataaaaaaggactattatataagggacataaggtgactccttattgtacacatgatcaaaccgctttaagttctcatgaagtagcgcaaggctataaaaacgttaaagatttatcagctgttgttaaatttcaacttacaaatagtaaagatacttatttcttaagttggactaccactccctggactttgcctgcaaatgtagcattagctataaataaagatcttaattattcaaaaattcgggtagaaaatgagtattatatcttagctacagatctaattaattctataataactgaaaaatacgaaattattgataccttttcaggaagtaatttaattaatttaaaatacattcctccttttgaaagcgacggtttagttaatgcatattacgttgttgatggagaatttgttactaactcagaaggaactggtattgttcatatagcaccagctcatggggaagatgactaccaattggttttagagcgtgatttggatttcttaaatgttataacaagagaaggagtatataatgataggttccctgaattagttggtaataaagctaaaaatagtgatatagaaatcataaaattattatccaaaaaacaacttttatataaaaaacaaaaatatgagcataattatcctcattgttggagatgtggtaatcctttgatatattatgcgatggaaggttggtttattaaaacaactaattttaagaatgaaattattaacaataataataatatagagtggtttccttctcatattaaggaagggagaatgggaaatttcttagaaaatatggttgattggaacattggtagaaatagatattggggaacaccattaaatgtatggatttgcaatgattgtaatcacgaatacgcaccaagtagtattaaggatttacaaaataattccatcaataaaattgatgaagatattgagttgcatagaccttatgttgataatatcactcttagttgccctaagtgtaatgggaaaatgtctcgagtagaagaagtaatcgatgtttggtttgatagcggctctatgccgtttgctcagcatcattatccttttgataaccagaaaatttttaatcaacactttccagctgattttattgcagaaggagttgatcaaacgagaggctggttttacagtttactagtaatttctactattctaaaaggaaaatcttcttataaacgtgctttatctttaggacatattctagacagtaatggtaaaaaaatgtctaaaagtaaaggaaacgtttattaatccaactgaattaattaataagtacggagccgattctttaagatgggccttaatttcggatagtgctccatggaataacaaaagattctcagaaaatatagtagctcagaccaaatcgaaatttatagatacgcttgataatatttataaattttataatatgtataataaaatagatcactataatcctaataatgaaattacaaaaagtagaaatacattagataattgggctctttctcgcttaaacaccttaataaaagaaagtaatatttatgtaaataattacgatttcacttccgcagccagattaattaacgaatataccaatacaataagtaattggtatatcggagattcgagaggacgattttgggaacaaggaatttctaacgataaaaaagatgcgtacaatacgctttatgaaattttaacaactttatcaagactagtggctccatttgttccatttatatctgaaaaaatccattataatttgactggaaaaagtgtgcatttacaagattatccacaatataaagaaagttttattaatcaagcattggaagatgaaatgcataccgttataaaaattgtagaattatctagacaggctcgcaaaaatgcagatttaaaaattaagcaacctttatcgaaaatggtgattaaacctaatagtcaattaaacttaagttttttacctaattactattcaataataaaagacgaattaaatataaaaaacattgaattaactgataatattaatgactatattacctatgagcttaaattgaatttttcttctgtgggaccaaaactagggaacaaaacgaaaaatattcaaacattgatagactccctatcagagtatgataaaaaaagtttaattgagtctaataacttcaaaagtttatcttctgatgctgagttaactaaggatgattttataattaaaaccttacctaaggatagttatcaactcagtgaagataatgactgcgttatattattagataaaaatttatctcctgaattaattcgcgaaggacatgctagagagctcattagattaattcaacaattaagaaaaaagaaaaatttaccaataaatcaacgtattgatatttatatcggtgtaactggggaattattagaatcaataaaaaccaataaaaatatgtttaaagaaaatttcgtgattaaaaatatacacttaaatgttatagatgaatatgaaaatactattcattttaataataaagaaataaaaatttccttattatattaa

SEQ ID NO: 2441 - DNA, 1656 bp, Staphylococcus aureus
atgacragaaarttwaraacrctkattttaattttgattgcyacaattgcattaagtggttgtgctaatgaygatggtatttattcagataaaggtcaagtattcagaaaaattttgtcakcagacttaacatcmcttgatacatcattaatwacggatgaaatatcttctgaagtgactgcgcaaacattcgaaggtttatayacattaggaaaaggtgacaaaccggtgttaggtgttgcgaaagcttttcctgaaaagagtaaagrtggkaaaactttaaaggttaaattaagaagcgatgctaaatggagcaatggtgacaaagtgactgcrcaagaytttgtttatgcttggagaaaaacagttgaccctaaaacwggttctgaatttgcatacattatgggggacattaaaaatgcgagtgatattagtactggtaagaaacctgtagagcaattaggtatcaaagcattaratgatgaaacattacaaattgawttagaaaagccggtwccatayattaatcaattattagcacttaatacmtttgcacctcaaaatgaaaaagttgccaaaaaatatggtaaaaattayggtacggcagctgatagagcggtatacaatggtccatttaaagttgatgattggaaacaagaagataaaacsttactatctaaaaatcagtattattgggataaaaagaawgtaaaattagataaagtgaattataaagttattaaagacttacaagcmggtgcatcattgtatgatactgaatcwgtagatgacgcagttattacwgcagatcaagtaaataaatataaagayaayaaaggattaaactttgtgttaacgwctgggacattttttgtaaaaatgaatgaaaaacaatatcctgattttaaaaacaaaaatttaagaytggctatcgcacaagcaatagataaaaaaggatacgttgattcagtgaaaaacaatggytcaattccttccgatacactaacagccaaaggmattgcgaaagcrcctaatggcaaagattatgcgagtaccatgaattcrcctytaaaatataatcctaaagaagcaagagcrcactgggacaaagctaaaaaagagttaggtaaaaatgaaktgwcattttcratgaacacagaagatacaccagatgcaaaaatatctgctgaatayatcaaatcrcaagttgagaaaaatttaccaggagttactttgaaaattaagcaattrccgtttaaacaaagagtatcactagaactgagtaacaattttgaagcatcacttagtggttggtctgcagattaccctgatcctatggcttatttagaaacaatgaccacaggtagcgcacaaaataatacagactggggtaataaagaataygatcaattacttaaagtagcragaaccaaattggcacttcaaccgaacgaacgatatgaaaacttgaaaaaagcagaagaaatgttcctaggagatgcaccggtagcaccaatttatcaaaaaggtgttgcacatttaacaaatcctcaagtaaaaggattratttaccataaatttggtccaaataactcacttaaacatgtatatattgataaatcgatagataaagaaacaggtaagaagaaaaaataa

SEQ ID NO: 2442 - DNA, 1401 bp, Staphylococcus aureus
gtgactaaatcagtggctattataggagcggggataacaggtttatcaagtgcatattttttaaaacagcaagatcctaatattgatgtaaccatctttgaagcatcgaatcgtccggggggraagattcaatcgtatcgtaaagatggttatatgattgaactagggcctgaatcttatttaggtagaaaaacgattatgacagaattagcgaaagatattggattagaacaagatattgttacaaatacgactggacaatcwtatatttttgcgaaaaayaaattrtatcckattccaggtggwtcaattatgggwattccracagatatyaaaccrtttgtkacwacwaaattaatwtcrccayttggwaarttaagagcaggrttwgatttawthaaaaarcctaywcaaatgcarratggtgacatttctgttggtgcatttttcagagcaagattaggtaatgaggtacttgagaayttaatwgagcctttaatgggtggtatttatggtaccgatattgataaattaagtttgatgagtacgtttcctaattttaaagaaaaagaagaggcattcggaagtctgataaaaggtatgaaggatgagaaaaataagcgtctgaaacaaagacaattatatcctggcgcaccraaaggacaattcaaacaatttaagcatggtttaagytcatttattgaagcattagaacaagatgtkaaaaataaaggtgtgacaatacgytacaatacgtcagtggatgatatwattacatctcaaaarcaatataaaattgtttacartratcaacwagaagawgtrtwygatggsgtattagtracracaccrcatcaagtbtttttraattggttcggacaagatccagcatttgattaytttaaaacgatggatagtacgactgttgcaactgttgtattggcatttgatgaaaaagayattgaaaatacyyatgatggtactggcttcgtrattgcgagaacgagtgatacwgacattaccgcatgtacttggacatcgaaaaaatggccatttactacaccrgaaggtaaggttttgattcgtgcgtatgtaggtaaaccaggtgatactgtggttgatgatcatacagatratgaattagtatcgattgtacgtagagatttaagtcaaatgatgacatttaaaggygatcctgaatttacaattgtcaatcgtttgccgaaaagtatgccacagtaccatgtyggtcayattcaacaaattagrcagattcaagcacatattaaacaaacatatccacgacttagagtaactggtgcatcttttgaagcggttggactacctgattgtattacrcaaggtaaagttgctgctgaagaagtaatcgcagagttgtaa

SEQ ID NO: 2443 - DNA, 1716 bp, Staphylococcus aureus
atggggaagctwattaaatatatttcaatacttcttattgtcgttttagtgttgagygcttgcggaaaaagcagtaataaagatgaaggagtaaaagatgctactaaaacrgaarcstcaaaacataaaggtggtacbytaaatgtagcrttaacagcaccgccaagtggtgtttattcttcgttattaaatagtacacatgcrgatkctgtagttgarggatattttaaygaaarcttattarcaaytgwtrawwwrwyamktcctaarkcatatattgcttcatggaaggacatcgagccggctaagaaaatagaatttaaaattaaaaaaggtattaaatggcatgatggtaatgaattgaaaattgatgattggatttattcaattgaagtcttagctaacaaggaytacgaaggtgcttattatccaagtgtagaaaatatccaaggtgcraaagattatcatgaaggaaaarctgatcatattarcggattgaagaaaatagatgactacacwatgcaggttacatttgataaaaarcaagaaaattacttaacaggatttattactggacmtttattaagtaaaaaatatttatcagatgtaccaattaaagatttagcgaaatcagataaaatccgaaaatatcctattggtattggaccrtataaagttaagaaaatcgtyccaggtgaggctgttcaactygttaaatttgatgattattggcaaggtaagcctgcaytagayaaaatcaatttaaaagttattgatcaagckcaaattattaaggcaatggaaaaaggcgatattgatgttrcgaatgatgctaccggtgcaatggcaaaagatgctaagtcatctaatgctggtctcaaggtattatctgcgccaagcttagactacggtttaataggattcgtatctcatgattacgataaaaaagctaataaaactggtaaagtgagaccaaaatatgaagacaaagaattacgtaaagcaatgctttatgcaattgatagagaaaaatggatyaaagcrtttttcaatggttacgctagtgaaatmaatagttttgtaccatcwatgcattggatagcagcyratcctaaggamctaaaygattayaaatatgatcctgaaaaagctaaaaaaatcttagataagttaggttataaagatmgagatggtgacggatttagagaagatcctaaaggtaataaatttgagattaactttaaacatwattcaggttcwaatcctacttttgaaccaagaactgctgcgataaaagatttctgggaaaaagttggcttgaaaacaaatgtgaagttagtagaattcggtaaatataatgaagacttagcaaatgcatcwaaagatatggaagtgtacttcagatcatgggcaggwggtacagatccagayccatcagatttataccacactgatagacctcaaaatgaaatgagaacagttttaccaaaatcagatcaatatttagatgatgcrttagacttcgawaaagtaggcattgatgaaaagaaacgtaaagatatttatgttaaatggcaaaaatatatgaatgatgagttacctggattaccaatgttccaaggtaaatcgataactatwgttaaygataaagtacgaaacttagacattgaaattggaactgatcaaagtttatataatttaactaaagaagcttag

SEQ ID NO: 2444 - DNA, 924 bp, Staphylococcus aureus
atgactaaaaaaatgggrttattagttrtggcttatggcacaccttataaagaaagtgacatagagccatattatacagayattagacatggtaaacgtccatctgaagaagaacttcaagatttgaaagatagatatgaatttataggtggtttatcaccattagcaggtacaacagatgaccargctgatgcrctagtttcagcattaaataaagcatatgcagatgttgaatttaaactatacttaggattaaaacacatttcaccatttatcgaagatgcggttgaacaaatgcacaawgatggyattactgaagcaatcackgtagtactagcaccacattattcttcattttcagtaggatcatatgacaaacgtgctgatgaagaagctgcaaaatatggtattcaacttacacatgtgaaacattattatgaacaacctaaatttattgaatattggacgaataaagtcaacgaaacattagctcaaataccggaagaggaacayaaagacacggtattagttgtttcggcacatagtttgccaaaaggtttaatcgaaaagaataatgatccatatccacaagaactagaacatactgcgcttttaattaaagaacaatctaatattgaacatatcgcgattggttggcaatctgaaggtaatacaggtacaccttggttagggccagatgtacaagatttaacacgtgatttatatgaaaaacatcagtataaaaactttatatatacgccagtaggttttgtatgtgagcatttagaggtgctttatgacaatgattatgaatgtaaagtwgtttgcgatgayattggygcgaattattatcgtccaaaaatgccgaatacacatccattatttatcggtgcaattrttgatgaaatcaagtctatattttaa

SEQ ID NO: 2445 - DNA, 987 bp, Staphylococcus aureus
atgaataatgtattgttagaggttaaagatttagaaacatcattaaaaataaataatgaatggttagcaactgttgaaaatatttcttttgaattatctaaaggagaagttttgggtatagtaggggaatctggttgcggtaagtccatattaagtaagtcaattattaaattattaccagaaaagatatctaaactaagtartggagaagttatatttgatggtaaacgaatcgatacgctcaatgagaagcaattgctagatattcgaggaaatgatattgctatgatttttcaagaacctatgactgctttaaatcckgtatttacyataaaaaatcaacttgtggaatctataaaatcacataaaaaaatttctaaaaaagaagcaaataamttagcaaaagatttactaaaaaaagttggaattgcwagacaagatgaaatattaaatagctatccycatcaattatctggtggtatgagrcaaagagtaatgattgcaatggccatttcatgttctccyaaattattaattgctgatgaacctacaacwgcwttggatgtcacgattcaagcgcaaatattagacttattaaaagaattgcaaaaggaaacgcaaatggcaattatgatgattacacatgatttgagtgtrgttgctgarttttgcgataaagtyttrgttatgtatgcaggtcaaattgtagaatttggaggcataaaagaaatactacacaatccgaaacatccttatacccaaaaattattatcwacaattccaaaacttaaagaagrgcagaaacgacttgaaacratagaaggaattgtgccatcaatccaagcatttcacgttaataagtgcagatttgcaaatagatgtaacaaaaaamtggatatttgtaataatcaatctcctaaaatgcatgtttgtgaagaygtcattgtacgktgtcatttrtacmaaaatgaatataaggagatataa

SEQ ID NO: 2446 - DNA, 1038 bp, Staphylococcus aureus
atggtgcataataaaaacaatacaattttraaaatgatyaaaggtgaagaaacrwcacatacacctgtttggtttatgcgacaagctggccgttcgcaaccagaatatcgaaaattgaaagaaaaatattcactattcgatattacacatcagccggagttgtgcgcttatgtwacacatttaccagttgataattatcatacagatgcagcaattttatacaaagatattatgacaccattaaagccaattggtgtcgatgtagaaattaaatcgggtattggtccagtgattcataatccwatcaaaacaattcaagatgttgagaaactttctcaaatagaccccgaacgagatgtaccatatgtattagatacaattaaacttttaacagaagaaaagttaaatgtgccgctaataggatttactggggcaccatttacattagcgtcatatatgattgaaggcggaccatcgaaaaattacaattttacaaaagcgatgatgtatagagatgaagcaacatggtttgctttaatgaatcatttagtygatgtatctgttaaatatgtaacagctcaagtcgaagcaggtgccgaattgattcaaattttcgattcatgggtaggtgcattaaatgtcgaggattacagacgttacattaaaccacatatgattcgattaatcagtgaggttaaagaaaaacatgatgtgccggtaattytattcggtgtaggtgccagtcatttaatcaatgaatggaatgatttrccgattgatgtattaggcctagattggagaacgtctattaatcaggctcaacaattaggcgttactaaaacattacaaggkaatttagatccatcaattttattagcaccatggaatgtcattgaagagagattgaaaccaatattagatcaaggtatggagaacggtaaacacatctttaatttaggacacggtgtwttcccagaagtgcaaccagagacgttacgtaaagtaagcgrattcgtacacacatatacacaaagataa

SEQ ID NO: 2447 - DNA, 981 bp, Staphylococcus aureus
atggaaaatattttagaagtmaaycaartaaaaaaatactacaaaattaaaactggattattacaaaaaactcagtacgttaaagctgttgatgacgtatcgttttcaataaaaaaaggacaaacttttggattrgtaggmgaatcrggttgtggtaagtcaacgttaggtaaagtgattatcagrcttgaagatgcaacttcaggytcaataattgttaatggtgaagatataacaagattacaaggtaaaaaactsagaaaatcacgacaacaatatcagatgatatttcaagatccgtatgcatcattgaatccgatgcaaatggttggagatatcatttcagaacctattttaaattataaaaaattgccaaaagaagaaataaaaaaagaagtwctatatttattaaaatgtgttggyctaagtgaagatgcatattataaatatgcacatgaattttcaggtggacagagacaaagagtgggaattgcaagagcattggctttgcgtccgagtttaattgttgctgatgagcctgtaagtgcattagatgtatctgttcaatctcaagtactgaatttattaaaagatttacaagarcaatttaasttaagctatttatttatcgcrcatgatttaagtgtagtraaacatatwagtgatgtmattggagttatgtatttaggtcatatagttgaaatygcatctgataaagaaatttatgaaaatcccaaacatccwtatacaaaagcrttratttcatcaataccacaaattgataarcwwaataamaatagaattatattaaarggagaattaccttcgccaagtaatccgccrcaaggttgtcctttycatacwagatgtccrattgcwmaagatawrtgyaaaraaartatrccasaattaaaggacattggtraygaacatcaagtygcttgtttytaygtarataaagtaggtgatttaaatgvttaa

SEQ ID NO: 2448 - DNA, 108 bp, Staphylococcus aureus
atgattaaatgtcagttttatgacatttatttattgaaaatacgaacgaatgagcgatatgataatatagataagaatgattttaatttaggaggcctttatggtgca

SEQ ID NO: 2449 - DNA, 273 bp, Staphylococcus aureus
atgcctagaacaaagttacaagattttccatyaaaagaaaatacagttacagaaccrrarcaagttgtagtaaatccgttgtttgcgaaacctaatrcactagctggtatttttggaatttcatacagttcggtcaatcgtattttaaaagagtgggaaaaagatcataaaggtattratgatttatattattcactatcatcawcaatgattgttatcagtattccgcgattcgaggagtacatgaaggcrcgtcataaaaaatggatgtag

SEQ ID NO: 2450 - DNA, 963 bp, Staphylococcus aureus
atgvttaaattaatacttaaaagrttaggkttaatgatyccgttactaattttaatytcwatwgttgtattttcattagcwatcatwcaaccaggagatccattttcagatytacaaaacggwaaaataaaacaagaagcrataaatgcacaaagggaaaarttaggyctcaacgactcwataycacatcaatayattagatgggtcaatcatgttatacayggtgatttaggggagtcaatcaaatataaraggccggtaattgatgttattgaggaaagaattccaaatacaatattactcggtgctatgtcattaattattacttatattatctcatttgctttaggaataacgtcaggtagatattcttacagtttgackgattatactgtgcaaatatttaattatttgatgttagcyattccatcttttattgcgggagtatttgcaatttttattttttcttttgaattacaatggttyccgtttcaaggttctgttgatattaaccttaaagaaggtacttttgaatattatatgagtaaaatwtatcayacatttttrcctgcattmactttaggwttattatctactgctggttatattcaatatttacgtaatgatattattgaaaattctaaaaaagattatgtattgacggcaaggtcaaaaggattatctatgaataaaatttataataaacatatattgagaaattctytaatacctattattacatttttaggtgctgatattgtaagtattttaggtggagcygtgattackgagactatcttttcatataacggtatcggtaaattatttttagaatcggtaataggycaagactatccattaatgatggcattaacgttrtttttctcatttttaggtttaytgggtaatttgatttctgatattacttatggatttatagatccaagaattagaagtaactag

SEQ ID NO: 2451 - DNA, 1224 bp, Staphylococcus aureus
atgcrtaaccaagckaccacattatttaataaaagattacatgcccttcgtaaagagaaaaattattataataagtttatatttaatggtcatttcatggtctttttacttattttgctgggtgcatttatttttggatatggtgaatggttaaaacatattccaacgaatatcaattttkcattaatagcagcagtgattgtwgcrttgacatcyatttttccaatgcgaccactsytaaaagaagcggataaaatctttttattaccatttgaaaaacacatgtctcaatttatgcgycatgcgattttatatagytactttgcgcgcatwttaatccaactcattattgttattgtaatgttcccgttgttttacaatattaatcaacataatgtggcattttatatttgttttggaktcagtgcattaatttttccatatgttggtttacgcttaagatggcaatggtatcaatcgggacttaaaacatggcaagttaatttaatatcattyatcayctttgctctaacatattacttactattagctccaaaatggtacatcryatttgtgatggttgctttgcctgtgttaatagaatttttagttaaaaaatataaaccwggctttttgtatccwtgggagaaaatgattgcwatcgaacatcgacatcatatgaattattataaatttgttaatatgttyaccgatgtaaaacatttgaaagaatctgcagtcagaagaagttatctagatatacttttaccagttccaaagggtartaaatttaactctaatgcgatgtatttattcttatttattagaagctttataagagggagagacgcatttaatattatctttaggttagtaattattgcagttttaytwatrgtttggttatcatatccattagtgacagsrrttattggrwgtytwtttgtrtatattatattgttrcaaatggcacaattttattcacarcaagcatatggcttatggcctcaagtgtggcctgtacctgaagakaaggtaatcaaagggtatgaacagtttttatatagattaatgtttgttatttgtactgtgtttgcaktgacatttattataaaacatatgacgttattctatgttgtactcattttctatattgtaggtttattaacgattagaagtattattaaaaagttraaatatcaggaaacattattacgagactaa

SEQ ID NO: 2452 - DNA, 651 bp, Staphylococcus aureus
atgattaaattaatacttaaaagattagggttaatgatcccgttactaattttaatttcaatagttgtattttcattagcaatcatacaaccaggagatccattttcagatctacaaaacggtaaaataaaacaagaagcaataaatgcacaaagggaaaaattaggtctcaacgactcaataccacatcaatacattagatgggtcaatcatgttatacacggtgatttaggggagtcaatcaaatataaaaggccggtaattgatgttattgaggaaagaattccaaatacaatattactcggtgctatgtcattaattattacttatattatctcatttgctttaggaataacgtcaggtagatattcttacagtttgacggattatactgtgcaaatatttaattatttgatgttagccattccatcttttattgcgggagtatttgcaatttttattttttcttttgaattacaatggttcccgtttcaaggttctgttgatattaaccttaaagaaggtacttttgaatattatatgagtaaaatatatcacacatttttacctgcattcactttaggtttactgggtaatttgatttctgatattacttatggatttatagatccaagaattagaagtaactag

SEQ ID NO: 2453 - DNA, 882 bp, Staphylococcus aureus
atgcaaaataagtcaaaatcgccttttaaaattgcattktctaratttattcataataaaattgcaatgttatcgrttatttttttattaatcataactattrtatcaattatagcgccattaatagctccttttccagtgaaccaacaagatttattaaatataaaaggtgaaatgacagcacaaaacattcttggtacagactctggtggtagggataactttagtcgtttgttatatgcaggtcgtatttcattatccattggaattacatctacaataggaatgcttttgattggaattacagttggagtgatttctggttattttggaggtattgttgatacattattaatgagaataaccgaatttgttatgttatttccatttttaatatttgcaattgtattaaatgctgcacttggagataaaattaaaaatccttatggatctgccataattcttgttctagttattatcgtattaagttggggaggtattgcaagacttgttcgtggtaaagtacttcaagaaaaagaaaatgaatactttttggcagcaaaatcaattggtacacccacatataaaattattttgaaacatcttttgccgaatatattaagtgtagttatcgtacaagcaacattgttatttgccggtatgattgtagtggaatcaggattgagctttttaggattcggaattagtaaagcaatwccatcttggggtaatatgttgagtgatgctcaagaaggggatgttataagtggtaaaccgtggatatggatgccacctgctataatgattacattaactatattaagtataaactttgtaggggaagggmttaaagatgcttttaatcctagaggtagacgttaa

SEQ ID NO: 2454 - DNA, 741 bp, Staphylococcus aureus
atgacagttaaagtagaacagcttacaggtggatatggaaaacgccctgtaattaaagatataaattttgaattaaacaaaggcgaaatygttggacttattggccttaatggcgctggtaagagtacaacgattaaacatatgctaggattgcttacacctatggaaggatctctatcaatttcagatatcaacattaatgatgacatagaggcwtatagaagaaagttatcttatattccggaatcaccggttatwtaygaagaactcacattagaggaacayatwgagatgacagcaatggcatatgatattgatcgtgatgaarcgatgaatcgagyaatgccattattaaagacattccgtttagaaaatgarttgaaagtttttccgagtcatttttctaaggggatgaaacaaaaagtcatgattatttgtgcgtttatcgttaatcccgaattgtatattatagacgaaccattccttggmctagatccattaggaattcaatccatgttagatttaatggttgaaaagaaaaacgaaggtagaaccgttctaatgagtacacatattttagcaacagctgaacgttaytgtgatcgttttatcatactagacgaaggtgaagtcgttgcatttggagatttagaagcattgagacaacaaactggcttacataawcaaacrttagacgatatatatattcatgtgacgcaaggtggagatgtacatgcrtaa

SEQ ID NO: 2455 - DNA, 1420 bp, Staphylococcus aureus
atggcaacaactaaaataagctcaacgaaatcaacatcaagagctattaattacgcagaaaaacgtgcagaagaaaaaagtgctttgaattgtgatatagattatgcaaaaagcagttttaaagcaacacgtgaaatgtatggcaaaacagatggcaacgaagggcatgtagttattcaatcttttaagcctaacgaagtaacaccagaacaatgtaatcaactagggttagaattagcagaaaagatagcacctaatcatcaagttgccgtatatacacataacgatacagaccatgttcataatcatattgtgattaattcaattgatttagaaacgggcaagaaatttaataataataaaaaagcactacatgatattcgacaagcgaatgatgaaatatgtgtttcacataatttgtcaatacccgaagaaaaagcgaaattacgttatacacaagcagaatatagcgtattgaacaaagggaaaacatcttggaaagatgagataaggcatgccatagatcaatcgcaagcagcgtcttatgaagaactgggtaatgatttacaacaaaatggcataaaaattgaacgtattacagacaaaacaattacttatcgacatttggaagaagataaaaaagtgcgtgggaagaaattaggcgaagattacgacaaagggggcttagaaattggctttaacagacaaaatgaacaacgagaagaacaagcaagacagagagaacttgaacaggcaagacgagagaaaatcaagcgagataaagagcgagagaaagagtgggctcgatttaatagaagtacgcaagcaattagacagaatagagagcgtagcgaacgagaagaacgagaacgagagcgaaaagctagagaacttgaagaacagaatagaagagctagagaagagcgagcaagacaggaacgagagaacaaacatactcatgaaaagactagaggcttcgacctcgaactttaataataagttagatgtttttgaagaaaagactaagcatgcaagattaaactttgaaacaactgcaaagcactatattaaacgacttgatgaagataatttgaaattagattttcaacaagctattcaagatgaattaagcgatactaaagacgaaatacgtgaagtgacgaaacaagcgagagaagaaacaaaagagtataaagaaatcttagaaagtaaaataaaagaccataacaaagtggttgataaatcgaatacagcgctaaaagtgatgacaaaaggcgttacaaatatattttttgtgctaattatttttgtacttgtaatgcttgtgacaggtccgatagtcatttctttggtattgaacatttatatagctttattaatggttttattgatgaccacgaaagtgcatggcgatatttga

SEQ ID NO: 2456 - DNA, 396 bp, Staphylococcus aureus
atggtaacattatttacttcaccaagttgcacatcttgccgtaaagcgaaagcatggttacaagaacatgacattccgtatacggagcgtaatattttttctgaacatttaacaattgatgaaattaagcaaatattaaaaatgactgaagacggtactgatgaaatcatttctacacgttctaaaacataccaaaaattaaatgttgatattgattcactaccattacaagacttatattcaatcattcaagataatcctggcttattacgtcgtccaattattttagataataaacgactacaagttggttataatgaggacgagattcgacgtttcttacctagaaaagttcgtacgttccaattacaagaagcacaacgtatggttgactaa

SEQ ID NO: 2457 - DNA, 942 bp, Staphylococcus aureus
atgagaaatatagagaatctaaatcccggagattcagttgatcactttttcttagtgcataaagctacacagggtgtaacagcacaaggtaaagattatatgacattacatttgcaagataaaagtggtgaaattgaagcgaaattttggacggctacaaaaaatgatatggcaacaatcaagcctgaagaaattgtacatgttaaaggtgacatcataaactatcgcggaaataaacagatgaaagtcaaccaaattagactagcgacaactgaagatcaattaaaaacagaacaatttgtagatggtgcacctttatcaccggcagaaatacaagaagagatttctcattatttgctagatattgaaaatgctaatttacaacgtatcacacgtcatttattgaaaaaatatcaagaacgattttacacatatccagctgctagttctcatcatcataactttgcgagtggcttaagctatcatgtattracgatgttacgtrttgcaaaatcaatttgtgacatttatccattgttaaacaaaagtttgttatatagtggtattattttgcatgatattggtaaagttagagaattgagtggtcctgttgcgacgtcgtatacagtcgaaggtaayttattaggacacatctcgattgcgagtgatgaagtagttgaagcagctcgtgaattgaacattgaaggagaagaaatcatgttgttaagacatatgattttatctcatcatggtaagttagagtatggttckccaaarctgccatacttaaaagaagcagaaattttatgctatatcgataayatcgatgctagaatgaatatgtttgaaaaggcwtataaaaaaactgacaagggtcagtttacagataaaatatttggtcttgaaaatcgtagattctacaatcctgaatcactcgattaa

SEQ ID NO: 2458 - DNA, 720 bp, Staphylococcus aureus
atgagaatagaacgagtagatgatacaactgtaaaattgtttataacatatagcgatatcgaggcccgtggatttagtcgtgaagatttatggacaaatcgcaaacgtggcgaagaattcttttggtcaatgatggatgaaattaacgaagaagaagattttgttgtagaaggtccattatggattcaagtacatgcctttgamaaaggtgtcgaagtcacaatttctaaatctaaaaatgaagatatgatgaatatgtctgatgatgatgcaactgatcaatttgatgaacaagttcaagaattgttagctcaaacattagaaggtgaagatcaattagaagaattattcgagcaacgaacaaaagaaaaagargctcaaggttctaaacgtcaaaagtcttcagcacgtaaaaatacaagaacaatyattgtgaaatttaacgatttagaagatgttattaattatgcatatcatagcaatccaataactacagagtttgaagatttgttatatatggttgatggtacttattattatgctgtayattttgatagtcatgttgatcaagargtcattaatgatagttacagtcaattgcttgaatttgcwtatccaacagacagaacagaagtttatttaaatgactatgctaaaataattatgagtcataacgtaacagctcaagttcgacgttattttccrgagacaactgaataa

SEQ ID NO: 2459 - DNA, 2937 bp, Staphylococcus aureus
atgataattaaatcacttgaaatttatggttacggtcaatttgttcaacgtaaaattgaatttaataaaaacttcactgaaatttttggtgaaaatgaagcgggtaaatcgacgattcaagcattcatccattcgatattatttggwtttccaactaaaaagtctaaagarccaagrctagaaccacgtctaggtaaccaatacggtggtaaattagtacttattcttgatgatggcttagagattgaagttgaacgaattaaaggcagtgctcaaggtgatgtgaaagtatatttacctaatggtgctgtgcgtgatgatgcttggttacaaaagaaacttaattatatttctaaaaagacatatcaaggtatcttttcatttgatgtactagggcttcaagacattcatagaaatctaaatgaaaaacaattgcaagattatttattacaagcaggggctttaggatcaactgaattcacgtcaatgcgcgaagtgattaatcgtaaaaaagatgaattatataaaaaatcaggtaaaaatccgatyattaatcaacaaattgagcaattaaaacaactagaaagtcaaattcgtgaagaagaagcwaarctagaaacatatcatcgyttagtagatgatcgagataaatcatcacgtcgattagagaatttaaagcataatttaaatcaattatcaaaaatgcatgaagaaaaacaaaaagaggttgctttacatgatcattcacaagaatggaagtctctagaacaacagttaaatattgagccaatcacattcccagaaaaaggtgtrgatcgttacgaaaaagcrcgagcgcataagcaatcgttagaaagagatattggtttaagaaatgagcgtttagctcaacttaaagaagaagcgactcaattagagccagttaaacaatctgatattgacgccttcattagtttgaatcaacaagaaaatgaaattaaaaataaagaatttgaacttactgcaatcgaaaaggatattgcgaataaacaacgtgataaagatgaattgcaakcaaatattggttggtctgaaacgcatcatgacgtagatagytcwgaggcaatgaaaagttatgtcagtgagcaaatcaagaataaacaagaacaagckgcatacattaarcaattagaacgtagtttagaagaaaataaaatcgaagataatgcggttcatagcgaactagattctgttgaagaaaaaatagttcctgaagagacttttgaaaagaaaaaagaatactcacaacaagtcattgaattaaacgaaaaagagaacttgtatagcaarttgaaagaacgtttcgaaattgagcaacaagaaaaacaaaaacgtcaaaaattgttacgaacaacgtttattcttttaacattagtaggtattggtttaactgycttctcatttatttcaaacaacatgttgtttggtattattttcgcagtattaactttagtatttgttatcggtatcatcatgtctaaatcaaaagaagtakattatagcgaggccatcacagatgaaatcgaagwaattaaagcacaactagccattttagatgaaaaytatgacttagattttgatcttgatgagcaatatcgcattcgtgatcactggcaacaagctttgaaaaataaagatattttagaagagaaacgtcagtatattgaaggtcgtttaaatgatgcgaaagggcgtcatgatgaattacaatcgacagttgaraacgttaaggatgaattatacttatcatctaaaatttcaaatgatttaattgttgatagtatttctacaatggcgaatattaaagcattagatcaacatatcagtgatttaaatcaacaacgccagcaattggttcaagaattagatacattctacaatcatsstgaagctgtwacaaaatcacaatttgtttatttcaacaaattatctttattccacgatgtgcaacaatggttgaaatcagctgaagacacgaatgaaaaatggcgtattaatgctgaaaataccaaacttgttacaaatgaattaaatcatttaaatgctcaattagaagaaaataataaagaaattacagcactattcgattttatcaatgttggtactgaagaagatttttaccaacatcatgaagattaccaaacwtayactagtaatttgagtcgttttaatgatttaacwaaatatcttgagaaccaaaactattcttatgaattaagttctagtttaagtgaaaaaacaacwgcacaacttgaagaagaagatcatttattggctactcaagttgacgaatataatgagcaatatcttgaaatgcaagcacaagtcagtgatttaagtgcacaaatcaatcacatggaaactgatacaacgcttgctaatttaagacatgaatatcacagtcttaaaaatcaacttaatgatatcgcaaaagattgggcaagtttaagttatttacaaagtttagttgatgaacacattaaacaaattaaagataaacgtttgcctcaagttattaatgaagcggtagaaatattgaagcatttaacagatggcagatatacgatgattaactataatgaagattcaattacggttaaacatgttaatggtcaattatatgatcctgttgaactaagtcaatctacaaaagaattactttatgtagctttacgtatcagtttaattaaggtactamgaccatattatccgttcccattaattgttgatgatgcatttgttcattttgataaaaarcgtactgaaaaaatgttgaattatttacgatcattatcagaacactatcaagtactatactttacatgtgtaaaagataatattgttccatcaaaagaagtgattacattaaacaaaatagaggaaggcgggaaacgatga

SEQ ID NO: 2460 - DNA, 795 bp, Staphylococcus aureus
atgggggtttcttttaatattatgtgtcctaatagtagcatttattcagatgaaaaatcaagggttttagtggacaagacaaaaagtggaaaagtgagaccatggagagaaaagaaaatcgctaatgttgattactttgaacttctgcatattcttgaatttaaaaaggctgaaagagtaaaagattgtgctgaaatattagagtataaacaaaatcgtgaaacaggcgaaagaaagttgtatcgagtgtggttttgtaaatccaggctttgtccaatgtgcaactggaggagagcaatgaaacatggcattcagtcacaaaaggttgttgctgaagttattaaacaaaagccaacagttcgttggttgtttctcacattaacagttaaaaatgtttatgatggcgaagaattaaataagagtttgtcagatatggctcaaggatttcgccgaatgatgcaatataaaaaaattaataaaaatcttgttggttttatgcgtgcaacggaagtgacaataaataataaagataattcttataatcagcacatgcatgtattggtatgtgyggaaccaacttattttaagaatacagaaaactrcgtgaatcaaaaacaatggattcaattttggaaaaaggcaatgaaattagactatgatccaaatgtaaaagttcaaatgattcgaccgaaaaataaatataaatcggatatacaatcggcaattgacgaaactgcaaaatatcctgtaaaggatacggattttatgaccgatgatgaagaaaagaatttgtaa

SEQ ID NO: 2461 - DNA, 777 bp, Staphylococcus aureus
atgacaaacaacaaagtagcrttagtaactggcggagcacaagggattggttttaaaattgcagaacgtttagtggaagatggtttcaaagtagcagttgttgatttcaatgaagaaggggcaaaagcagctgcacttaarttatcaagtgatggtacaaaagctattgctatcaaagcagatgtatcaaaccgtgatgatgtatttaaygcagtaagacaaactgcmgckcaatttggcgatttccatgtcatggttaacaatgccggccttggaccaacaacaccaatcgatacaattactgaagaacagtttaaaacagtatatggcgtgaacgttgcaggtgtgctatggggtattcaagccgcacatgaacaatttaaaaaattcaatcatggcggtaaaattatcaatgcaacatctcaagcaggcgttgagggtaacccaggcttgtctttatattgcagtacaaaattcgcagtgcgaggtttaacacaagtagccgcacaagatttagcgtctgaaggtattactgtgaatgcmttcgcacctggtatcgttcaracaccaatgatggaaagtatcgcagtggcaacagccgaagaagcrggtaaacctgaagcatggggttgggaacaatttacaagtcagattgctttgggcagagtttcwcaaccmgaagatgtttcaaatgtagtgagcttcttagctggtaaagactctgattacattactggacaaacaattattgtagatggtggtatgagattccgttaa

SEQ ID NO: 2462 - DNA, 987 bp, Staphylococcus aureus
atgttagtagctttaaatgaagaaaaggaacgygtrttagcaactactgcattgagaaagacacaatatttttgtcckgtgtgtggcaagcaagttattttaaagcgtgggctcaaagtaattagtcattttgcacataaacatttagcggaacaaaaatgttttaataatgaawcgattaaacattataaaagtaaattgattttagcacagatgatacagcaacaaggatktaaagtagagatagagccatttttaaaagaaataaaacaaattccggatattttgattaataataaatatgttattgagctacagtattcgccaattccttataaacagattcttcaacgaacggaaggtttaaagaaaatgggatataaagtaagttggttattaaatgatgttgattattgtcataataaagtgaagttcaatcattttcawagtwtgtttattaatccawtcactcgaaaacttcatacgttcaatttagagaaaaaacaaataatkatgtttcaacaaatacaatatttaggcgggcacaaatatgtcgctgaaaaaarraatgccaaaattaktgagttgtttaatgaggcgccttgtgattatcatgctgtttataaattatcaaagttcgcaattaatcaatatatcaaatattgtcgctggcaaaattctgttttagaacccactttaagtgcaatgtatcarttacagttaactgatcamgaagtagtgyacaattatggttatatttttccagagcaaatttatattraaaatcatccwattgagtggcaattacaagttgatttatggttaaagaatggaaaaagcaaattagtaartgacaatcttaattattttaaactgaaaaartttattgttgstctagaaagtaaaacagcaattatagaaaaacttattaacaattatttaaatattwgttcagataraggtaatgacgtgcaaattttgttctaa

SEQ ID NO: 2463 - DNA, 1197 bp, Staphylococcus aureus
atggttaaatttattcattgttcggatttacatttagatagtcctttcaaatctaagagtcatataagccctaaaatttttgaggatgttcaaaaaagtgcttatgaaagytttaaaaayattgtagatattgcattacaacaagatgttgattttgtaattatcgcgggtgatttrtttgatagtgaaaacagaacattacgtgctgaaattttcttaaaacagcaatttgaacgtttacaaaatgaacaaatctttgtttatgtttgtcatggtaatcacgayccwttatcatcaaagatttcatcaaactggccagataatgtttctgtattttcaaataaagttgagacgtatgaagcaattactaaatctggtgaaacaatttatattcacggatttagttatgaaaatagagcaagttatgagaacaagattgatgaatatccatcaagtcaaggccaaaaaggcatacatattggtgtcttgcatggtacgtayagtaaatcttcagttaacgaaagatataccgagttcattttagaagatttaaacagtaaattgtatcattattgggctttaggtcatatacatgaacgtcaacaattaagtgatatgcctgtaattaactattcaggtaatattcaaggtagacattttaatgagcaaggtgaaaaaggttgcttattaatcgagggtgaccacttaaaattaaaractaaattttatcctacacagtatattagatttgaagaagcaactattgaaacggataagacatctaagcaaggtttatacgaggtcattcaaaactttaaagaacaagtgagagaagaaggraaagccttttatcgtttaacgcttgttattaatagtgagacattaatttcacctcaagatttattacaagttgaagaaatgattacagattatgaagaaaacgaaaatcaatttgtatatattgatgagttaaaartacaatatgcacaaaatgatgagtcacctttagttaatgaattttcagcggaattattagtcgatcaaactgtttttgataaagcgatgtcagayttatatttaaatccaagggcatctaagttcctagacgattatggaacattcgaccatacagcattagttaatcgtgctgaagaaatattaaaagctgaaatgagaggtgaacaaaatgataattaa

SEQ ID NO: 2464 - DNA, 1263 bp, Staphylococcus aureus
atgagttatgcagtttgtagaatgcaaaaagtgaaatcagctggactaaaaggcatgcaatttcataatcaaagagagcgaaaaagtagaacgaatgatgatattgaccatgagcgaacacgtgaaaattatgatttgaaaaatgataaaaatattgattacaacgaacgtgtcaaagaaattattgaatcacaaaaaacaggtacaagaaaaacgaggaaagatgctgttcttgtaaatgagttgctagtaacatctgaccgagatttttttgagcaactggatccaggagaacaaaaacgattttttgaggaaagttataaattattttccgaacgatatggcaagcaaaatattgcttatgcaacagttcataatgatgagcaaacccctcacatgcatttaggtgttgtgcctatgcgtgatggaaaactgcaaggaaaaaatgtgtttaatcgtcaagaactgttatggctacaagataaattccccgagcatatgaaaaaacagggttttgagttgaagcgtggtgaacgtggctctgaccgtaaacatattgagacagctaaatttaaaaaacaaactttggaaaaagagattgattttctagaaaaaaatttagcagttaaaaaagatgaatggactgcttatagcgataaagttaaatcagatttagaagtaccagcgaaacgacacatgaaaagtgttgaagtgccaacgggtgaaaagtctatgtttggtttgggaaaagaaataatgaaaacagaaaagaaaccaaccaaaaatgttgttatatcggagcgtgattataaaaacttagtgactgctgcgagagataacgataggttaaaacagcatgttagaaatctcatgagtactgatatggcgagagaatataaaaaattaagtaaagaacatgggcaagttaaagaaaaatatagtggtcttgtagagcgatttaatgaaaatgtaaatgattataatgagttgcttgaagaaaacaagtctttaaagtctaaaataagcgatttaaagcgtgatgtgagtttaatytatgaaagcactaaggaattccttaaggaacgtacagacggcttaaaagcctttaaaaacgtttttaaggggtttgtagacaaggtaaaggataaaacagcacaattccaagaaaaacacgatttagaacctaaaaagaacgaatttgaactaactcataaccgagaggtaaaaaaagaacgaagtcgagatcagggaatgagtttataa

SEQ ID NO: 2465 - DNA, 771 bp, Staphylococcus aureus
atgagaatagtgaatggaccaataataatgactagagaagaaagaatgaagattgttcatgaaattaaggaacgaatattggataaatatggggatgatgttaaggctattggtgtttatggctctcttggtcgtcagactgatgggccctattcggatattgagatgatgtgtgtcatgtcaacagaggaagcagagttcagccatgaatggacaaccggtgagtggaaggtggaagtgaattttgatagcgaagagattctactagattatgcatctcaggtggaatcagattggccgcttacacatggtcaatttttctctattttgccgatttatgattcaggtggatacttagagaaagtgtatcaaactgctaaatcggtagaagcccaaacgttccacgatgcgatttgtgcccttatcgtagaagagctgtttgaatatgcaggcaaatggcgtaatattcgtgtgcaaggaccgacaacatttctaccatccttgactgtacaggtagcaatggcaggtgccatgttgattggtctgcatcatcgcatctgttatacgacgagcgcttcggtcttaactgaagcagttaagcaatcagatcttccttcaggttatgaccatctgtgccagttcgtaatgtctggtcaactttccgactctgagaaacttctggaatcgctagagaatttctggaatgggattcaggagtggacagaacgacacggatatatagtggatgtgtcaaaacgcataccattttga

SEQ ID NO: 2466 - DNA, 393 bp, Staphylococcus aureus
attgaattaattggcgataaatctaccgttcaacaagctattcatgctttacaattaattggttttgaaaatgtaaaaagttaccgtttgccacaaacaaatatcgtcacatcatctattcatagttctgaaatgactggtgaagaacataatgtattagatgttcgtaatgatgatgaatggcgtaaaggtcatttaaaacaagcaattcatattcctcacggtaaacttttaaatgaagatatacctttcgataaaaatgacctaatttatgtacattgtcaatcaggtgttagaagttcaatagcggtaggaatattagaatataaaggatttacgaatattgttaacgttagaggtggctatcaacatttaccagcatttttaaaatag

SEQ ID NO: 2467 - DNA, 1809 bp, Staphylococcus aureus
atgagtcaacaattatckagagaagaacaggaacgtaaatatcctgaatatacatgggacttaacaacaattttcaaagatgatgaagcttttgaggctgcatttaaagaagttgaaaatgagttaggcaaagaagaacaatttaaaggacacattggtgatagtgctgagacattatacaatgcrttagaattagaagatacattaggtactaaattagaaaaagtatatgtatacgcgcayctaaaacaagaccaagayacaacgaacgacaagtatactggtatggagtcaagagcacatcaattaattattaaatttagctcggcatggagtttcttagtgccagagattttacaaattgatgaagataaaattcaatcatttgtaaattcatatgataaattacaaaaattcgcatttgatttgaagttgattaatgaaaaacgtcctcatattttagatgctgaaackgaaaagttattaacagaagcgcaggacgcgttatcaacgccatcaaatgtatacggtatgtttagcaacgctgatttagtatttgaagatgcgatwgataaagatgraaatgcacacccgttaacacaaggtacatttattaagtatttagaawcagatgatcgcaaactaagagaaagtgcttttagaaatgtatataaagcatatggtgctcataataatacgcttggcgctacgctagcaggtgaagtgaagaaaaatgtatttaatgctcgtacacacaattacaaaactgcaagagaaaaagcattragtaataatcatattccagaaaatgtatatgacaatctagtaaaaactgtacataaatatttaccattgctacatagatatactgaattgcgcaaagaattgctaggtttagatgacttgaaaatgtatgatttatatacaccattaattaaagatattaagtttgaaatgccttatgaagaagctaaagagtggatgytaaaagcwttagaaccaatgggtgaagaatatttaaatgtagttaaagaaggcttaaacaatcgttgggtcgatgtctatgagaataaaggtaaacgttcaggtggctattcatcaggtgcacatttaactaatccatttattctacttaactggtctaatactatttcagacttatacacattagttcatgaatttggrcattcagcacatagttacttcagtagaaaattccaaccgtcaaattctagtgactacactatttttgtcgctgaagtwgcatcaacttgtaacgaagcacttttaagtgattatatggataaacatcttgatgatgaaaaacgcttattattattaaaycaagaattagaacgtttcagagctacattattccgacaaacaatgttcgcagaatttgagcataaaattcatgcmattgaagaagcaggtgaaccwttaacrccaactagaatgaatgaagaatatgccaaattaaataaattatacttcggtgattctgtagaaactgatgaagatattagtaaggaatggtcacgtattccacacttctatatgaattattatgtatatcaatacgcaactggttacagtgcagctcaaagcttaagtcatcaaattttaacagaaggtaagccagcagtagatagatatattaatgaattcttgaaaaaaggtagctcaaattatccaattgagatattaaaaaatgctggtgtagatatgacaacacctgaaccaattgaacaagcttgtgaagtttttgaacaaaaattgaacgcttttgaaaaattaatgaaagcttag

SEQ ID NO: 2468 - DNA, 96 bp, Staphylococcus aureus
gtgccatttgattcactagcggtgttaataactacggaaattgcatttccgactgaaatttttgaaaaatatcaacgtacgctacaaataaaattt

SEQ ID NO: 2469 - DNA, 1047 bp, Staphylococcus aureus
atgaataataaagacatatatagcgatgattttcaaaatgctttagtagacataattttgaacattgataaaataaatgtcaaagaagtttttgatgattcatgtagggctgtagatcaagataataaaaaggatactttaaatcgttctcctaaagatttttccataaatataagtgatatagtaagatatagtatactttgcatggaaaatttaagtagtgacaagattgaagaaaatatcaatatgattaaaaatcatagttcagaattaaatgacaacgacatgtttattcaagaaaaaaataattttacaactaattttaataaattctgcaacgctctaggaataaacatagcaaactttaaatcaggaaaatcatatgtatttaaaccaaaaagtttatttgtattatatgatatactctcaaacaactcagtttatctacacttttttaaaaacggtatcaatgacaaagatatagattcttctaatcgtatcaaagagaacttatattatttcatcaatcatgaaattactgatcaaagagattatgaacatgctctgactaattattatctctattttctagtagacagtaatatagaaattggaatcaaatctatcattattaagattttcactgaaaaaggtatcacttctaaagataaacttcagattcttgaatattatttagatgaaatagacgatttaaacactgaaataagtaccaaaattgctgatgctcatgttaaaaatagtacaaactttttagaaaatgaaaaagtaagtataaacagtaatttagcaaaatatattactcatcgagacaccagagcttcggcacctaaaaatatgctgttatcattaattttaaatagtgacctagtgtctccaaaagacttagaagaaaaagaactcaaatatccaaagaaaataacaaaagaacatcatgataaattaataaaagaaatcaataaagcactagattattataatgataataacaccactccttctgactacttttatataacttcagattaa

SEQ ID NO: 2470 - DNA, 378 bp, Staphylococcus aureus
gtggcgtataaaatagatgataaacaagaccaacgtttagttaatgatacattaaatcaaatcgatatacctgaggggtatatattacatagtgatcaaggcagcgtttatacatcttatgcttattatcaattatgcgaagaaaaaggcattatcagaagtatgtcccgaaagggaacacctgccgataacgccccgatagaaagtttccattcctcgctaaagtctgaaactctttacatcaataatcagcttaatagctctaatcatattgtaatagatattgtcgaaaagtacattaaaaactataataataatcaaattcaacaaaaactaggctacttatcccctgtaaaatacagagaattaatagcctag

SEQ ID NO: 2471 - DNA, 348 bp, Staphylococcus aureus
atgcgtttatatattaatgaaattaaaattaaagatgacatactttattgttatacagaagattctattaaaggattatctgaagtaggacaaatgctcgttgatagtgataattatgcctttgcgtatacattagatgatggtaaagcgtatgcttatctcattttcgtacaagaaacatggacgatgttgcatgaaaacaygactaaaaaaattattatcaatgatgaactagaattgactgaattccaccaagaacttacttatattttagacaacataaaaggraataataattatggtaaggaatttgttgcaaccgttgaagaaacattcgacattgaataa

SEQ ID NO: 2472 - DNA, 345 bp, Staphylococcus aureus
atggcagtaaatttatatgattatgcaaatcaattagaacaagctttaagagaaagcgaagaatacaaagcaatcaaagaagcattcgctaatgtaaaagctaacgaagaatctaaaaagttattcgaygagttccgtgaaactcaaattaacttccaacaaaaacaaatgcaaggtgaagaaattgctgaagaagatttacaaaaagcgcaagaacaagcgcaagcaattgaaaaagatgaaaacatctctgcattaatgaatgctgaacaaaaaatgagtcaagtattccaagaaatcaaccaaattatcgttaaaccattagacgaaatttacgctgactaa

SEQ ID NO: 2473 - DNA, 354 bp, Staphylococcus aureus
gtggtaccaacagtagtcatagatttagtggmtcaattaaaaggaaactattcaatcaaattgatactagaagtattaaatatacctaaatcaacatattaccgatggaaaaacaaaacctataaaaatgatactgtaacacaaaaagttattgaattatgtgaagctaaccattatacctacggttatcgtaagattacagcactgattaatcaatgttatacatcaccaattaatcataagagagtacagagaatgatgcagaagcatcatttgaactgccgagttagacctaaaaagacgacaaggataggtaaaccgtattataaaacagacaatttattacaaagataa

SEQ ID NO: 2474 - DNA, 696 bp, Staphylococcus aureus
atgaaaacaacattattggtcgttgaagatgatgaagcgattttacatttaatcgatgttgcgctaactatgaattattataaagtggttacggcgaagacggggaaagaagcggactttcgcctaagaacagaacaaccagatattatcttattagatttaggcttaccagatattgatggtttatctctcattcagcaattcagagactttgtggacacacctattattgtgattagtgcacgaacagaggaacaaaccattgtcgaagtattagatcgcggtgccaatgattatatgactaagcctttcaatatcgatgagttaagagcacgtatcagagtagcattacgtatgtcacgttctactgagacaattcaaagtcgtttcacaaatggtccattaaccattgatttcgatgcgaaatcagtccttgtcaatgaacagtccgtacatctaacaccgaatgaattccaactcctaacgatattatgccatcatgtcggcaaagtattaacctatcaagtgttattaaaatcactctatggctatgtcaatcatacagaaatggctgccttacgtgtacatatggcctctttacgtaaaaagttgaattatacgcaagacccaaacactgaaaagaaattaatcatcacacatcctagaatcggctaccaaatgcaacacttagaataa

SEQ ID NO: 2475 - DNA, 870 bp, Staphylococcus aureus
gtgatttcaacttctgaacatagtattttcaaaaatccagctaaaaatgatggtttgcgtgttcgtactattgaggtgtctgaaaaattcacatcaagtgctcaaaactcagatactataaaaaaagtggttagtcaaaataatggtcatgttttacctataattgctcaattcctattagacaacactaatgatgttacttccctttttcaaaaagaagacagtgttttttatcaattactatcaactgaatccagtaacactggtattcgaatgattaaacattatgcaactctaacaacaacagcccatattttaaatcaatcactagacctacagttaaacgttagcagcataaagaactatttattaagctatcataatgaaacggtgtcagaacgttctcttgcagataaagcgatggatacaatcgtacagtttattgcggaaaacctgggcaagttttcacaacaaacacgtcttgctaatatgattcaaaactttggtatcctctcacttaaagatgactacatcgaagtaaaaattatccgaaatgtattcgataagatgttaacagacagtcaattcgaagacacgaaaaatgttattgatgctttggataatgcaggaaaattagtttccgatcgggatcgaaagacaacaaaaagaaatgcgaaagatgatacaggcaaaagtacttctcttgtcttctaccaaatcaaaattgatttagattatgctgacgttcttggattgcaatcccaaggacgcgacaacgtaattcaaaaacattcaaatccatcacagtttaaaaacacaaacttagaggagtttatgaaaagtgaaaacaccacactcattgtgttttag

SEQ ID NO: 2476 - DNA, 999 bp, Staphylococcus aureus
atgacaatttttaatggaggggataatatgactgaaacaaaagcgattgatacacacgcacatttatggaatgaagactatttagacaaacttggcaaattaggtagtcaaggtactgaagttgctaaagggattaatcaatctgcgtctaaagaagatttagagaaacgcttcaaaatgatggacgatgctggcgtagatttacaaattatttctgcgacaccacaatctccacaatggggtactaaagaagaagctcaccaaagtgctcaagaaattaatgacttatatgaaagattagttcaacaatatccggatcgtttcttggcatatggtgctgtctcactaccctatgtcgatcaagctattgaagaagcccaagcccttttgaaaaaagatgaatttgtgggcattgccattccaactatagtaaaagataaggtctctgttgctgataaacaatttgaacctttctttgcagcgatgaatgagctcaatgctacaatttatattcatccaacaggttgtggcgctcaaagtccgttagtcaatgactatcaattagaatgggttattggtgcaccgttagagtctacctttattacattacaattgattaaaaatgaaattccgcaaaaatatccaaatattaaattccatatttcacatttaggtggcgctttaccattcttcatgactcgtattaaagacaattatgaagattggaatgcctttaatattgatccttatgaagtattaaatcgacaattttggtatgatacagcaaacttccacgaaccttcattgattaactctattgagacatttggtaaggataaatttatgatggggtcagacttcccttacttccaagatgaaaaatatacacgcggcgtagactatattaaaaacagtaatattgaccctgacacgattaatggtatattaagaggcaatgcgattgaattttatcaaattgaagaaaaccataatcactag

SEQ ID NO: 2477 - DNA, 417 bp, Staphylococcus aureus
ttgcattctttattcgcaaacattaattatttggaggattttaaaatgttattaagacacgtcattaacacatatgtaggtagtaaaatttttaaaagcagtttaccaaaagtacaaaatagtgatgaaatggctcaacaattcgaacaaggctttggtttatctcgtagatcaatgagattagctggcgctttcgaaatgattggttcacttcttttatttacttctattttcggtaaattagggaaaaaattagtagttgttggtacgattatgattaatattgttatgggtacagctatttataaccattataaagctgggcatggttataaaggtgcacaagctgcttctaaatttttctttttaaatgtattaagcttactagaagtgttaagcttaactcgtaataaataa

SEQ ID NO: 2478 - DNA, 636 bp, Staphylococcus aureus
atgaatcaatgggatcagttcttaacaccttataagcaagcggttgatgagttgaaagtgaaacttaaaggcatgcgcaaacaatatgaagttggtgaacaagcgtcgccaatagaatttgttactggtcgtgttaaaccratcgctagtattatagataaggcaaacaaacgacaaataccatttgataggttaagagaagaaatgtacgatatcgctggtttaagaatgatgtgccaatttgtwgaagatattgatgttgtcgtcaatattttaagacaaagaaaagattttaaagtaattgaagaacgagattatattcgtaacactaaagaaagtggttaccgctcgtatcatgtcattattgaatatccaatygaaacattacaaggccaaaartttatattggctgagattcagattcgtacattagcaatgaatttctgggcaacgattgaacatactttacgatataaatatgatggtgcttatccggatgaaattcaacatcgtttggaaagagcggcagaagcagcgtatttacttgatgaagagatgtctgaaattaaaratgaaattcaggaagctcaaaaatattacacgcaaaaacgttctaaaaaacatgaaaatgattaa

SEQ ID NO: 2479 - DNA, 1125 bp, Staphylococcus aureus
atgaatgcactatttattatcatatttatgattgtagtaggggcgataattggkggyrttactaatgtaattgcaattagaatgctgtttcacccctttaaaccatactatatatttaaatttagagtcccatttacaccaggtttaataccgaaaagacgcgaagaaattgcaactaaaattggccaagtgattgaagagcatttgcttacagaaactttaattaatgaaaaattraaaagcgagcaatcacarcaagcaatagaatctatgattcaacagcagttacaaaagttgacgaaagatcaattgtcaatwaaacaaattacttctcaaatcgatattgatttagaacaagtattacaaactaatggaaatcaatatattgmatcacaattgaataattattatacaaagcatcaaaaccaaacaatagcatctttattgccaaatcaacttgtaacatttttaratcagcatgtagataacgcaacagacttattatgtgatcgtgcaagraattatttatcatctgcaaaaggcacacaagatattaatgatatgttggatacttttttcmatgagaaaggtaagttawttggtatgttgcaaatgtttatgacaaaagagagyattgcagatcgmattcaacaagaacttatacgtytaacatctcatcctaaagcaagarcaattgtgacatcgttaattaccaatgaatatcaaacttttaaagataaaycattgaatraactgttagatrcrtcgcagtttaatgaaatcgctgaaaatctatcartgtatgtaacaacatatgcaagcaawcaagcgaataagccagtggttacgttaatgcctcaattygttgattatttagaargtcaactctctagcaaattagcaaatttaatcattgaamaattatcgattcacttatctacaattatgaaaaaagtggatttacgaggattaattgaagaacaaattaatacgtttgacttagattatattgaaaaattaattatagaaattgctaacaaagaactaaagttgattatgtcattaggtttcattttaggtggtattattggatttttccaaggtttggttgcaatctttgtctaa

SEQ ID NO: 2480 - DNA, 1362 bp, Staphylococcus aureus
ttgaaacaacggaaccgtgttatagctgtcgtaatgattggtgcttttgttggtgtgctgaatcaaactttgatgactacgatacttccagaaattatgaaagattttacggtatcaagtagtacagcacaatggctcacgacaatttttatgctagtcaatgggattatgattcctatcacagcatttttaattgaacgttttacattacgttctttattttttaatgcaacatgctttttaatgattggttcatttatttgtatgctaggaatcaattttccaatgttattattaggacgtagtattcaagccttaggtgctggtatactgatgccactcacacagacactccttttcattatgtttccacctgaaaaacgtggaatggcaatgggaatgttcggtcttgtaataggttttgcacccgcgattggaccaactgcagctggttggttcgtcaatattttcgattggcgctatctgttcctagtcgtattactaataggtatgattgattttgtattcgggtatctatcattgccaaatataacggaactaagtaaaccaaacttagacaaactatccgttattttatcgacggttagctttggtggcttactatatggttttagtacagcaggaaacttaggttggtcacatccaatggtttatataactattattgctgccatagttatattaacggtatttattttccgacaattaaaactggaatcgccattgttagagtttagagtatttaaatataacgacttttcagtggcaatgattttaattgtactaatgttcatgttatttatagggaatttaacaatcttaccaatttatatgcaaacgatgatgaaatggtccccgttagagtcaggacttattttattacctggtgggttaattatgggactgttatcgcctgtcactggtaaattattcgataaaattggtggacgtatcttgagtattatggggatgctaacgattatgattggtgcattattaatggctcaatttagtcaaaatacaacacaactatatgtgattatttcattttcagttaccatgttaggtaatgctatgatcatgacgccaatgacaactcaagctttaaatgctttgccacgtcaatacattgcacatggtacagccatgaataatacgattagacaagtgtcagctgcaataggtactggtatcttggtcacattgatgacaggattaggaaaaacctcttcattaagtggtagtcaaggacttattcatggtctagatattacattctatgtcgtcgcattgattgcctttataggtactatcattgcattctttattcgcaaacattaa

SEQ ID NO: 2481 - DNA, 810 bp, Staphylococcus aureus
atgcgytatacaattttaactaaaggtgactccaagtctaatgccttaaagcataaaatgatgaactatatgaaagattttcgcatgattgaggatagtgaaaatcctgaaattgttatttcagttggtggtgayggtacattactacaagcattccatcagtatagccacatgttatcaaaagtggcatttgttggwgttcatacaggtcatttaggattttatgcggattggttacctcatgaagttgaaaaattaatcatcgaaattaataattcagagtttcaggtcattgaatatccattgcttgaaattattatgagatacaacgacaacggctatgaaacaaggtatttagcattaaatgaagcaacgatgaaaactgaaaatggctcaacacttgttgtggatgttaacttaagagggaaacactttgagcgatttagaggcgatggattatgtgtatcaacaccttcgggttcaacggcttataacaaagcgctaggtggcgcactkatacatccttcacttgaagcaatgcaaattacagaaattgcctcrataaataatcgtgtgtttagaacggtaggatcaccacttgtattaccaaagcatcatacatgtttaatatcaccagttaatcatgataccattagaatgacgatagatcatgttagtatcaaacataaaaatgttaattcaatacaataccgtgtagcaaatgaaaaagtgaggtttgcacgttttagaccattcccrttctggaaacgtgtrcacgattctttcatatcaagtgatgaagaacgatga

SEQ ID NO: 2482 - DNA, 465 bp, Staphylococcus aureus
atggatagacagagttttacagatttaattcaaacaaaatttaaaatggttcgtatagaggctggttatacgcaagatactatggcgcaaacaattggactttctaaaaagactttagtacaaatcgaaaaagagagagtattaccaaactggacaacttgtatttcaatttgtgcattattcagagactctgaagtattaaacagtacatttggctgtgatccattagaaatcgttcaaacaatttcaagaaatcaytgtgcatatccaaaccatgcaccaacaagtgatatttattggaataacattgagactcgtaatgggtacattttacaaagtaacaaagtaagcaatatttatcgtgtattaaatccagataaccaaccaattttcggtacttctaaaatgagagaagctgaaacatactttaacagaaatgctaaagaagaattagtacatatctag

SEQ ID NO: 2483 - DNA, 855 bp, Staphylococcus aureus
atgaaatttaagtatcatatatcacaacargaaactgttaaarcttttttagcacgacatgatttttctaagaagacagtgagcgccattaaaaataatggcgctttaattgttaatgatgaaccagtcacagtrcgtaagcaattaatgmcaaatgatatattagaaattcatttrccrcgagaaataccgagtgttaatttaataccttatgctcgtaagctagaagtattgtatgaagatgcttttrtcatcatagttactaaaccaaacaatcaaaattgtacrccttcgagagaacatcctcatgaaagtttaatcgaacaagtactatatcattgtcargaamatggtgaaaatattaacccacatattgttacgcgtctagatcgtaatacaactggtattgtgatattcgctaaatatggayayatccatcatttattttctaaagtaaacttgaaaaaaatatatacttgccttgtatatggyaaaacccatacatytggtattattgaagctaatattagacggtcaaaggatagkattataactagagaagttgcctcggatggtaaatacgctaaaacatcttatgaagtaataaatcaraatgataaatayagtttrtgyaaagttcatttgcatacgggacgtacacatcaaattcgtgtacattttcaacatattgggcatccaattgtgggagattctttgtatgatggttttcatgacaaaattcatggtcaagtactgcaatgtacgcaaatatattttgttcatccaatcaataagaacaatatttatattacaattgattataagcaattacttaaattattcaatcaactctaa

SEQ ID NO: 2484 - DNA, 1386 bp, Staphylococcus aureus
atgtcaatgaacacagatgaaaaagagcgtgttcaagaggaattataygaysaracwttattagatcaatayttagaaaatgatgatattgatcaatttagagatgaatttctagcattacacacatatgaacaaagtgagtattttgaagatactaccgatgaaaatagacaaaagatttttcaatatttatcacctgaagargttgcaaatttctttgatcaattagatattgatgacgatgaatatgagttgctatttgataaratgaatgcgacatacgcwagtcacatattagaagaaatgtcatacgayaatgcagtagatattttaaatgagttgactaaaccaaaagttgctagtcttttaacattgatgaataaagatgacgcgaatgaaatcaaagcattacttcactatgatgaggatacggccggcggtattatgacgacggagtatttatcacttaaagcgcatacgcctgttaaagaagcrttattattggtcaaagcrcaagcrccagacgcagaaacaatatatgttatmtttgtygttgatgatgatggtaaattagtaggtgttttatcrctaagagatttaattgtagctgaaaatgatgcktatattgaagatattatgaaygaacgtgtcattagtgtgaatgtagcagacgaccaagaagatgttgctcaagttatgagagactatgatttcatggctgtacctgttatagattaccaagamcatttgctkggkatcatcacgattgatgatattttagacgttatggatgaagaggctagtgaagactactctcgtttagccggggtwtcagatatcgattcgactaatgattcaatcattaaaacagcattaaarcgtttaccatggttgattattttaacatttttaggaatgattactgcgacaattttagggagattygaaaaaacattagaaaatgtagcgctactcgcagcgtttattcctattattagtggtatgtcaggaaattcaggtacacaatctttagccgtttcagttcgtaacattacgacaggggaaattaatgagcaaagtaaatttagaattgcattaagagaagcrggaagtggtgtattatcgggygttgtatgttcaacaatattatttacaattattgttgcaatatatcatcagccacttttagcattaatygttgcaggaagtttaacttgtgcgatgacggtggggacgtttgtaggttcgatgattccattattgatgaataaattraatatcgatccagcagtggctagtggaccatttattacaacaattaatgatattattagtatgttgatttattttggtttagctacatcatttatggcttacttaatttaa

SEQ ID NO: 2485 - DNA, 1113 bp, Staphylococcus aureus
atggaacaaaggacgcgactagctttattaaaagagattgccgaatttttaaaygaagaaactgaaatgtatagcatgacccaaggtgcgttaaaatatttaattgagggcagtaatttcacgacaggctggatatttttcatcaatagcgtaggtgaacatgaacttgtatcacatgtggctytaccacaatctttgacagcagaccactgtcactatattaaagatgggtcttgttggtgtgtgaaagcatttaatcaacgtaggctaatgaaagcgtcgaatatcgtcaattgttctcgtattaacttagcctctaaagcatttcctagccaaaatgacaatattacacatcatgcaacggtaccacttaaatcgggtcaagaacaattcggcattttaaatgtagcgtchccaaatactgaaatwtatagygatgaagatttagagttgctagagtctgtcgcatttcaattagggtcagccatcaaacgtatttatttaacagaccgtgaaaaagaagcrgcaaaaattaatgaacgtaatcgtttagctagagatttacatgattcagtaaatcaaatgttattttctgtaaaactaacagcacatgctgcgtatggcatgtcaaacgaatccatygctaaacaagcwttcaagacgattgagraaacgagtcaaaatgccgttaatgaaatgcgtgcattgatttggcaacttaagccagttggacttgagcaaggyttaattcatgctttgacagcatatagtaaattaatscatatacaattaaatgtaaatgtagaaggtttaatcgatttatctaatgaaatcgaagaaaacatatayagagcattacaagagtgtattaataatgttaagaaacatgctgatacgaataaaatggatcttacattaaaacaaatgaacgatatactatatattgacgtgattgattatggtcaaggatttgagatcgataatgttcagatagcttcatcacacggtatwaataacataaaacaaagagttaaattattaagaggtaragtgacctttcattctcagccaacaaagggtacacaaatacaattyacaattcctataaaatag

SEQ ID NO: 2486 - DNA, 1845 bp, Staphylococcus aureus
atggagtttttatctttagttattgttgttttagcagcgtttttaactccaataattgtcaatcgattaaatattaatttcttgccagttgttgttgcagaaattttgatgggrattgtgattggaaattcatttctaaatatagtagaaagggattcaattctaaatattttatcaacrttaggctttatctttttaatgtttttaagtggtttagaaattgattttaaagcttttaaaaaagataaacgcgcacgtcaaggacaaaatratgatgaatcctcaattccagggcatcttaatctagcgttaactgtatttgcatttattatgattatttcgattcttttagcgtatgtatttaaatggcttggattagtggatgatgtgttattaatggtcattatcatttcaactatttccttaggcgtagttgttccaactttaaaagaaatgaatattatgagaacaactatagggcaatttatcctattagtagcagtrcttgcggayttagtaactatgattttattaacggtctatggygcaatcaatggtcaaggcggcagtacaatatggttaataggtatattagttgttttcacagcaatttcatatattttaggtgttcaatttaaaagaatgtcatttttacaaaaattgatggatggtacgacgcaaatcggtattcgtgcggtrtttgcattaataatattattagtagccctagcagagggagttggcgcagaaaatatattaggtgcattcttagcaggtgtcgttgtttcattattaaatccagatgaagaaatggttgaaaagttagactcatttggttaygggttytttattcctattttcttyataatggttggtgtagatttaaacataccttcattaattaaagaaccgaaattactaattatcataccgattttaatcgttgcatttatcrtttcaaaattaattccagtcatgtttattcgacgttggtttgatatgaaaacaacgattgcatcagcatttttattaacatcaacattatcgctcgtgatagctgcagccaaaatttcagaaagattaaatgctatttcagctgaaacgtcaggtatattaattttaagcgcagtcattacatgtgtattcgttccgattattttcaaaaaactgtttccagttccagatgagtttaaccgtaaaattgaagttagtttaattggtaaaaatcaattaacgattcctatagcgcaaaatttaacatctcagttatatgacgtgacattatattatcgcaaagacttgagtgatcgtcgtcaattgtcrgatgatatcacgatgatakaaattgctgattatgaacaagatgttttagaacgactaggtctgtttgaccgagacatagttgtttgtgcyacgaatgacgatgatattaaccgaaaagttgctaaattagccaaarcacatcaagttgagcgtgtcatttgcagacttgaaagcacaacggacgatacagagttagttgattcaggtattgaaattttcagtagctacttaagtaataaaatcttattaaaaggtttaattgaaacacctaacatgttgaatttattaagtaatgttgaaacgtcactatatgaaattcaaatgttaaattataaatatgaaaatattcaattacgtaatttcccattcggaggagacatcatcttcgtgcgtattatccgtaataatgagtcgattgttccgcatggagatacacaattgcgatatggwgatcgcttaattgttaccggtgctaaagaatacgttgatgaattgaagcaagagttagaattttatttttaa

SEQ ID NO: 2487 - DNA, 1386 bp, Staphylococcus aureus
atgtcagtaagaattgaacatgatacttttggagaaatagaagtacctgcagataaatattggggtgctcaaacagaaagaagtaaacgyaatttcccagttggtaaagagcgtatgccaatcgaagtagtttatggttttgcacaactaaagcgtgcagcagcawtagctaattttgatttaggaaaattaagcgaggcaaagaaagatgccattgtatacgcatgtgatcaaattttatcaggtgaattagatgaacacttcccactagttgtatggcaaacaggaagcggtacacaaagtaatatgaatgtgaacgaagtagtaagttatgttgctaatatgtatttaaaagatcatcawaktgatgaaagtatccacccaaatgatgatgtaaatraatcwcaaagttcgaatgatacattcccaactgctatgcaygttgcaytatatcaagaggttgaaacaaaattagaacctgcattaaaacttttaagaaatactttgaaagaaaaagaagayaaatttgawtcaattatwaaaattggtcgtacacatttacaagatgcaacgccgatcaaactaggacaagagattagtggctggcgttatatgcttgaccgttgygaaayaatgttatctgaatctaagaagcacattttaaatcttgccatcggtggtacrgctgttggtacwggtattaatgcrcatcctgartttggtgataargtggcacaktatatttcwraaaatacgggttatccatttgtatcttctgaaaataaattccaygcaytwacagcrcatgatgaagtwgtwcaaytrcayggaacattgaaggcrytagcwggagayttaatgaaaattgctaatgatgtgagatggttggcttcaggkccacsagctggtttggcagaaatttcyatccctgaaaatgaaccakgttcatcaattatgcctggtaaagttaatcctacacaatgtgaaatgttaacaatggttgcagwccaagtaatgggtaatgatacagttgttggcttcgcaagttcacaaggtaactttgaattgaatgtttataaaccagttattatgcataatacactacaatcaatttaycttttagctgayggwatggaaacatttaataacaattgygcagtgggcattgarccaatcgaagagaatattgataattatttaaatcaatcattaatgttagttactgcattaaatccacatattggttatgaaaaagcwgctcaaattgctaagaaagcccataaagaaggtttaactttaaaagaatctgcaattcaaactggatatgttacagaagaacaatttgaagcatggattaaaccagaagatatggtagatcctcattaa

SEQ ID NO: 2488 - DNA, 771 bp, Staphylococcus aureus
atgttaaatcttgaaaacaaaacrtatgtcatyatgggaatcgctaataagcgtagtattgcttttggtgtcgctaaagttttagatcaattaggtgctaaattagtatttacttaccgtaaagaacgtagccgtaaagagcttgaaaaattattagaacaattaaatcaaccagaagcgcacttatatcaaattgatgttcaaagcgatgaagargttattaatggttttgagcaaattggtaaagatgttggcaatatygatggtgtatatcattcaatcgcatttgctaatatggaagacttacgcggacgyttttctgaaacttcacgtgaaggyttcttgttagctcaagacattagttcttactcaytaacwatygtkgctcatgaagctaaaaaattaatgccagaaggtggtagcattgttgcaacaacatatttaggtggcgaattcgcagttcaaaaytataatgtgatgggtgttgctaaagcgagyttagaagcaaatgttaaatatttagcattagacttaggtccwgataatattcgcgttaatgcaatttcagctrgtccaatccgtacattaagtgcaaaaggtgtgggtggtttcaatacaattcttaaagaaatcgaagagcgtgcacctttaaaacgtaaygttgatcaagtagaagtaggtaaaacwgcggcttacttattaagtgayttatcaagtggcgttacaggtgaaaatattcatgtagatagcggattccacgcaattaaataa

SEQ ID NO: 2489 - DNA, 396 bp, Staphylococcus aureus
atgttaggaaaatactggattcaattattgatagcaacagttattataagtttaatatcaattaaagcwtttccattggcaattggggcattatatttacctrttattttcaaagtaataaaattacaactcaatttatcaaaaggattaatygatgatgttaatgcgcaaacrttcattaaaagtaatcaatcaggtattgtaatmagtgtaatttgttgtttattaataacagsaatattgtattatacacttgatgggttttatgcgagtttaacaggagtwttaggtacgcttgttgctctaaatccatatacgacaattgttagtgctgtattatatatacttacagctattgctacggttgaagctactaaaacaaagtatcgtaattaa

SEQ ID NO: 2490 - DNA, 1569 bp, Staphylococcus aureus
atgattgaaaaattagtaacctttttaaatgaggttgtwtggagtaagccattagtttatggtttgctaattactggtgtgctatttacattgcgtatgcgattttttcaagttagacattttaaagaaatgattcgattaatgtttcaaggagagaagtctccwaatggtatttcaagttttcaagcgatagccatgtctttagcaggcagggttggtacaggtaatattgtcggtgtatctactgcaatatttataggaggacctggtgcagtattttggatgtggattactgcrtttttaggtgcaagtagtgcttttattgaatctacacttggtcaaatattcaagagagttgaaaataatgaataccgtggtggaccagcgtattatatwgaatatggtattggtggtaaatttggtaaaatttacggaattatctttgctattgttacgattatctcagtaggtctattgcttcctggtgtgcaatctaacgctatagcaagttctatgcayaatgcgattcatgttccacaatggttaatgggtgstattgttgtagttattttgggattaattatttttggtggtgtacgtaktattgccaatgttgcaacagccgttgtaccatttatggcaattatttacatactratggctgtcattatcatttgtatcaatatacaagaagtgccagcgttatttgcattaattttcaaatcagcatttggattacaatctgcttttggtggtatcgttggcgcaatgatagagattggtgttaaacgtggattataytcaaatgaggctggtcaaggtacaggtccacacgcagcagcggcagcagaagtatcacatccaagtaaacaaggtctagtacaagcattttcagtttatattgatacattatttgtatgtactgcaactgctctgattatacttatttctggtacatataatgtgactgatggtacggttaatgcgaatggcacaccgcatttaattaaagayggyggkatttatgttgaaaatgcaacaggtaaagattattcaggtactgcgatgtatgcacaagccggcattgataaagcgttccatggcagtggttatcaatttgatcctactttctctggcgtaggttcgtactttattgcatttgctttattcttctttgcatttactacaattttgtcgtactactacattacagaaacaaatgttgcttatttaacgcgtaatcaaaataatcaagtttcatcgrtatttattaatattgctcgtgtgattattttgttcgctacattttacggtgcagttaaaacagctgatgtagcatgggcattcggtgatttaggtgtaggtctaatggcttggttaaatatcattgcgatttggattttacataagcctgccgtaaatgctttaaaagattatgaaattcaaaagaaacgtttaggmarcggttataatgcagtttatcaacctgatccgaataaattacctaatgctgtcttttggttgaagacrtatccagaacgtttaaaacaagcacgtgccaaaaagtar

SEQ ID NO: 2491 - DNA, 120 bp, Staphylococcus aureus
atgcatcagttgaaagcattaytagtattaacacacccaagatattataaaacatcacaaaaacaccactatctaatttatctcaataaaaattcacaaagttatctcattttattttta

SEQ ID NO: 2492 - DNA, 132 bp, Staphylococcus aureus
ttgtcacgatactttccgattgtgattacatttgacgttacagtcatttcaacgacaacccttgctamattcgactgcagtcmttttgaattacagtcactgcgtttctatgtcatcaacaatcatttgtcg

SEQ ID NO: 2493 - DNA, 759 bp, Staphylococcus aureus
atgtyrgaatttaaarctggwaagattaataaacatgttttatatagtratattttaaatagagatgtcacrhtaagtatttatttrccagaatcttataatcaacttgttaaatataatgtcattctttgctttgacggattagattttttacgtttcgggagaatacaacgtacatatgaatcgttaatcaaagaagcgcgtattgatgatgcgatcattgtyggattccattatgaagacgttgataagcgtagagargaatttcatccacaaggaagtcgttctcatttaactattcaatcagtcggtaaagaaatattgccatttattgactcgacgttttctacactgaaagtaggtaatgcaaggttattagtaggrgatagtttagcgggtagtattgccttattaacggcgttgacctatccaacgatttttagtcgtgtagcaatgttaagtccacattcagatgamaaagtattagataagctaaatcaatgtgcwaataaagaacaattgacaatttggcatgtcattggtctagatgaaaaagatttyactttaccaacaaatggtaagcgtgccgatttcttaacaccgaatagagaattagctgaacaaattaagaaatataatataacttattattacgatgaatttgawggtggtcaccaatggaaagattggaaaccattgctgtcagatatattattgtattttttwmgtaawmaswcasmkgatcaaywwtatgartaa

SEQ ID NO: 2494 - DNA, 600 bp, Staphylococcus aureus
atggcaatgaactttaaagtctttgacaatagtcaacttgtagcagaatatgctgctgatattattagaaagcaatttaacaataatcctactacaattgcaggttttcatttagatacwgatcaagcgccagtwctagatgaattaaagaaaaatrttgaaaaacatgctgttgattttagccaaataaatattttagattatgacgataaaaaatcatatttcgaagcgttaggtgtaccagcaggtcaagtttatccaattgcttatgaaaaagatgcaatcgaattaatcgctgataagattaaaactaaagaaaataaagggaaattaacattacaagttgtttctatcgatgagcaaggtaagttaaatgttagtattcgtcaaggactaatggaagcaagagaaattttcttagtagtgacwggtgctaataaacgagatgtagttgaaaaattatatcaagaaaatggtaaaacaagcttygaaccagccgatttaaaagcacatagaatggtaaatgttattcttgataaagaagcggctgcaggtttaccygaagatgttaaagcttactttacgtcacgctttgcttaa

SEQ ID NO: 2495 - DNA, 795 bp, Staphylococcus aureus
ctgttatataacacagataataaaaagtttaaatttttaccaaattggttagagacaacatcatattggtttaatatggagcataataacaatataaacaaaaaatacaaaaaattctcaaggggatctattatatatttagattttggcatcaatattgggcatgaattttctggcagacattttggaatagtattaaacaaaaatgatagtccatataattctttagtaacagttgtaccattaagttcaaaaaataaaaaacactatttaccattacaaaatattgtatttaaaacatcattatcaattttgaacaagacagttgataatatcgaatttgatttagacgttataaatcacgtaatttttacggttatagaaattattaataaaaataatttacaaaacactttggaacaaaacactatagattatttagatgattttgcaattaaaacacgcttccctacagaaagagaagtaattaataaaagtaaaaacatagtagaatcatttaatttatacaatgacccgaaaaatttttctgctttgtttaattatttgctaattgatgtaaacgatagaaaatcaaaagttaataaccttagagaagttattaataaatataaaaaatttgataaaaatacatttgcctgcacacagaatgtagtaactattagcaaattaagaattttaaaaattaacgctgaagatccttctggtagaatgaaactcgattttgatagtatgaaattagtagataatgaaattaaaaataagctaatcaattag

SEQ ID NO: 2496 - DNA, 1215 bp, Staphylococcus aureus
atgtgggttcgtgaaatcaccaaaaacaatagtacggcctatcgctatttagagcgctatacagaccctttaactggcaagtataaaacagtatcagttacacgtaacaagaataatgtacgtagccaaaaggacgctcaattagaattaaataaaataattgagcaacgtttgaaacattacagtacgaaacaacttgaaaacttaacgttccatgatgcgtgcgatgaatggttagagcattacaagacacattcaggctcgaaaccaaccactattaaagaaaagaaaagtaatactaatacagttaaaaatgctattgatagcaaagtactcatcagcaagattacgcacacctacttacaaaacatcattaatgaatgggctaaatcacatagtattggccatgttcaatctcttgttattgttattcgttccgttttcaaatatgcgtttaaatattatgatctgcacgatattagtgtgttagataaaatagatatacctaagaaagcccaaaccagaaacgagtttcaagctaaacgtaataactatttagaagatagcgaagtaaaggagttactagagtgcttcgactatctaattaaacataagcgtcatgctacgcgtaaacgtaactatgaaatggtaaaagcattagtagaatttcaaattaacaatggaatgcgcattggcgaactcctagcaatcaagacagacaatgtagacgtggagaataaaacactagagattgatggcacaattaactgggttacagatgtagtaactggagcatttggagtgaaagaaacgactaagacgagtaagagttatcgaacaataggcctcacagctcaaagtattaatttacttaaaaaactcatgctagaaaataaaaaagagaatcagtggaatgataaattcatagatagaggttatatatttactaacactgctggtagccctattgacttaaataaggtgaataatattattaaagaagctactgatataagttcaattaacaagcgtgtgacaacgcacacattacgtcacacacacatatctacacttgcgcaattaggaattaacctaaaagcgatacaagagcgtgtaggtcactcggactataaaaccaccttagagatatacacacatgttactgataagatggcaaaagatatgatgaataaattagaggggatagggagttag

SEQ ID NO: 2497 - DNA, 690 bp, Staphylococcus aureus
atgtcaagaataatattgtattatttttatgcatggtttatcattaaaaatacggaggtgtcgccaatggttgaatcaaatgatgaattaaaaaaagaattaggcagatttttaaagtctatccgaaaacaaaaagggaagacagcaagcgaaataagtaaacaaatgcagtattctcaagggcatataagtggcattgaaaatggtgttaaatcttttccaagcaataaacttatcgaaagttacttaatgaacataaaagacactaatgaggagtataatttttatgttgatgaaatagctaagataacgaaaaataaagttaagttaaacaaagtttctaatgtaacaaataaaatggaaattatagatagaatgatggatataccatattctagagaattcatatcttttgatgacaataacgaaaagagtttcacaatttttaacattagcattaatgatttgcactttcatctgcaagatattaataattataaattttacaaaggcattagattaacggataacgataaaaataacatcgataaaattttaaataattatttcgaaaataaatcagttattataaaagagaacacaaaaactttaagagataaaaatgaaaactgggaacaattagtaaaattaagcgattatatagatgataagttagataaaaagaactga

SEQ ID NO: 2498 - DNA, 123 bp, Staphylococcus aureus
gtgcagtttcaaattgctaatggcatgcgtatcggtgagctacttgcaataaaaagagaaaatataaactatgaagataaaacgctagatatcgatggtacaattaattggataactgattaa

SEQ ID NO: 2499 - DNA, 510 bp, Staphylococcus aureus
atgattttaggattagcattaattccatcaaagtcatttcaagaagcggtggattcttaccgtaaaagatatgataaacagtattcacgaattaaaccacatgtgacaattaaagcrccatttgaaattraagatggtgatttagattctgtcattgaacaggttagagctcgtattaatggtataccagcagtagaagttcatgctacaaaagcttctagcttcaaaccaacgaacaatgtgatttactttaaagttgcgaagacggacgacttagaagaattgtttaatcgctttaatggagaagatttctatggagaagctgaacatgtttttgtgccacactttacaatagcacaaggactatctagccaagaattcgaagatatttttggtcaagtagcattagctggggtagaccataaagaaattatcgatgaattaactttgttacgttttgacgatgacgaagataaatggaaagttattgaaacgtttaaattagcttaa

SEQ ID NO: 2500 - DNA, 471 bp, Staphylococcus aureus
atgacaaatcatatcgttttatatcaaccagaaatcccagctaatactggtaacattgcacgtacgtgtgcaggtacaaacacacatttacatttaattaaacctcttggatttagaactgatgataaaatgttaaaaagagccggtttagattattgggaatttgtgaatattacgtatcatgatagtattgaagcattttttgaagycacaaatggcgagtattacttattaacaaaatttggtaaaaagacttatagtgattttgatttttcaaatcatgacaaagatttttacttcatttttggaaaagaracgacaggattaccagactgggtgaaagagaaatatcaagacacagcrttaagaattcctatgagtgaacatattcgttcattaaatttatcaaatactgctgcgttrttaatttatgaagcgttacgtcaacaagattttccrggattgaattaa

SEQ ID NO: 2501 - DNA, 1485 bp, Staphylococcus aureus
ttggatgcaagtacgttgtttaagaaagtaaaagtaaagcgtgtattgggttctttagaacaacaaatagatgatatcactactgattcacgtacagcgagagaaggtagcatttttgtcgcttcagttggatatactgtagacagtcataagttctgtcaaartgtagctgatcaagggtgtaagttggtagtggtcaataaagaacaatcattaycagctaacgtaacacaagtggttgtgccggacacattaagagtagctagtattctagcacacacattatwtgattatccgagtcatcagttagtgacatttggtgtaacgggtacaaatggtaaaacytctattgcgacgatgattcatttaattcaaagaaagttacaaaaaaatagtgcatatttaggaactaatggtttccaaattaatgaaacaaagacaaaaggtgcaaatacgacaccagaaacagtttctttractaagaaaattaaagaagcagttgatgcaggcgctgaatcyatgacattagaagtatcragccatggcttagtattaggacgactgcgargcgttgaatttgacgttgcaatattttcaaatttaacacaagaccatttagattttcatggcacaatggaagcrtacggacacgcgaagtctttattgtttagtcaattaggtgaagatttgtcgaaagaaaagtatgtcgtgttaaacaatgacgattcattttctgagtatttaagaacagtgacgccttrtgaagtatttagttatggaattgatgaggaagcccaatttatggctraaaatattcaagaatctttacaaggtgtcagctttgattttgtaacgccttttggaacttacymagtaaaatcgccttatgttggtaagtttaatatttctaatattatggcrgcaatgattgcggtgtggagtaaaggtacatctttagaaacgattattaaagctgttgaaaatttagaacctgttgaaggrcgattagaagttttagatccttcgttacctattgatttaattatcgattatgcacatacagctgatggtatgaacaaattaatcgatgcagtacagccttttgtaaagcaaaagttgatatttttagttggtatggcaggcgaacgtgatttaactaaaacgcctgaaatggggcgagttgcctgtcgtgcagattatgtcattttcacaccggataatccggcaaatgatgacccgaaaatgttaacrgcagaattagccaaaggtgcaacacatcaaaactatatwgaatttgatgatcgtgcagaagggataaaacatgcaattgacatagctgagcctggggatactgtcgttttagcatcaaaaggaagagaaccatatcaaatcatgccaggrcatattaaggtgccacatcgagatgatttaattggccttgaagcagcttacaaaaagttcggtggtggccctgttgrtyaataa

SEQ ID NO: 2502 - DNA, 1143 bp, Staphylococcus aureus
atggggggcatacgattggatacaaagcarttaaagcaagatatcattgactatgcatatacaattggtatcgacagtattggatttacwactgccgatccctttgatgaattgaagcaaaagctagaagcatatcatgcaaatggttatgcctcaggatttgaagaatctgatattgctttacgaacggagcctaaattatccttaccaacagcaaggtcaatcatagcaattgcagttggttatcctaacaaactgaaaggtgcacctaagagtgttagaggtgatcgcagaggcttatttgctagagcatcgtggggtcaagattatcatacaattatgcgtaaacgrttagayatgttagctkcatttattgaatctaaagttccagatgttgaaatmaaatctatggtagatacgggtgtattatcagatagggcagtagcagaacgtgcaggtttaggatttgttggtcgtaatggctttgtcatcaatcctaaactaggaacatggacatacctcggtgaaatgttagtcagtataccttttgaacctgatgatccattattagatagctgtggtgattgtacaatttgtgttgatcgttgtccaacaagtgcattagttggaaatggccaattaaatagtcagaaatgcattagttttttaacgcaaacaaaaggctatatgcctgaccaatatcgttataaaattgggaatagattatatggttgcgatacgtgtcaacaagtttgyccgaaaaatagaggtattaataccgaacaagatgacatcattttggaaccagaaattttaaagccaagattagtacctttactacgtatgtctaataaagaattcaaacaaacatatggtcaccttgcaggtgcttggcgtggtaaaaarccgatacaacgaaatgctattttagsattrgcgcattttaatgaagtggatgcaattccagaattgaaaaaagttgcaacaacagatgaaagaccgwtgattcgagcaactgcttattgggcyattggtcaaattcttggggaagaagcaagagattttatcaatgcwaattaygatcaagaggatgcagaagttcaraatgaaatgataaaaggattrgacacaaggagagaatag

SEQ ID NO: 2503 - DNA, 261 bp, Staphylococcus aureus
gtggccctgttgrtyaataaaagayttmttgatgaaggtaaaactattgatgtttatttattcgaagcattaaatraccagataatcattgctataccagattggttttggtcatatcagatggcaatgacattaratgaagaaacttgttttgaagcaatactcatgcaattgtttgtttttaaagaagaggaagaggcagaatcgattgcatcacaactaacagattggatagaaacatataaaaaggagaaagactaa

SEQ ID NO: 2504 - DNA, 729 bp, Staphylococcus aureus
atgccagtgattaaaataaacaatcttaataaagtttttggagataatgaagttttaaaagatatcaatcttgaaatcaatcaaggggaagtagtagcaataataggtccatctggtagtggtaaaagtacattgttaagatgtatgaatttattagaagtaccyactaaaggtcaagtgatttttgaaggcaatgayttaacggaaaaagggacacaagtagataaactacgycaaaaaatgggtatggtatttcaaaacttcaacctatttccacataaaaaagttgtcgataatattattttagctcctaaattattaaagaaagataataacgatgaattacataaggaagcattgtcgttattagataaagtgggattaaaagaaaaagcagatgtatatccgaatcaattatcaggtggtcaaaarcaaagggtwgcaattgcaagagctttagcaatgcatccagatgttattttattcgatgaaccaacttcagcattagatcctgaggtagttggtgatgtattaaaagtaatgaaagacctagcyaaagaaggtatgaccatggtggttgtgacacatgaaatgggatttgccaaagatgtaagtgacaaagtcatatttatggcagatggcgttgtcgtmgagtcaggcacaccagtcgaaatatttgaacaaccgcaacatgaaagaacacaaaatttcttagcaagagtattataa

SEQ ID NO: 2505 - DNA, 516 bp, Staphylococcus aureus
atggacaatagctttttagaaagcctaaaagagattttagaaccatatgatgatatagaatcaaataaagatggttttgtgtttggtggatatatagattggcctagtttcgttgattacgaagatttccaagttgaagaagtaatgagtttattagggttggacataccatttgggagttctaaaaatccgtttgaattttatgaaattttaaaggttatacaaaatattgaaaaaggattatacgaagctatttgtgatgaagcaattattataaaggaagatgaagaaattagtacagaggattttatagattcaattatggattataaggttcaaatccctacagtggataggttgaagagttcaataacagaattatttgaaaagtacgaaattcctcaaggtatacaatacgagtatgatgaaggaatgccagaatcatctaaatactggtcactagaaatggatgaagacctttattttattaaagaaataaattttaatgagtgttga

SEQ ID NO: 2506 - DNA, 1764 bp, Staphylococcus aureus
ttgaaaagtagtattttctatctttccataatacattgtaattacaacggaggggatattgtgatgaagtgtatagataaaacgtgggttagctattataaagaattagctgataagttaacagattatcaaaataaacgttatgaattaattgaaatagtgaaggaagtatataaaaaaacgggaataaaattccctactttagcaagtgataatgtattgatggacatagatccttttacaatatttgcattatttaataaaaattccatgagagaaactaataaggtaaaaatattaacagaattagcttcggaattgaatattaagtccaaaattccgtcagtttttgacagtattccaacagtcaataatctgaatgctacatattataattttaaagattatggaaaagataatgatatagagaccttgtggaccttatttactgctgcattaaattttgcgaattatccttcagaagataataaattaaaatttatacatagttttgataagaatattactaaaacaggaaatgggaatagtaagattacgagtggtttgtactggattgcacctgaaacttttgctaactttgattcacgttcaatttggtacatttttgatacatataaactccctaaagaattgattaatgaacaacttaaaccaaaagaaaaactaacaggtcgacattatttagaattgataaatatgttaaagcaagttttgaagtgccaggaagtagagattaatgattttattgatttaagttatgagtcttggcattattcagaaatgataaatgaagctaatagaaacaaatttgattctaatatcaaagaaattgttgtcagtgaaaatgacaatataatacaaaatagaagtagaacaactaaagttataccatatggaaaacaagaattcttagatgaagtttttattgatgaaagtgattatgataggttagtacaacttttaagaagaaagcgaaatgtcattctacagggaccgcctggtgtaggaaaaacttttcttgcaaaacgtcttgcttattcattgattggcagtaagtgtaaagaacgaattaaattaattcaatttcatcaaagttattcatatgaagattttattatgggatatagacctactagttcaggttttgaactgactacagggacgttctatgatttttgtaagaaagctgataaagaccgcgataatgaatattttttaattattgatgaaattaataggggtaatctgagtaaaatttttggtgaattatttatgttgattgaaagtgataaaagagatgaagaactaatattactttatagcggtgagagattttctgtacctagaaatatttatattgtgggaatgatgaatacagcagatcgtagtttagcaattttagattatgcattacgcagacgctttgcgttttataatatgcaaccggcgtttcatacaactaaattcaaaaaacttcttaaagcaattaataatactgaattagagtcagtaattaattgtattgaaggattaaataaagagattgttcaagacgatatgttaggtaatggctttgttattggtcatagttattttagcaatattgaatgtatcgacaaagatgagctttctaatattatagaatttgagattattcctatgttagaagaatattggtttgatgaaccttcaaaaataaatgtatggtctgaaaagttaaggaattcaataaataatgattaa

SEQ ID NO: 2507 - DNA, 1041 bp, Staphylococcus aureus
atgattaatattaaaaatatttattatatgttatcttatgcatttacagtacttaacaaaaaaggctatcagaagttagcaacagaacaatttgaaaatatatttgatttatattcagctattcttataaaaggtatatcaagtcagttaaatagtggacttcatcatgaatatatagaacagacagattctctaaaagttattaggggaaaagttgatgttaagaattctatacaaggcttaggagttttaagtcaacgtattaattgtatttatgatgaattttcattaaatacatacatgaacaagattttaaaaactacaatgaaatgtttaataaaaacagatatttctagaaagaataagataaagctccgaaagttattagttcattttaataatgttgatactttagattatagaaatattcaatggtatcattcgtttgatcgaaataatcagacgtataaaatgttaatatctatatgctatttaatttttcaaggagtaatacaaactgaaagcaagggacaaaatgatcttatggtatttgtagacgaacaacaaatatctcggctatatgaaaaatttattctagagtactataaaaaagaatttccagagcttgttgtaacatcatcaaatattcaatggtcattagataatgatgataacgtgaatatgcttcctgtaatgagaagtgatattatgttgagatataaagataaatgtctaattatcgatgcaaaattttataaaaatacattacacaattattatgatactaaaaagatccattcaactaacctgtatcaaatatttacttacgtgaaaaaccaacaattaaatttaaaaaagaaagcaatacaggtctcaggaatgttgttatatgctaaaacagacgaaaatattgttttgaacgataaatttcatatgagtggtagtcaaatcattattaagacattagatttgaactgtaattttactattattaaaaaacagttgaatgggatagttaatgatatatttttactaaaataa

SEQ ID NO: 2508 - DNA, 159 bp, Staphylococcus aureus
atgattactattgattcaaagattaataaacaaatcgctaaaaacctttcacttgaaggtatgtatgttacacgagaacagcaaatacaaattcttcatgcaattaataatgagaaagaaattacaaatgaacttattcgtaaaatcgcttttaaataa

SEQ ID NO: 2509 - DNA, 1563 bp, Staphylococcus aureus
atgaacttaaagcaagaagttgagtctagaaagacttttgcgattatttcacatcccgatgcagggaaaacaacgttaactgaaaaactattgtacttcagtggtgcyattcgtgaagcgggtacagttaaagggaagaagactggtaaatttgcgacaagtgactggatgaaagttgaacaagarcgtggtatttctgtaacwagttcagtaatgcaatttgattacgatgattatraaatcaatatcttagatacmccaggacatgaagacttttcagaagatacgtatagaacattaatggcagttgacagtgctgtcatggtcatagactgtgcaaaaggtrttgaaccacmaacmttgaarttatttaaagtttgtaaaatgcgtggtattccaatytttacattcattaataaattagaccgagtaggtaaagaaccatttgaattattagatgaaatcgaagagacattaaatattgaaacataccctatgaattggccaattggtatgggacaaagtttctttggcatcattgatagaaagtctaaaacaattgaaccatttagagatgaagaaaatatattacatttgaatgatgattttgagttggaagaagatcatgcaattacaaatgatagtgmttttgaacaagcrattgaagaattaatgttggttgaagaagcgggtgaagcctttgataatgacgcgctgttgagtggagacttaacacctgtatttttcggttcagctttagctaactttggtgtacaaaatttcttraatgcatatgttgattttgcgccmatgccaaatgcragacaaacaaaagaarasgttgaagtaagcccgtttgatgattcattttcaggatttatctttaaaattcaagccaacatggaccctaaacaccgtgatagaattgcmtttatgcgtgtcgttagtggtgcatttgaacgtggtatggatgtyactttgcaacgtactaataaaaagcaaaagatcacacgttcaacgtcatttatggcagacgataaagaaactgtgaatcatgctgtagcaggcgatatcattggactatatgatacwggtaattatcaaattggagatactttagttggtggaaaacaaacctacagtttccaagatttaccacaatttacgccagaaatttttatgaaagtttctgctaaaaacgtcatgaaacagaagcatttccataaaggtattgaacaattagtwcaagaaggtgcgattcaatactataaaacattacacacaaaccaaattattttaggtgctgttggtcagttacaatttgaagttttcgaacatagaatgaaaaaygaatataatgttgatgttgttatggagccagtaggccgtaaaattgcacgttggattgaaaatgaagaccaaattacagataagatgaacacatcaagatcgattttagtgaaagatagatatgacgatttagtattcttatttgaaaatgaatttgcaacaagatggttygaagagaaattccytgaaattaaattgtatagtttactttaa

SEQ ID NO: 2510 - DNA, 1458 bp, Staphylococcus aureus
atgaagtgtttaattaggtttatattagtattagggttgttaattagcagtgctatggtgtatatcaatcccrcagcayatgctgaacaagatcaaamatgggagaagattaaagaacgcggtgaacttagagtgggtctttctgcagattatgcaccaatggaatttgagcatacagttaatggtaagactgagtatgcaggtgtagatattgatttagctaaaaaaattgcgaaagataataatttaaaattaaaaatcgtcaatatgtcatttgatagtttgttaggagctcttaaaactggaaaaattgatattattatttccggaatgacttcaacgcctgaacgtaagaagcaagttgatttttcagattcatatatgatgactaaaaatatcatgcttgtaaagaaagataaagttaatgawtataaagatatcaaagactttaataataaaaaagtaggggcacaaaagggaactgaacaagaaaaaatcgctcaaaccgaaattgaaaatgcatctattacttcattaagccgtttaccagacgttatattagcwytgaaaagtggaaaggttgaaggtgytgtagttgaaaaacctgtagcagaagcatatttaaaacaaaatcctaaattaggaatttccaatgtgaaatttaatgaagaagaaaaagatacagtgatagcwgtrccaaaagattcaccaaaattattgtcacaaattaataaaacgattaargaggttaaagataaaggattaatcgataaatatatgactaatgctgcaaatgcgatgaatgatgacagtggttttatttctaagtatggtagttttttcttgaaaggaattaagattacaatattaatttcacttatcggtgtwgcattaggttctattttaggtgcattcgttgcgttaatgaaattaagtaaaataaaaattatttcatggattgcytctatctatatcgaaatattaagaggaacaccaatgttagttcaagtatttatcgtattctttggtataackgctgcattaggactagacatttcagctcttgtttgtggaacaattgcattagttattaattcctcagcttacattgctgaaattattcgtgcaggtataaatgctgttgataaaggmcaaatggaagccgcacgtagtctaggtttgaattatagacaaacgatgaaaagtgtaattatgccacaagcaattaaaaayattttaccagctttaggtaatgaatttgtcactttaattaaagaatcatctattgtgtcaacaattggagttggcgaaattatgtttaatgcacaagtggttcaaggtatttcatttgacccattcacaccattamtagtggcagcagcattatactttgtcttaacatttgtacttacacgcattatgaacatgattgaagggagattgaatgccagtgattaa

SEQ ID NO: 2511 - DNA, 204 bp, Staphylococcus aureus
atgaaaaacgcaataatgaaggaggtagtttatataaattttgaaggattagaacaatatttaaatggtgataatacaagatataacacgcttagtttagagacgcttaattattatttaaaacaatatgtgttaactgtcccgttcaaaaatatggatgttcaaaatgggatgaaagtttctgcagaagtaaaagatatttaa

SEQ ID NO: 2512 - DNA, 366 bp, Staphylococcus aureus
gtgaaccatcaacacggtgacttttattatgaaatgaataatttctttaacgtgtattttgaatataaaggatttactgtaaatatagtttcttcaactatccatacccatggtgatggaaaaagcttaaaaggttctcacgtgtctttaatcatacctattgatggcgttgattatgttacaggtgctgactttggagacttgccatttagtgtcatgccaattgttccaaaagataatagtccagtcattcatgatatgaacggtgatttccatgcaatttacgtcaacgattatttattttatgttcgaaaaatggggaaagataatgacaataacttggatcacactatgaagtggaattaa

SEQ ID NO: 2513 - DNA, 576 bp, Staphylococcus aureus
atggaaaaaaatcaacgaaaaaaacgcagtgatgccgaatataaccaacagattatcttaactacaatggaagatttactagaacagggtgaagatataagtactaagaaaatgtcagatattgctaaaatatcaggtgttggagttggtacattatatcgtcattttgaaagtaaaacattgttgtgtcaggctattatggataaaaaagtcgatcaaatgtttatagaaatagaagatattttagcggaaaatacacagtggcccgtgcgagataaaatcaatgttatattaacaaagtatctagatttaaaagaagcaaatttcacaacattaaattttatagaaaaatccagttcacactctagttctgtaattaatattccattctttgagcgactaaaaaacttattaattcaacaattcgaaaatgttcattccatagcagacttggattttaaacttaatctaatgctcaatgcattttcttcagatttctattattttgtaaaacataaccaaaaattaacaaaacaacaatttttagacaaattactagatttatatctaaaataa

SEQ ID NO: 2514 - DNA, 474 bp, Staphylococcus aureus
ttggaatataaatcttacaacaaaatgagtaataatattttatctatcttgttgagtgawaaaaatttcgataataaaatggtagtctcaacaggtagttacattttgtctgagttgccatgtattgttgcctataaaaataatgatatcgyggggctactaacgtataaagtttatgatgagtatattgaaatcatttctttagatagttttgtagagaacaagggtattggtagtcatttrcttrattatgctgaaataattgcctcagatatgagtaaaagaagtatcagtgttattactacaaatgaaaatattaaggcactytatttctatcaaaaaaataaatatagaatcacagacgttatttttgatgctgtaacagaagctaggaaaataaagccgtcgattcctrmaatkgrtraaaatggcattgaaattagagatgaaattgtwttgamaaaatrtttrtaa

SEQ ID NO: 2515 - DNA, 804 bp, Staphylococcus aureus
atgttaatggatccaagtttgatcttaccttatttatgggtacttgtcgttttagtatttttagaaggcttattagcagcagataacgcratygttatggctgtaatggttaagcacttaccacccgaacaacgtaaaaaagctttgttttacggtttgytaggtgcatttgtatttagatttttagcattattcttaattagtattatcgcgaacttttggtttattcaagctgcaggagcggtttacttaatttatatgtcaatcaaaaatctrtggcagttctttaaacacccagaaattgaaagtcctgaagctggagatratcatcattatgatgartctggtgaagagattaaagcaagtaacaaatcattctggggaactgtgttgaaaatagaatttgcagatatcgcatttgccattgattctatgcttgctgctttagctattgctgtaacacttcctaaagttggtattcactttggtggtatggacttaggtcagttcgtagtcatgttcctaggtggaatgattggtgttattctaatgcgttatgcagcaacatggttygtagagctattaaacaaatatccaggacttgaaggtgcagccttcgcgatcgttggttgggtaggtgttaarttagttgtcatggtattagcgcacccagacatcgctgtattgcctgagcacttcccacatggcgtattatggcaatctattttctggacrgtactaattggattagtaattatcggttggttaggttcagttgttaaaaataaaaaatcgcataaataa

SEQ ID NO: 2516 - DNA, 1062 bp, Staphylococcus aureus
atgagtaacgcaaakaatgctgataataaacagtttttcagtaagattttaaattctattggtgctggtgttgttattgcacttgttccgaatgctttattaggtgaagtattaaaaatatttaaaagtggtaatgaaattttagaattaacgtatcagttagtgatactaattcaatyatttatggcatttattattggggttttagctgctcatcaatttaaatttaatggygcaggtgctgctatagtaggtacatcagctatgattggttcaggtgctgttgtatatagcaataatagttttatgttaaaaggtataggtgacattataaatacragtttggttgttattattgcatgtcttatatatatggtattacaaaacaarcttggatcttttgaattaattatattaccagttttagtacctatcgttagtgggggtatcggtctaatcacattaccttacattcgaaaaattactcaagcaattggaaatgtaattcattcttttacagacttaaatccgttgttaatgtctatacttattagtgtggcattttcattattaatggtaacaccaatatcgttagtagcgattgcaactgcgattagtttaaacggrctaggaagtggagcagcaaacctaggtatagtggctgcytgtgttactttcttattyggctcattgcgtgtcaattctattggygtaaatgcagttttactcataggagctgcaaaaatgatgatcccagtttacttgaaaaatttaattatttcgataccattgactataaatggaataattactggaatcattgcttacgttcttcaggttaaaggaacaccattgtctgctggatttggatatacaggattagttggcccaataaatgcatttaaccgaatgtcaggtgatccaacaatgaatattattttattagcwcttggttattttgtcataccatttgtatcggcrtttattgttcatgaattgtgtaaaaaattcattcctatatattctaatgatatttataaatttgaagttccaaaacaataa

SEQ ID NO: 2517 - DNA, 1149 bp, Staphylococcus aureus
atgtcaaatattaaaattgtaactttgattggctttttcacaatgtttattgttggtgtttcagacttaattgttgtaggaatgttaaatgaaatgagtaaagaatttcatgtaagtaatgctttaataggtcagttggtaacattgtatgctgttgctttttcaattctaagccctctcttaacaaaggtaactagtcaaattaatgacaaaaaattattagtatcctgtttaatactttttattattttcagcatgcttacaactgtaatgaccaattatttctttctatgtattgttagaatctttatggcgggcatcgcttcattaatcactgtaaaattaatgtctactggagcaaatattgttccagtagaatacaaagcatcagttatcgctaacatatacgtaggctttagtgcagcaaatatacttggtatacccataggtacattaattgcttcccattacaattggaagattccgttttatatcattgcgattatcacttttttatgtctactaggtattatgttatttatcccgaataaatcacattatagtattaataatcattctaaataccaattagtaaatttcagaggcacattaatcatgttgggctttttattaatcatgatgatatctaatagcatgttatttacatatatagagcctttagtaaaaagtaaaggtcatagcatctggatagtaagtttgtgtttatttttctcaggtattgcaggtgttttaggttcaaaattaggaaataatttaactgaaaagaaaggctataggattgctggaaatatcattataattgtctatattatttctattatgagcatcttattgactggacaaaatgtcatacttttaattttatctatatttacatggaatttatttcattggggaacaaatccaacagttcaatatgctttacttaaatttttaaaaggcgatccaagtcaaatattgagctatgatatttcaatattaaatttaggaatcggattaggatcattaattggtggtatattattttctatcgataatcagttcaacttatcaattgttgttgctatgatattagcaatggtttcatctatattattaaaaacagctgttcatacagagaaaaattaa

SEQ ID NO: 2518 - DNA, 264 bp, Staphylococcus aureus
gtgttgataatctatttgttgaagtataaagtaacgaattataaaccttctcctgatggaattatatatatattacaaaaatatgacttacataacaaagacactatatatgttggagatgctgtttttgatattaaaatggctaaaaatgccaatattgattcttgtgctgtaacttggggaagtcatagtattgaagtattaaacactgaaaatccaaattttataattaataatgttaaagaacttaattttgaggagtaa

SEQ ID NO: 2519 - DNA, 447 bp, Staphylococcus aureus
atgagtgttgaaatagaatcaattgaacatgaactagaagaatcaattgcatcattgcgacaagcaggcrtaagaattacacctcaaagacaagcaatattacgttatttaatttcttcacatactcatccaacagctgatgaaatttatcaagcactttcacctgattttccaaatataagtgttgcgacaatatataataacttaagagtgtttaaagatattggaattgtaaaagaattaacatatggagactcatcaagtcgattcgactttaatacacataatcattatcatattatatgtgaacaatgtggtaagattgttgattttcaatatccacagttaaatgaaattgaaagattagctcagcatatgactgactttgacgtaacacatcatcgaatggaaatttatggagtttgtaaagaatgccaagataaataa

SEQ ID NO: 2520 - DNA, 333 bp, Staphylococcus aureus
gtgaaaacaatggaattttatcaaatgccaatgtttaataaagtgctaatgaatcatttgagactagagaaatatcaagacttaatgctaatttctcaaaaagattttgaagttggaaactcaatatacttaaatatcttagtaaaagatatcgaagaaaaatcacaaaacatttcacaaaaatttatagtaagccaattagaagaacaaccatggaacgctaaagaaatgacaataaaagatccagatggaaacttaatcacacttactcaatcaaatattagcgatactgattttgaaaaattaatgaaaaaaacttctaaagattattag

SEQ ID NO: 2521 - DNA, 822 bp, Staphylococcus aureus
atggattcattaaaagttctaactgaagtagttaaaacgcaaagttttactaaagctgcagaaaatttatatacttcacagccatcaataagtcgcgatattaaacgattagaactggaatacgatgtaaaaattttcgaatttagacattctaaaatgtctttaacaagtgatggggagaaactatttcaatatgctttacaacgtgagcgattagaacaaaacttaagacacgatttgaaaatgcaacctgatataatttcaggagatttaacgatagggagtagttacacttatggcgaatatcgattgtcacaacatcttgctgatttagccaaaaattatcctgaattatacattcatgtgtatttaaataattctgatacagtattacaacatattaagaataacactatcgatttaggtataatcgaaaaagaggttcaaagtaatattatacacagtagacgtattgctcaagatgaaatagtattaattcgcaaaaaatcatcatcttcaaataagtcaatatgttttatcagagaacgtggatcagggacaagagtctatcaggaaaatgcgttatcacaaatgacttcatcctcttatttagtagaaattaacaacacaaatctaattaaaaatatggtccacgctgataaaggcttttctattgtttctaaatcaacattaacaccttatgatttagaaaagctagaagtaacaaacttagacatcaaacgttatttctatttagtcatacataaggataagtatattgatacgaagcttaatgaagttattaaaaatttgatttcatga

SEQ ID NO: 2522 - DNA, 576 bp, Staphylococcus aureus
ttgaaaataggttatgcaagagtttcaacaggattacaaaatttaaatttacaagaagatcgattaaatgcatatggttgtgaaaagatatttaacgatcatatgagtggttcaaaaagtaaaagacctggtttagataaagcaattgaatttgcaaggtctggagatactattgttgtttggagattagatagactaggacgtaatatggaggatttaattacattagttaatgagcttaatgaacgaggtgtaagtttccatagtttagaagaaaatataacgatggataaatcaagttctaccggacaattattatttcatttattcgcagcatttgcagaatttgaacgtaatttaattttagaacgttcttcagctggtagaattgcagcacgtgctagaggacggtatggtggaagacccgaaaaattaaacaaacaagatttaaaattgctcaaaacactttatgataatggtacgccaattaagacaattgctgaacaatggcaagtttcacgtacaacaatttatcgttatctcaataaattagaagatgaaaagagtgataagtaa

SEQ ID NO: 2523 - DNA, 951 bp, Staphylococcus aureus
atgaaagttgttgggttraatcgtatgcgtgaagttgaaactgaattacaacaacgcttttcagatktagattttaaattttataaaaaagcatcagaaatacctgagagygacttggctratttagatatattagttggttatgatggcggtatcaatgaggcatttttacracgttgyccraatttaaaatggatygcatggtttgcaacgggtgtaaatacattrccgttagattatattgcagatcacggcatacttttaactaatggaaaaggtgttcaagctaaacaattatctgaatacattttrgctttcattttagatgattataaaaagatgaaactatcatatgataaccaamgacaacatatatatgattcgaaaataactggtaaacgcctatcaggacaaacagttttatttttaggtacaggtgcaattgctactagaactgcgaagttagcaaaggcttttaatatgaatttaattggtctgagcaagtcaggtcagaacaaagatgagtttgaygagatatatactatcgaatcacttgaaagcacattaccaaatgctgacattrttataaatgctttaccagaaacgcaagaaacgattcatttactaaagaaaaaacattttgaattaatgaaagatgaagcactttttataaatataggacgaggtagcatagttaaagaagcgctcttaatagaagtattaaaaagtaragttattcgacatgcatatttagatgtgtttgaaaatgaacctttgaaacctaatcatgaattatatgaattggawaatgtaactataacagcgcatataactggtaatgattatgargcaaagtatgacttattagatatttttaaaaacaatctagttaattttctcaataagaatgrtmtaattgagaatgaagttgatgctaaaaaaggctattaa

SEQ ID NO: 2524 - DNA, 768 bp, Staphylococcus aureus
ttggaaacaattaaacaagaagtaagagaatctattgttaaaggaattwtcgcgggatataaggactatgttaatgagagaaatgaagtcaagaaacgtatggtgattagtgatgcctatgystwyacyaaatctaatcatattgaaartcaagttgctaagcatttggaaaattttgttaagtatattaaagaaaatgctggaccatcatggaagtatttaaagtttatatttaataargatgaagagaaaaataatatcatgtttatattgaaaaatgaagattactttgatgaaaaaaatgtaagcgtagggaagagtttagttgctgataaraatcmaaaaagtaaaaactacctagaggkacttatrgctaagaatagkgrcattaattttgrtactgttggagaagattttraaattrggcatcaaatgactgcagatagtatattatttaatataaaagaaggcagtaatagagatattaattcttattttttaattattacatatcgtattgataaagaatcaaagcaattagctgcaatcaaacaatggttrccaaatccagaaacaaattctgcaattatggttgatgatttgacasmrttrwtagamaaagtaatagtagaaagagaagattatcatattgacgaagaagagttagaagtacttaaaaacgatggagagttagaaytcatagatgtrgaacatgcatttggtatcagtatcgatgaagrtaacgatatgattgaaagygaaaggtga

SEQ ID NO: 2525 - DNA, 456 bp, Staphylococcus aureus
atgttgcaaaaaggagaacaatttccaatatttaaattagaaaatcargacggaactgtcattacaaatgatacattaaaaggtaaaaaggcgattrtatatttttatcctagagataatacacctacttgyaccayagaagcttgtgactttagagacaatttagaaatgttcaatgatttagatgttgcagtatatggtataagcggtgattcaaagaaaaaacaccaaaattttattgaraaayacggattgaatttcgatttattagtagatgaagattttaaattagctaaagaaacwggcgtatatcagttaaaaaaatcatttggcaaagaaagtatgggyattgtaagaacracttttataatagatgaacaaggtaaagtattagatgttatcgagaaggttaargttaaaacacaaatagaagaacttaaaaacattttggggtga

SEQ ID NO: 2526 - DNA, 1359 bp, Staphylococcus aureus
gtgtcaatttttagccagtttttaaaaagatcaagccctcaacaaggtattgtattgtaytatatcgtcgcaattgtcrttgcatttttattattaaacttaccgtatgttcataaaccaggtgtagaagtaaatccaattgacacattatttgttgccgtatccggaattagtgttactggattgtctccgataagtattgtcgatacctattctacatttggacaattaattatcctcgtgatattaaatattggtggaattggcgtcatggcaattggtacgatgttatgggtggtactaggtaaacatattggaattagagaacgtcagttaattatgttagataataacaaaaacacaatgagtggtaccgtcaaattgattattgatattgtaaaatcaatatttgtaatcgaactcgtaggagccatgttattagcattttacttttatcgagataatccagatttaaaatatgcaatcatgcaaggtgtttttgtttctatttctgccactaccaatggtggattagatattacaggtaagtcattaattccttatgcacatgattattttgtacaagcgatagttatatttttaataattttaggatcaatcggcttcccagtattattagargttaaagcttayattcaaaatagggttactaattttagattttcattatttactaaaattacgacatcaacatatttattcctatttattgttggggtattagccattctattatttgaacataaccatgcgttcaaaggwttaagttggcatcaatcgttattctattcgctgtttcaatcagcgactacaagaagtgcgggtcttcaaacaattgatgtgacaacactaagtgacccyackaatattatcatgggtattttaatgtttataggwtcttcgccaagttcggttggtggcggtattcgtacaacaactttcgctattttaattttgtttttaattaactttagtaataatgccgataaaacatccatwaaagtwtacaatagagaagtacacattatggatattcaacgttcatttgcagtatttacaatggcgacaattttaacatttttaggaatgctaattatatcagctactgaaaatggtaagcttacatttttacaagtattttttgaagtcatgtctgcatttggaacttgtggactatcgcttggtgtcacaagtgatattagtgatatttcyaaggtcgtactaatgrtactcatgtttataggacgtgttggcttaatatcatttatcattatgatagcaggacgtcgagaaccagataaattccattatccaaaagaacgtattcaaataggataa

SEQ ID NO: 2527 - DNA, 1737 bp, Staphylococcus aureus
atgattaaacgatatttgcaatttgttaagccatayaaatatcgtatttttgcaacgattattgttgggataattaagtttggtataccaatgcttataccactwttaattaaatatgcaatagatggcgtgattaataaccacgcaytaacgactgatgaaaaagttcatcatttaactattgccattggtatcgcattatttatttttgtaatagtgagaccaccaattgaatttatacgtcaatatttggcgcaatggacaagtaataaaatattgtatgatatacgtaaaaagttatayaaccatttacaagctttaagtgcgagattttatgctaataatcaagtaggtcaagtaatatctagagtgattaatgatgttgaacaaacaaaagatttcattttaaccgggttaatgaatatttggttagattgtataacaattattattgcactatccataatgttctttttagatgtgaaattgactttagcagcactgtttatcttcccattttacattttaacggtgtacgttttctttggaagattaagaaaattgacrcgtgaragatckcaagcattagctgaggttcaaggattcttgcatgaacgtgttcaaggtatttcagtcgttaaaagttttgcgattgaagacaatgaagcgaaaaactttgataaaaagaayactaatttcytaacacgtgckttgaaacatacaagatggaatgcctattcytttgccgcaattaatacagttacagatattggaccaatwattgtcatcggtgttggtgcatatcttgctatttctggatcaatcacagtaggtacacttgcagcatttgttggatacttrgagttattgttcgggcctttacgtcgtttagtcgcatcatttacaactttaacgcaaagttttgcttcaatggaccgtgtattccaattaattgaygaagattatgacatyaaaaatggtgttggtgctcaacctattgaaattaaacaaggtcgtattgatattgatcatgttagttttcaatataacgataacgaagctccaattttaaaagatattaatttgagtattgaaaaaggagaaacagttgctttcgtaggtatgagtggtggtggtaaatcaacattaattaacttaataccgagattttacgatgtaacttctgggcaaattttaatagatggtcacaayattaaagattttttaacgggaagtttaagaaatcaaataggattggtgcaacaggataatattttattytctgatacagttaaggaaaatattttacttggtcgtccaacagcaacagatgaagaagtagttgaagcggcgaaaatggctaatgcacatgactttatyatgaacttgccacagggatatgacactgaagtaggtgaacgaggtgttaaattatcaggtggtcaaaaacaaagattatcgattgctagaatatttttaaataatccgccaattcttatcytggatgaagcaacaagtgcacttgatttagaaagtgaatccattattcaagaagcattagatgtgttgagtaaagatcgaacgacacttatcgtagcgcatcgcttgtccactattacacatgctgacaaaattgtcgtaattgaaaatggacatattgttgaaacaggtacgcatcgtgaattgattgcaaaacaaggtgcttacgagcatttatatagcattcaaaayttataa

SEQ ID NO: 2528 - DNA, 981 bp, Staphylococcus aureus
gtggaagatttggaaaragttttgataactggtggggctggttttattgggtcrcatttagtagatgatttrcaacaagattatgatgtttatgttctagataactatagaacaggtaaacgagaaaatattaaaagtttggctgacgatcatgtgtttgaattagatattcgtgaatatgatgcagttgaacaaatcatgaagacatatcaatttgattatgttattcatttagcagcattagttagtgtygctgagtcggttgagaaacctatcttatctcaagaaataaacgtcgtagcaacrttrarattrttagaaaycattaaaaaatataayartcatataaaacgwttyatctttgcwtcrtcwgcagcygtttatggtgatytwcctgatttrcctaaaagtgatcaatcattaatyytaccattatcaccatatgcaatagataaatattacggcgaacgkacgacattaaattattgytcgytatataacatwccaacagckgttgttaaattytttaatgtatttgggccaagrcargatcctaagtcwcaatattcaggtgtkatttcaaaratgttcgattcatttgarcataacaagccwtttacattttttggygayggwctgcaaackagagaytttgtwtatgtwtatgatgttgttcaatctgtrcgcttaattatggarcayaaagatgcrrttggacayggttataacattggtacrggyacwtttackaatttrytagaggtttatcgyattattggtgaattatatggaaaatcagtcgagcatgawtttaaagaagcamgaaarggagatattaagcattcttatgcagatatttctaayttaaargcattaggatttgttcctaaatayacwgtrgaaacaggyttaaaggattactttaattttgaggtagataatattgaagaagttacagckaaagaagtggaaatgtcgtga

SEQ ID NO: 2529 - DNA, 705 bp, Staphylococcus aureus
ttgttaaagtatgaacatattgctaagcaacttaatgcgtttatacatcaatctaawttcaaacccggtgataaattgccaarcgtgacgcaattaaaagaacgttatcaagtaagtaagagtactatcattaaagcattaggcttattggaacaagatggtttgatctatcaagcacaaggcagtggtatttatgtgagaaatattgcwgatgcmaatcgtatcaaygtytttaagacyaatggtttytctaaaagtttaggygaacaycgaatgacaagtaaggtacttgtttttaaggagatkgcaacgccacctaaatctgtacaagatgarctccaattaaatgcagatgataccgtctactatttagagcgattaagattcgtggacgatgatgttttatgtatcgaatattcttattatcataaagaaatcgtgaaatatttaaatgatgatattgctaagggctctatcttcgaytatttagaatcaaacatgaaacttcgtattggtttttcagatattttctttaatgtagatmaactcacttcaagtgaagcttcattactacaattrtctrcaggtgaaccatgtttacgttaycaccarackttttatacaatgactggcaaaccytttgattcrtctgacatcgtatttcattatcgtcatgcacagttttatattcctagtaaaaagtaa

SEQ ID NO: 2530 - DNA, 1512 bp, Staphylococcus aureus
atggaaaaaaatgaaaacattaatgtagagattttaactacgtcagatatgcatagtcatttcttaaatggtgattatggttcaaatatttatagagctggtacttatgttaaccaartaagagcacaaaatcatcgcgtcattttattagatagtggcggaagtttagctggctcgttagcggcctattattatgctattgttgcaccttataaacgacatccaatgataaagttratgaacagaatgcattatgatgctagcggtgtgagtccaagtgaattcaagtttggtttatcatttttaactcgttcaattgctttggcacgttttccatggttatcagcaaatattgaatacaatgttactaaggagccttatttttcaactccatattgtattaaacattttggtgacttaaaaattgctatcgtaggcgtyacagcagatggtttaatggaaaatgagtattctgaaatggagcaagatgtatctattgaaaagacattagtggcatcaaaacgwtggattagatatatccatgaagttgaagagccrgattttttgattgtaatttatcatggtggattgaataaaattagtaatagyacgaaaaataaaaaggcaagttcgaatgaagctgaaaaattaatggaagaamtyggtgttatagatttaatgattacagctcatcagcatcaaacaatagtmggtcaagatcatgaaacgtattatgttcaggctggtcargatgcmaaagagcttgtacatctttcgattaattttaaaaagagaacaacaacttatgatgttgaaagcattgattctaaagtgattgacttaaatgagtatgaagaggaycaagaattattagatttaacattctatgatagaaaagcagtggcttattggtcacaggaaatcataagtgataaaggtttgatgttatcagtraatgggttacaagatttagtctgtcaaacacatccattttcrcaattattacatgatgcaattcascttgcatttgatratgatataacatgtgtccacgtgcctwtgaacggagagaaggggttgartggacagattcgaaatgaagatttgtatcatgcatacccwtatccagataagccaatggatatgacaattagtggtcaaaatatcaaagatatattggagtatagttattcacatttagattttgttaacgagcaattaagcttaacaattattgatgaaacrttatgtacaatgtggcaaggattcaattatgagattgatatgaatcwagaacctgggcaacgagtaatgttagatcaaattgattygastaagagttatagagttacaatgactgactattgttatcgtaactacaagaattatttaaaaaatgctattatacatgaatcrtacgatgaaacaatgagtacattaattgcagagaagttaagagatccgaattatcdtatttcatgtagtgataattttrtagttaaaaacaggtra

SEQ ID NO: 2531 - DNA, 543 bp, Staphylococcus aureus
atggtcagagaatccatacctaaagaaggggaaaacattaaaattcagagttataaacatgatggtaagattcatcgcgtttggtctgaaacaacaatattaaagggtactgatcatgttgtcattggtggmaatgatcatacgttagtractgaaagtgacggaagaacttggataacacgtgaaccggcaattgtttactttcactcagaatattggtttaatgttatctgcatgtttagagaagatggaatttattactattgcaatttgtcatcrccatttgtttgtgatgaagaggcattaaaatatatagactatgatttagatattaaagtatatccaaayggaaagtatcatttattagatgaagatgaatatgarcaacatatgaatcaaatgaattatccgcatgatattgatattattttaagacgcaacgtggacattcttcaacaatggatagaacaraagaagggcccattygcgccagattttatcaaagtttggaawgamcgttacaaaaaaattagacartattaa

SEQ ID NO: 2532 - DNA, 219 bp, Staphylococcus aureus
atgaaatacaatactaatgttaaacatacaactttagaagcgtttgtcacaacygtcaatgatttgggtattgaattaattatcaatgaagcacttcgagaggtaagaaaacgacagctcatagaacttatagatgacgcactcgtcaataaagatgaagcagcatttaatcaatatayggcagaatacaaaaatttggaggcatttctcggtgaataa

SEQ ID NO: 2533 - DNA, 1038 bp, Staphylococcus aureus
atgtatcagcagtctagttttaaagaaaatttgatacactggtttgatgaaaatcaaagagaaatgccatggcgacaaacgaccaatccgtactatatttggttaagtgargtcatgttacaacagacacaagttaaaacagttattgactattatcatcgttttgttgaacgatttccaactgtggaagttttgagtcaagcttcggaagatgaagtgttaaagtaytgggaaggcttaggatattatagtagagctcgaaattttcatacggcrattaargaagttyatgataaatatgaaggcttagttcccaaagatcctgatcaatttaaagckttaaaaggtgttggcccatacacacaagctgcagtaatgagcattgcatataatgtaccactagcaactgtagacggaaatgtttttcgrgtatggtctagattgaatgatgactatcgagatattaaattacaatcgacgaggaaatcgtacgaacaagaattrttaccgtatgttactacagaagctggaacgtttaatcaagctatgatggaattaggggcrttaatttgtacaccraaaaatccattatgcttattttgtccagttcaagaaaactgtgaggcatttgataaaggtacatttgaaaagttaccwgttaaatctaaaaatgtaagtaaaaaagtaattgagcaatccgtctttttaattagaaataatcaaggtcaatatctgttgcaaaagcgtagmgaaaaattattgcatggtatgtggcaatttcctatgtttraaagtgagcatgctagacgtraaatgactgaaaaaatcggtcatgacattcaaccagtagaaacacctatttttgarttgaagcatcaatttactcatttaacatggaagatwaargtatacgccgyttcaggarcaattaacattgaaasattaccagatgacatgatttggtttratttaagtgatcgagaycaatatacattccctgtacctatgtcaaagatttatcaatttataaatgggtaa

SEQ ID NO: 2534 - DNA, 177 bp, Staphylococcus aureus
atgactgttgcagaagtgggtaacattgttgagtttatggatggattaagaggtcgtgttgaaaaaatcaacgataactctgttattgttgacttaacaattatggaaaattttaatgaccttgatttaccggaaaaaactgttatcaatcataaacgatataagattgttgaataa

SEQ ID NO: 2535 - DNA, 837 bp, Staphylococcus aureus
atgctagataatattattttatattttaaaaacttmccgcatactaaaaggtatgtaacagaacgtttaaaacaaagttggaaaagttttctaatcgtattagctgcatgtttaatacttattattgcaagtgaaacgctattttcctttagtcatttgaccgatgttaaagaggtgmgatggttatttagamtyattgyattgattgtttttgcggtaktgatgttcwcaatttatatctcttatcatcattatatgaatgactttttagtkamtaagttatttaatatttccgcagcgacgccagtagttattatgtctattttaagttttattatgctagtcattttgacgatgattagtgcattggttaaaccagtaaacttcgaaacatcatatatagcgctattctattttattgtgatggcaactatttttgtaggattaatatcmgttacttttggtcttattcgactgttaactgaaaaaataaatatcatattttatgggrtttgtgtattgtgtwtcttaktgttrccaattattttyataccaaatccaaatcatgtatttatcaatcacatcctaatgctraatccaatgtattacattgttaatggtatagcacaatctatcatatttggtatatcaagtatggaaaacattccatatcatttttactttattttattcttatgtttaatagctgcagtaaatttcgtattagcaaggtatacgacacacgcaatttataataaaacatctaaagtgacacaaactgataatcaacargatgtttcaaawgatagtacagacgaggcggatacttcttcatga

SEQ ID NO: 2536 - DNA, 603 bp, Staphylococcus aureus
atgaataaaatctcgaaggctttaacttggtttattataagtttcattatatttcatctcatattatttattatgtggggcgaacaccaagaatactggtatttatatacaggtataatgctaattgctggtatcagttatgtrttttatcaaagagatattgaatctaakcggttgcttacatcaattggtgttggtattattacrgcaattattttaattatgcttcaacttttattctcacttataacttctaatttaagttatagttcattaattaaagaattagcaagaacaggtgtcaattggaagtggcaaatgttagtaactttactttttgtcattccatgtcacgagttatatatgagaactgttttacaaaaagaattaacacatttttcaataccgaaatggrtagctatattaataactgcaatttgttctagttcattatttatttatttagataattggtggatagtaacatttatatttgttgcacaagtgatattatcattaagttatgagtatactcgacgyatagcaacaacatccgttgcrcaaattgtwgctattatattgttattaatttttaatgcttaa

SEQ ID NO: 2537 - DNA, 1518 bp, Staphylococcus aureus
atgggaagttcaattgttttaaagttactaaaagtaacacactactataggaataaacagaataaraaatggtatttaccttttggatatgatgctsaagatatcgatttaaacaatattagtttacatatttatcaaggwgaagcattaggtataattggtgaacctgaatcttccaaagcgwtggtaggtcaattgttggcaggtgcaattaaaccygataaaggtaaagtagtttgtactgaagatttgttctacggatatattgaagatcaatcgttaattcatcaaactgttgaagcttayacagcgcagttagttcaactatttccatatgaaattaatratcataaagctgaacagattattcaatatgcacatttaggygattataaaacgaagccggttaaccatatttcgaaagcggcatacgctcaattactattaagtattgcacgctcatcaaaatcaaatattattattttaaatcatgttattgactatttaacaccacaatttatggaacgtgcgattgaattaacaaatgattatattgaaaataatttaacgattgtgtcaattggtgatgatattgataaaatttcacaagtgagtaactayatagcttggttttcacatggtcaattaagaatggaagggtcacttaaacaagttattccatcttttaaagaacatgaacgtgatcgattaagtytaaactcaaaagaagaaattgaaaactttgatttagattggaaaaagaatcgtacaagaataccrgagatgacctataatttcaaacgygttgagcgctataatcatgcaaaaccgcctaagtttttagtgcgtttttggactttagcctcaggtactattttaggcttagcattgatgatgttgctcattttcaataatataggaattatttcgataacagattttacgaatcgtgctacgatgcaaaatgaaaataaagatccatatggcgaaaagttagcttatggaattgcttttaatggcagtgtggatmtgcaaggggataaacaagtcacaattccaaaatatagtgtagttacaattactggygaaaatagtaaaaattatcgtgttaccgcygataataagacttactatgttagtaaagataaattagaatattttaacccggcaggtttatatcaaacgcatagttttaaaaaattagcrccatwtatgaaatcaaattatagtaattactatgcatactttaayagtcaattacataaaaagcatagttcagttatwaaaactttagttcctgatgatgataaccgtttcgttgcatccgttacacaacaaccgatacaattacttttcaatgataataatcagttatacggttttgtttatccaatygtagataaaaaagaattaaaagataagtttaatattaacaataacatttggattactaaagttgggaatggatattgtattgccaatttraaagaagacaaatggatttatattgaattgtag

SEQ ID NO: 2538 - DNA, 672 bp, Staphylococcus aureus
atgagagtcaatgttttacaacatacaccaaatgaaggtgttggatacataggtgagtgggcgaaggaaagagggcacgaagtctatatttatcatccatatatgaatgatggcgtgctacctcttgcggaagaaacggatatgttagtgatacttggtgggccaatgaatccagacgatgagatgccttggattcaatcagagcgccaattaattttagtattgatggcacaaaacaaaccaatttatggtgcttgctttggtgcacaacaaatttcgaaagcattaggttatgcggtgttaaaatcaccagtaaaggaagtaggttgggatgatgtttacttagaatcagaaatcattccgaatataccaagtcgattgaaggcactacattggcatgaagatatgtttcaaataccgcaacaagcagaattattattttcggggaaccatattagaaaccaaggatttatcatcgatcatcatgtgattggattacaatttcattttgagcctggtccagacgatgtcagagaaatagtactaaatgatgcccaatacatcaatcattctattttagagcaatcggcggaggacatattagcctttgaggtgcctaaacagaataggcaggccattttccgaatacttgattttattactcaagcgtaa

SEQ ID NO: 2539 - DNA, 291 bp, Staphylococcus aureus
atgtctgagccagaattaagacacgaaatacaactttataaagagaaaatgagaaaagctgagatgaatggtattttaaatgaatatgacgtttatcaaagtaaagtaattgttgccgaaagttacttagtagacagaaaaaagatwgaaattggtaaaatttataaactgactgatggcagtaatcaatattttaaagtagaaagattaaaaggtatttttgcgtgggggtttagatttaatagygatgaacccgaagaaggmttacctatagcgttattacaattatag

SEQ ID NO: 2540 - DNA, 1965 bp, Staphylococcus aureus
atgaaatggttcaaattaatacttgatgttacaaycttcattctgattgctatattgttatttgtttatacatataaagaaaacgaagaaatattgcctgatactaaataccctatagcggtaactgactggaataaaaaatatagtaaaaatgagatttataaacgtataratcaattcgctaaaaatgagaacgtagcaatctataaatcaacttcaaattatacaaacaaaaacgtagataaagatatatatgtatttaataaatcaaaagcarcaactatcactccttttaaygctaaatataacattcattatttaagtgacgacgaaktattaaaaaaagatatcaaaggragttattttgtaaaagacaaaaattttgacgtgwctaaattcataaattttttaaaagaatatggtgttactgctgaatcatacaaaatagatyatatgatgattgccgttggtgtcattaaacaaatgaatatagwagtkccrttatcckcacttttaatcgtttattttatttattatattttcgaaaagaacattaatttcaaagcgtatgcgattaagtatttaaatggttttacattaagaaaaataattttygaaaatttttcaaaraaatgcacgtattgggtaacgttaatcataastcaaattcttttaactacaagtgtactttggatattaaattacacgggtaatttagatttattcatattaagawtagttctgctttcatgtcttttcattttaacgattagtgttattaatttatggactttcttaatgttactaaatttaaatattgchaatatgattaaaggtaagcagcactttaaaacaattcgttttattaatacagtttgtaaaagtrttctcttagtactaatagctartgtaatgatagaaaatactagtgttattaaagatttgaataaaataaargaaactgagaaatattggaatgtattagatgattattacacgattgaatttgcaccttatcacgaaacraaacaaagtttgattgataatatgstgcgatcagaacaattagtaaaggytagtgaagcagaaaataatgcgattttattcaaaccaaagggtgactccgttgacaatgacaacttttcrcctgatgaggggaatgtaatattagtaaataatcagttytggtcgatttatyacaagcagtttcaacctgatattccrataaaaaatcaaaaaaataatgtcgaagtaattattccacaaaagtttcatgcaatgcgtaatgaaatcaatcaagcatatcattcatggtttgaatttgtacaaaataaaaataataaagagartaagttatctatacagtttatcaacaaaaatgattrtcgaatttttwcatttgatgcacgagatagtcgccatttgtcatttatagaggcgccaatcattgtgaatgttcaggcatcagatttatcgaakgatttttattatgccatgatcagtcaaggcgggtatttattcaaaaattatgacgcgctagtaaaaaatattgaaaaktatcatcttgatggggaaatcagtggaataaccaattataaagatagcgtgatggaaatgtatcatgaaaacaatttgaaattaacagtactcaacttttcacaaatcattatcgcaatcattttaataattattattttatttgatgtgaaatattattttgaacarcatcgaaaattactcgtaatcaaaaagctatwtggttattcaacattaagagccaattaccaatacttattaataaataatatagttgttrtttttattggaatattgacgaatgtaattttacattctcastatataatgatgwtatttgcaacgattmttgtygttcaaatattattgcagatttgcagcctatactatcatggccgacgttttaatgaagttatcaaggagttttaa

SEQ ID NO: 2541 - DNA, 819 bp, Staphylococcus aureus
gtgccgaagattactaaaatagaagttcaaaagaaaaacaaagaacgktttaatctttttttagaygaacaatttgaaatgggtatagatatygatacattagtcaaatttaatttaaaaaaagggcaacaacttgaagctgctgacatggcagagattcaaaagtatgatcattatcgcataggtttaaayaaagcaatccaatatttatcatataaaaagagaactgaaaaagaagttatwcaatatttacaaaaagaagagatatcagagcaagcgatttctgaagtgattgaatattgttatcgcgaaaagttaatcgaccatcaagattatgcggaaagtttaaaaaatacaatgattcgcacgacagataaaggacctaaaatttatcaacaaaaactwtatcaacttggtatagaaccaaatatcattgaaatrtttacagaactttatagagaacaacaggaacttgatgatattatccaaattgctgaaaaaatatctaaaacaaaaaarggrccacaaaataargttaaagaaaaagtaatgcaatctttaattcaaaaagggtttgaaatggaaaccattcatgctgtattgaatgaaatggattttacacaagatgaagcggttttagacgatttattacaacgagatttagaaaaaatttataataaaaatcgaaagaagtacacgcaacaraaattaatttcaaaaactatcgaaggccttatgagaaaaggatataaatatgataaaattaaagctaaattagaagaaagtggtattgccgatggaacagaagaaattgagtga

SEQ ID NO: 2542 - DNA, 2292 bp, Staphylococcus aureus
atgagtatgcaaagttcatataaacgtttagttaaagtgctactaacgattttagtgattgtgttttcaattttactagtaggtggttggtatatttttaaaaatgaagcacctcgtccaacaaagatagtagatcaacaaggtcatacgcttgttacaaaaggcgagctaatcagtgggcaagcgatatatgagaaatatgggttaacagattatggctcctacctgggcaatggttcctacttaggcccagattatacagcagaggcattacatcattacctgattggtatgcgtaaatattatgcacaagatatttatcataagcaacttcataaattaaatcatgcagagttagccgtagttaaagataaagtgatgaaagaaatacggattaatcgttattctgaaaaagaagatcaacttgtattaacgccaggacaagtatacggtctaaaatatttgcaagattattataaaaaagagtttgttaataaccctaaacaagtagggttaaatgaaaatatgattaaacagtttcaaaatgatgattatatggtcgcaggaaataaagttgaacatttaagtcaattctttttctggggtgcttggctatcatcaacagatagacctggaaaaacattttcatatacaaataattggccatacgatgtggatgcaggaaatacgttgcctagtgcaggaattttatggactgctatatctgtaacattactgattgcaggcttggcattcattatatatattcaaaagcgttatgaatttgacatgaagccgacgtatgagtcggaacgggaactaccaaagattgaagtagatagtaaaatcactgatagtcagcgaaaagttgggaaatatttagtcgttgtcatgttactatttttggttcaaatattattaggcgaattactggcacattattatgtagagaataaattttttggtatagaaatacaaaggctctttccatttaatattgcgaagacatggcatgtgcaattagttattttctgggttgctacgacttggttagcagcaggaatatacattgtacctaaagtattgggcaaagaaccaaagaaacaaggcgtattagtagatatcttgttttgggccttaatcatagttgtgatgggcagcatgattggagaatggggtcatattttaggttggattgattctcattggtggctattcgggcactttggttgggaatatatagaattaggtaaattttggcaaatattatttatagtaggtatggtcttatgggttatcattctttgtcgagggtttttaccagctattcgcaacaaagtacaagcgaatcatgataaacgtcacttattgacgctattgtttgttggagcaattgcaattccgttattttatcttgcatcattatttataatgccgaattcacatgtgacgtttgcagattactggcgatggtggattgttcacttatgggttgaaggtatatttgaagcatttgccgtagtgttgattggtttcttaatggttaatatgaaattaactaccattgaaacgacgattcgtgcattatattttcaattaatcctattactaggtacaggtattgttggtatgggtcatcattactattggcaaggtgatcattccatatggctagcactgggttcttgtttttcagcattagaagtcgtgccactttgtttattaatttgggaagcatacacacactatcgcttatataagaaaagtgacatcgcttttccttacaaaggtacatttatttttcttgcttcaacaggattgtggaatgcaattggtgctggagcattaggctttttaattaacacaccagcagttaactactttgaacatggtacgcaatggactgcagcacatgcccatggttctatggctggcgtgtatggtatgttctcaattgcaattgcgttgtatgtttttaaaaatattactaaaaaagaattttggacaccgaaagttgaaaaatggattaaaatatcatgttgggctttaaatgttggcttggcaggtatggtgttcattacattaatgccagtaggttatatccaacttaaagatgcattagaacatggttattggcattcaagactaacgtcattttatgaacaaccacttgtaaaagcaatcatgtggggtagaatgccttgggacattatattcacagtaggtgtcattatattagtagttatttttataaggggatacagacacttaaaaccaaaatacagagtatag

SEQ ID NO: 2543 - DNA, 321 bp, Staphylococcus aureus
atgaaatwtatcattgcaatattattaggattaatmktatcyattactattgcttttacaatcatacatcatcctatacttgatcgttttaatcctttcttaaaaacggartatagttatgccaaagtgccaaaaggtacgcaacaatatgttaatattacggcttatagtgaaagaggggaaaagcttgattataaattaacatttaatggattttcwcctagtagaacgtatgtcgaaataaagcataaagggcaatatgtyatatcratcacatatgttgaaaaagakgatayaccaaaagaggtaagacaagaatga

SEQ ID NO: 2544 - DNA, 810 bp, Staphylococcus aureus
atgaaaagaagcgataggtactcaaactcaaatgaacattttgagcatatgaaacacgaacctcactataatacgtattatcaaccagttggcaaaccgccgaaaaagaaaaaaagtaaacgaatactattraaaatattattaaccattctaatcattatcgcattgtttattggtatcatgtattttttatctacacgcgataatgtggatgaactaagaaaaattgaaaataaaagtagttttgtgtcagctgataacatgccagagtatgttaaaggtgcctttatttcaatggaagatgaacgattctacaatcatcatggattygatttgaaaggtacaactagagctttattttcaacgattagcgacagagatgtgcaaggtggtagtaccattacacaacaagttgtcaaaaattatttttatgataatgatcgttyatwkactagaaaagtaaaagaattatttgtagctcatcgagttgaaaaacaatataataagaacgaaattttaagcttttatttaaataatatttactttggggataatcaatatacgcttgagggcgcagcaaaccattactttggaacaaccgtgaataaaaatagtacaacaatgtctcacatwacagttttacaaagcgctattttagctagtaaagtcaatgcacctagcgtatataatatcaataatatgtcwgagaattttacgcaacgtgtaagcacgaacttagaaaaaatgaagcaacaaaattatatcaatgaaacacaatatcaacaggctatgtcacaattaaatcgttaa

SEQ ID NO: 2545 - DNA, 144 bp, Staphylococcus aureus
gtgaaaaaagctgtcgttaaaatgagaaatggaggacctaaagatttctatacttttgacttaactcgtcctttagaagaaaacaggaaaaatattcccttagttaaaaatggtgaaatcgactcgatctattgggatcaataa

SEQ ID NO: 2546 - DNA, 267 bp, Staphylococcus aureus
ttgataaagttaaaccaagcctctgtcagcaaagaaatttcaagcattcgaacaaatggacaaggcttaaaacaatcaaatgggaatgtaaatttaagtaaaacgaatctcgttacttttaaagaatatgtaaatatgtttgaagattatcaatcagctctatctaattatgaaaacataattgaacaagatacgacggctatggatacaacggtaacagaaattgttgaaaacgatagagaaatagcaggacaaattaataaataa

SEQ ID NO: 2547 - DNA, 234 bp, Staphylococcus aureus
atggtttttaaagattgggaaattaatgttgtttactcagggaaacatgaagtagttacaaacgaaaatagtttatttgttattgatgaagattatgatgtcgcaatcgcaatcaattatttagataataaattaaaagttagtcatgttaactatggctctgaatttacaattgacgcatctaacaaagtacttgcgttgatgattcataatccaaatattgacgagaattaa

SEQ ID NO: 2548 - DNA, 405 bp, Staphylococcus aureus
gtgagaaaaatgagtaataagggagaaataagaaggcaaattgctaataaagaaagagaaaaagcaagtaaagaagcacaactaacagatttaaaagaggatttaagaaggttgaaagacgcttcgaaaaaattggatacagcaggagaagattttaacaaaggacagagtagttataacaaagtagaaattagtacttcagattggaaaggagaaagaaggactaaaagtgacagcaaaaagaaagatgtcgattctgaattaaaaaaagttgaacaagactttgatgatgcgaagaaggctattaaaaaagatattcaggataaagaagaagaaatcaagggagtcgaaggagaaatcagtactataaatgcagctatagatgcacttaaatcaaaattataa

SEQ ID NO: 2549 - DNA, 1671 bp, Staphylococcus aureus
atggggtacaaagttgatatgtctgaagtgcacaatatgcaaaagtctattgattcaagcttaagtgcaataaatacaaaggttagcacgcttagcagtagcataaacaaccttataaatactgaaggattcgaaggtcagacagcaagtagtgtcaaaaactatagtaagacatttcatttacaatcaataaaaaagattgaaacaataaacaaagattttaaatcagatattgcgaaatctatacgtaaattccaaagtgaagttgataataatgcttcagctatattggatgaagacgaaataaaaaaatacaaaaaagatattgatgatgcattaaaagatgttttcaaatcttctaaagatgcaaacggagctatttcagatgtttcagatttaacaacagccaaaaaaataaagacagaaaacttggccaataaaatgggagattttaataaagatattgatcaaacggtggaaagattaacgaccttcgacgccaacaattctatagatggtgataagacagataacttaataactgaattaagtggtgtaaattcatatgtcaaaaacatgaagccaaaccgtgcaagaattagttctacaagtggaaaaattgaaggtgcaattgcaaggcataaaacaagtgaagagttagtaagatggcaaacttacatggaaacgttaagtgaaaatctttataaaacaccaggtctaagtaaagcagcttctgacataattacccaagctggacgcgagtactatgctatcaaagctgtagggaatggcagtgctttaagaggatataaagaatatctgaaaacacgagatattaataaattaattaacaaaatgaataaaaaccaattaaaaagaatgtcattggtattaaatacagatagaggtaatattaaaataaaaaatgcagtaaaaatggcaagtgaatttgcccgtaataatccttttaaaaaaggaaatttagtaaattggatgagcaaagtccaagggtatcaaagtgtaagtgctcaaatattaaaaaaggggttgcaagataagaactttaaatatacatttggagatgcaaagaaattttttgatacagctgatatgaaaaaagcagcagtcacagaatttaaaaatacctttgtaccacaaaatataagagaaaccttctttaagaaagaaaatttaacatctaagacagcattaaagaaaaatatgagtaaattctggaatgaagatattaagggtggaatcaaagagtttaaattagactttgctaacaaaaatatcattggtaaactcggcaaattgttgaaactaggaggcaaggctttaaaaccattaggatttattactgcaattactgacaacataggaaagaaatcttggcaagaaaaattagttggtatgggggtagatttaagtgctattggtgcaagtgcagctgcaggtgcagctgttggaacggcaataccattacctgtagtaggaacagttgcaggtgcattagctggagcagcagtgggtatagctttagattataaaataccgtatcttgataagtctgcaacagaattagctaaagatggtattaactcgggtattaacaaagttaaaagtggatttggaaaagtaacttcaggatttaaaacagttttcggataa

SEQ ID NO: 2550 - DNA, 645 bp, Staphylococcus aureus
atgaaaatacaagagattgtaggaaatataaagagagcttatctgacaccattaataatttttgtgattttgttttcattattttttgatttgataatgtatttttatggaaaccttcaagggaaattgccaatatatttagatgtatttctaatatttgcagcagttgtatttattttaatgtacttccaagagaaaagtggagaagttaaggttgaaaaatcaaacgttattcgttatttaacattaaatgttgtagctgggtattcaatggtactacttgttgcctctatttatgtttttggggtagcaggctatggttttgatgtatttaattactggttaggtattatattaatgctatttgtatcgtggtttgctctatttttgttttataaaaatgaatttgatagtgaaaatccaaataaaacagttaatgttatagcaattattataaagttatctgcttttggaggacttttctatatcagaacagtcgttcctaatactgcagatgaagagaaatttataactctaagtatcttaattaatatagctgttgatttattgctggttagatcatattttaactatgcattatataagagtgtaaaaaaagatatcgaaaacggagtggatgattaa

SEQ ID NO: 2551 - DNA, 642 bp, Staphylococcus aureus
atgatagaattaaaagatttaaccatacaaaaaggtaatayacatattttgaagaaacttaatttgaaatttcaatgtggaaaatcatatgcacttattggtaaaagtggatgcggtaaatctacattattaaatactattgctggacttgaaaaaacrggraaacaatatgtctattttaatggtcaattagaacaatttaaatctaatttttacagagataaattaggrtatttatttcaaaattatggattaatcgwtaatytgacagtaaatgaaaatttagatattggattagcatataaaaaaataagtaagaaagaaaaagaacaawtaaagatacgttatatagaacagtttggtctgtcaaacagtttaaaaagaaaagttcatacgctaagtggaggtgaacaacaacgtgtcgctttaattagaatgatgttaaaagatccgattgttatgttagctgatgaaccaacgggtgcgttagatcctaaaacaggacagatgattattcaatcattatttgrtttgrtcgatgaaaataaagtgctgattttagcaacacatgatatggctattgcaaatcaatgtgacgaaataatagatttagaacagtatagwaaagtagcatctatgtga

SEQ ID NO: 2552 - DNA, 516 bp, Staphylococcus aureus
atgactaaaaaagtagcaattattctagcaaacgaatttgaagatatagaatattcaagycctaaagaggcattagagaatgcwggmtttaatactgtagtgattggrgatactgcaaatagtgaagttkttggtaaacacggtgaaaaagttactgtcgatgtaggcattgcagaagctaaaccagaagattatgatgcattattaattcctggaggrttttcaccagatcatttacgtggagatacagaaggtcgatatggcacatttgctaaatactttactaaaaatgatgtaccaacatttgccatttgtcatgggccacaaatactaatagatacagaygatttaaaaggtcgtacgttaacagcagtattraaygtrcgcaaagatttatcaaatgcaggcgcacatgtagttgatgagtcagtagttgtagacaacaatattgtaacaagtcgagtaccagacgatttagatgattttaatcgagaaatygttaarcaattacaatag

SEQ ID NO: 2553 - DNA, 762 bp, Staphylococcus aureus
ttgttaattctcgtattgatgattacgcagaaaggagaagttcgaatgagaaagtgcattatgaaaaagttaattttaatgacaacattgttattattaggaacaacagctacacaaacctctaattcgccattaaatgtttctacagacgctaaagcttatcatattggccaagacgaaacgaacatcaatgagttaattaaatattacacacaactgcctctcacattttcaaatagatggttataccaatatgatgacggcaacatttatgttgaatttaagcgttattcttggtcagcgcatatacgattatggggtgctgaaagttggggcaacgttaatcaattaagagaccgctatgtagacgtgtttggtttaaaagacgaagacactagccagttatggtgggtatatcgtgatacatttacaggtggtgtaacacctgctgcatcaccttctgataaaccatatagtctttttgtccaatacaaagataaactacaaacaattattggtgcacataagatgtaccaaggtaataaaccaatattaacattgaaagaaattgattttcgagcacgtgaaacactaattaaaaataaaatattatatcatgaaaatcgcaataaaggtaaacttaaaatcaccggtggcggcaatgactttacaattgatttgagtaaaagattacattctgatcttgcaaatgtttatgttaaaaatcctcaaaaaataacagtcgaagtcctcattgattaa

SEQ ID NO: 2554 - DNA, 456 bp, Staphylococcus aureus
atggaagtaggaatgttaattatgccgttttgtgtgaagattacatttgaaattgataaaaatgataattggttaaatgcattagatacagtaaatgaatttttcatggacaaagatatatatccaactggtcctataattttccaaagagaattagcaggtttgggtgaatataaatatacagcatatatagctcttaatgatgaacttcaagatatacctgaattgaacatcaaatatattgattgtttagaggtaggacctacgttatcaactaagtgttttgaagaagaggaatttgaaagagcttataaagaaattgaatatgtagctaacgaaaataatattaagatcctaaatcaaccatattatcatgtaatggtagattattttggtggtacggcttttgaaatttatgctcaagtagatttggatgagagtgaagtatatggataa

SEQ ID NO: 2555 - DNA, 822 bp, Staphylococcus aureus
gtgaatacaaatagactgaatgatttaattgatttctctctttttataaacttattattcctcgcatataacattcctcgtaaaggagattttctaatgaaaaacaacctcacaaaaaaaattattttatcaatagcattgactatgataggcacagctacaagtcaatcccctcattcaccgattagtatgtcatctgaagcaaaagcatacaatataagtgaaagcgaaacgaatgtaaatgaattgactaaatattacacacaacgccatttaacattttcaaataaatggctatggcaaaaagataatggtacaatccatgcaacattgttacagttatcatggtttagtcatattcaagtattcggccctgaaagttggggtaatattaatcaattaagaaataaatatgtagatatttttgctttaaaagattatgaaacctggcgcacttatatgttagcccaagaaacatttactggcggtgttacaccagtagcaaaacctagcgataaacattataaattgaatgtaacatataaagataaagcaggaacatttattggcgaatatcaattttatacaggtaataaaccagttttaactttaaaggaagttgatttccgaatccgccaaacactaattaaaaacaaaaaattatataatggtgattataataaaggccacattaagattacaggtggcagcaacaactacacaatagatttaagcaaaagattaaaatcaactgatgcaaatagatatgttaaaaaccctcaaactgcacacatcgaaatcctccttgaaaaatctagctaa

SEQ ID NO: 2556 - DNA, 474 bp, Staphylococcus aureus
atgagagtgaagtatatggataaaaatggatactcatatattatgatgaaaaatgtagcttacaaaacttattttgatgtgactatggatgactatgaagatatattaaaagactttacaaatcttgcaatttctaaaggtaaaacaattacagggccattaacctttgcagtcacgcaaatagacttgcaaaaaaggatgaatattgatttatttatttcagttggaaaatgttttaaatcaaatgaagaactatcatatagaacatatttttgtctagataacatgttacatggtcgtatcacttccaacaattttataacagatgaaatagcgttacttgaggatatgaacgaatttgcttctgacaacaatttaacgtttacttcgtcttattatcacacaatgagaaaaagttttagcggtgaacaaggttggattgatgtaaaggccaaagtgtatgaaaatgattaa

SEQ ID NO: 2557 - DNA, 288 bp, Staphylococcus aureus
atggaaaaggggattttcaattacgataatgcgaatgtattaaaattagatactaatcagttaaatgaaaacataaaagtcattgacgatatatttaaaaattatgagcagatagakccaactatagaartcgaaaatggaaatacaaaattaaaattaaatggatattttattgcgtcaattataagcccattaaatttaaataaacttaataatttatatgttgaagaagaattttatcatacatataacgaattaattgttaaatatactgaggtaaaggaataa

SEQ ID NO: 2558 - DNA, 162 bp, Staphylococcus aureus
atgaatgaacagcaaacaatcgaacagataaaagcrcgtttaaataagtttattgaggatatcgatcatgtaaatcctgatgaagtacgtgttgaagatatagatgaatggattggattgttagatcagcttgaagaaaaggttaaattagtatctaagtaa

SEQ ID NO: 2559 - DNA, 411 bp, Staphylococcus aureus
ttgtttcaagacgatagcaatgatataatttacgtaaaaaggagtgaatttatcatgaggcgatggtttgtattaattttaggattagttatattattatctgcatgtggtcagaaatatgataaagaaattgatgaagttacaaagttagaaaaagaaagtattcaagatgtgaaaaatacaaagaagtataaaaatgttgagcggtcaaaaagttattataagatttataatgatggtgaggttattataatgacttatatgccttttaaagatagtaatacaaaagtttcaagagtatataaaataaatcagactagcgatcaatatgaagaagattctaatattgatcctgaaaagtttgagaaagataataaaccagtttatgaagaaaataatatgaaaaaataa

SEQ ID NO: 2560 - DNA, 1497 bp, Staphylococcus aureus
atgaaaaaaatatttatgatggtacatgagttagatgtsaataaaggtggtatgacctcttcgatgttcaatagaagtaaagagttttatgatgcggacatacctgctgatattgttactttcgattacaaaggaaactatgatgaaattattaaagctttgaaaaaacaaggtaaaatggatcgaagaacgaaaatgtataatgtatttgartattttaaacaaatttcaaataataaacattttaagtctaataaattgttatataaacatatttcagaaagactaaaaaatacgattgaaattgaagagagtaaaggtatttcaagatattttgatataacgactggtacatatattgcctacattagaaaaagtaaatctgaaaaagtgattgatttctttaaagataataaacgaattgaacggtttagttttatagataataaagtgcatatgaaggaaacatttaatgtagataataaagtttgttatcaagtattttatgatgaaaagggatacccatatatttcaaggaatattaatgctaataatggtgctgtaggtaaaacttatgtgttagttaataaaaaagaatttaaaaacaatttagcactgtgtgtttactatttagaaaaactaataaaagattctaaagatagtattatgatttgtgatggaccagggagttttccaaaaatgtttaatacaaatcataaaaatgctcaraartatggcgttatycatgttaatcatcatgaaaatttcgatgatacgggtgcatttaaaaaaagtgagaaatatattattgagaatgcgaataaaattaacggtgtaattgtattaacagaggcacaaagattagatattcttaatcaatttgatgtagaaaatattttcactattagcaattttgttaagatacataatgctccaaaacattttcaaactgaaaaaatcgtaggtcatatttctagaatggtaccaacgaagcgaattgatttgcttattgaagtggctgagttagtcgtaaaaaaagataatkctgttaaatttcatatatatggagaaggatctgtcaaagataaaatagctaaaatgattgaagataaaawtttagaaagaaatgtttttcttaaaggatatacaacaactccacaaaaatgcttggaagattttaaattagtygtttctacatctcaatatgaaggtcaagggttaagtatgatagaagcaatgatttctaaaaggcctgttgttgcctttgacatcaaatacggaccaagtgattttatagaagayaataaaaatggttatttaatagaaaaccataatattaasgacatggctgataaaatactwmagcttgttaataatgatgtwttagcagmggagtttggttcgaaagcgagagaaaacattatagaaaaatattcaacggaatcaatattagaaaaatggttaaatcttttcaatagctrrggggaaaaatcctag

SEQ ID NO: 2561 - DNA, 531 bp, Staphylococcus aureus
atgacaaatcaggacagaccaatgaaatctatgtcagaatcaaaatgttataaaaatagacaagttttccctcaagatacgaatcaccatcatacaatgtttggtggtacattgatggctaatattgatgaaattgcagcaatcacagctatgaaacatgctggtgcgcaagtagttaccgcatctacagactcagtagatttcttaaagccgattaaaacaggggacatattacaatacgtagcgatggtttcatacgctgggacwagttcratggaagtggtcgttcaaattagaattgacgatgtatttaataacaagcatgatttagctgcattaagttacytaacatttgttgcgttagatgatgaaggsaarcctaaacatgtacctggwgtatatccagaagatgatgttgaaaaatggttttatgatacagcaccacaacgtgttgaacgaagaaaagcacgtcgcattgaaagtaaacaaacaattgaatatttagctcaagygcaacatattagagactaa

SEQ ID NO: 2562 - DNA, 132 bp, Staphylococcus aureus
ttgagacatgacatttatgaaggaatgctattttacattatgaaaggtattaaaccaaattatgctgagcttggtcgacaatataattgtgattcaagaacagttaaaaaatattatgaagcaggaaaataa

SEQ ID NO: 2563 - DNA, 693 bp, Staphylococcus aureus
ttgaagaagttacagckaaagaagtggaaatgtcgtgaaawtgrcattgaagctgtccrtaataataagggttaygcctatcaaagaaaattagayrmactmgaagaagtraraaarrgctattwyccaatyaaacgtgcgattgacttrrtwttaagyatygttttattatttttaacwttwccgattatgktyatattcgccattgctatcgtcatagattcgccaggaaaccctatttatagtcaggttagagttgggaagatgggtaaattaattaaaatatacaaattacgttcgatgtgyaaaaacgcagagaaaaayggtgcgcaatgggctgataaagatgatgatcgtataacaaatgtcgggaagtttattcgtaaaacacgcattgatgaattaccacaactaattaatgttgttaaaggggaaatgagttttattggaccacgcccggaacgtccrgaatttgtagaattatttagttcagaartrataggwttygagcaaagatgtcttgttacaccaggrttaacaggwcttgcgcaaattcaaggtggatatgacttaacaccrcaacaaaaaytraaatatgacatgaaatatatacataaaggtagyttaatgatggaaytatatatatcaattagaacattgatggttgttattacaggggaaggctcaaggtag

SEQ ID NO: 2564 - DNA, 762 bp, Staphylococcus aureus
atgtcyaaagaagctggtcatacatttttagctaaattaggaaaaactcgtctacgccccggtggtaaagaagcaacagattggttaatacaacaaggggcattttcacaagataarcaagtgttagaagtggcatgtaatatgtgcacaacatctatttatctagctcatacatayggctgtcacattcaaggcgttgatataaataagaaagcattagaaaaagcacaggaaaayatttcagcagcaggtcttgaatcatatattcaagttcaacaagcgaatgctgttaaattgccctttgatgacaatcaattcgatatcgttttaaatgaagcaatgttaacaatgttacccatcrccataaaggaaaaagcattacgcgagtactaccgagtcttaaagcctgggggtatcttgttaacacatgatattgtcatcgttaatgaatcacatgccacacatgtwgttaaatcattatctgcagcaattaatgtcaatgtctcaccgcagacgaaacttggctggttagatttatatmatcaagctggttttaatcatgtrcattatcatactggtccaatgagtttaatgacaccaaaaggtttaatttatgacgaaggtattgttggaactataaagattatcaamaatgctttraaaaaagaaaatcgaccaatgttttgtaaaatgtttaaaacgatgactaaattgcgtaaagatatgaattatattacttttgtcgctaaaaaagagsactaa

SEQ ID NO: 2565 - DNA, 960 bp, Staphylococcus aureus
gtgaataggaatatcgttaaaytagttgtgttyatgctaatyttagttgtagcagtagcgggttgtggtcaaaaagatactgaagagaaaactgaaatgacgacrataaaagatgaattaggaactgaaaaaattaagaaaaatcckaaacgtrttgttgtattagaatatagttttgctgattatttagcagcattagatatgaaacctgttggtattgcagatgatggyagyastaaaaatataacaaagtcagtaagagataagattggggcatatgaatcggttggatctagaccgcaaccgaatatggaagtgataagtaaattaaaaccggatttgatyattgcagatgtyagcagacataagaaaatcaaatcagaattgagcaaaattgckccgacaatyatgttagtyagyggtacgggagattayaatgcaaatattgaagcatttaaaacagtcgctaaagcagtwggcaaagagaaagaaggcgaraagcgtctggaaaagcatrataaaatattagcggagattagaaagaaaattgaacagagtacgttaaaatctgcatttgcattyggtatctcaagagcaggtatgtttattaataatgaagatacatttatgggacaattcttamttaaaatgggtattcaacctgaagtcacaaaagacaaaactrcgcatgttggtgaacgcaagggtggyccttatatwtatttaaataatgaagarcttgccaatatcaatccaaaagttatgattttagcyackrayggraaaacrgayaaaaatagaacgaaattcattgatcctgcagtttggaaatcattaaaagctgtgaaagataayaaagtwtatgaygttgaycgaaataagtggttgmaatcaagrggkattatsgcaagtgaaagtatggcagaagatttagaaaaaattgcagaaaaagcaaaataa

SEQ ID NO: 2566 - DNA, 1257 bp, Staphylococcus aureus
gtgggaattttgactaattacaaagaaaagttacaacaatacgctgaactattagttaaggttggtatgaatgttcaaccaaaacagccagtatttattagatcatcagtagaaacattagaattaacgcatttaattgtagaagaagcwtatcrttgtggygcttcagatgtacgtgttgtatatagcgatccaaccttaaaacgcttaaaatttgaaaatgaatctgtggaacattttgctaatcatgagataaaatcatatgatgttgaagcgagaatggattacgttaaacgtggcgctgctaatttagcacttattagtgaagatccwgatttaatggatggtatcgatagccaaaaattacaagcatttcaacaacaaaacgcacgcgcatttaaaggatatatggaaagtgtacaaaaaaatcaatttccatgggtcgtagctgcttttccatctaaagcttgggcgaagagwgtrtatcctgaactatctgtrgaagaagcatatattaagtttattgacgaggtattygatattgtgcgaattgatggtaacgatccagttgaaaattggcgtcaacacatcgctaatttaagtgtttacgcwcaaaarttacarcaaaaaaattaccatgcgttgcattatgtatctgaaggyactgatttaacwgtaggtttagcgaaaaatcatatmtgggaagatgctacaagttatgttaacggyraggaacaagcttttattgctaatataccaactgaagaagtatttacagcaccagatcgaaatagagtagatggatatgttactaataaattgcctttaagttataatggmacrattatcgatcaatttaaattgatgtttaaagatggagarattattgatttttcagctgraaaaggtgaagcggtattgaaagatttaatcaatachgatgaaggttcaagaagattaggtgaagtwgcrttagtacctgatgattcaccgatatcaaatcgtaataccattttttacaatactttatttgatgaaaatgcagcatgtcatttagcgattggatctgcttacgcctttaatattcaaggtggaacggaaatgactgttgaggaaaagattgcaagcggattaaatgattcaaaygtacatgtcgayttcatgattggtagtagtgatttgactatttatggcatattcgaagatggttcaaaagaactagtatttgaaaatggaaattgggcatcaacattttaa

SEQ ID NO: 2567 - DNA, 459 bp, Staphylococcus aureus
atgtayaaatctaaaatactgttgaaatatatttttagtgaagaaycagamgttaaagatttaackgaagaaaaatataatcaagattacgaagcattaacatttagctttaaagaggaaacatatcaaagtaggttagcwaagaaaacaccgactaaagcagggtattttgttacatgttggacraaagacgagaacaattgtaatcaaccatactcraaagaggcatttgcagattacttaatgattatagttattgatgaagaattaagcggttatttyttatttcctagggaattattggtagaaaaaggyatcttaactacatttgarcataaaggtaaratggcttttagagtttatcctaagtggtgtaatcaattgaataaaasagcagrgcaaacacaaaagtggcaatgtaaatattttttgaatactaataaaaagtcatatggttga

SEQ ID NO: 2568 - DNA, 552 bp, Staphylococcus aureus
gtgatacgtcaagcacgtccagaggaccgatttgatattgcgaagttagtttatatggtktgggatgatatggaattagaattggtaaagcatctacctaaagacatrgtattagatgcaattgaaaaaagctgtgttgatgcaacatatmgaactttttatcagcatrttttagtttatgaartagaaartaaagtagcaggttgtattattagctatagyggtgaaaatgaattgaaataygaaaaagcatgggaacwacttgacttgccagaaraaataaaacaatatggcacgccattaccygtaaaagaagctaaagacgatgagtattatatagaaacaattgcgacatttgmagcatatagaggtagaggyatcgcgacaaagttattaacgtcattacttgaatcaartacacatgttaaatggagtttgaattgcgatattaataaygaagcagcattaaagttatataaaaaagtaggctttatatctgatggacagattgaattatayaagcacatgtatcatcatttaattgttaaataa

SEQ ID NO: 2569 - DNA, 207 bp, Staphylococcus aureus
gtggctatgacaaatgaagagaaagtattagctattagagagaagttaaatattgttaatcaaggattattagatcctgaaaaatataaaaatgcaaatgaagaagaattaacagatatatatgattttgttcaatcaagagaaagattgtcgccaagtgaagtgacagctattgctgacgctttaggacaattgcgacacgamtag

SEQ ID NO: 2570 - DNA, 630 bp, Staphylococcus aureus
atgacgattaaagtattgtttgtggatgatcatgaaatggtacgtataggaatttcaagttatctatcaacgcaaagtgatattgaagtagttggtgaaggcgcttctggtaargaagcaattgccaaagcccatgagttgaagccagatttaatwttaatggatttacttatggawgacatggatggtgtagaagcgacgactcagattaaaaaagatttaccgcaaattaaagtattaatgttaactagttttattgaagataaagaggtatatcgtgcattagatgcaggtgtcgatagttacattttaaaaacaacaagtgcaaaagatatcgccgatgcagttcgtaaaacttctagaggagaatctgtttttgaaccggaagttttagtgaaaatgcgtaaccgtatgaaaaagcgcgcagagttatatgaaatgcttacagaacgagaaatggaaatattattattgattgcgaaaggttactcaaatcaagaaattgctagtgcatcgcatattactattaaaacggttaagacacatgtgagtaacattttaagtaagttagaagtgcaagatagaacacaagctgtyatctatgcattccaacataatttaattcaatag

SEQ ID NO: 2571 - DNA, 1212 bp, Staphylococcus aureus
atgcgtttgaatgataatcgaacgtcatattttggctacaaagcaattcaattattcaaaaataattctaaaaataaacaatctatttttaaagactgggaaaaattaaaacataacatcacatttatacatccgcaatctgagaaacatcatcttcgagttgttggaggrttycaattttcragtcataaatcagatgatgaatggcgagagtttggactaaatcattttgtattacctgaagttttaatttcaacwgataataatgggacatttttaacttatacagttaaaagggaawgttttactgttgaggcattgaacgatttaayggatttgttcaacaatatatcggayatagatgtggacgagcaaattggggaaattactagaaatgaagatatttataaagatgactggcgtcaacttgtagtagaagcwatagaatctattaataatgaagaaaaaattgtactagcacgtagacggttaataaagttcgataaagatatcagtattccatatattctaaagcaagcatattctaaagaaaaaaacagttatatattcttgttagaatcacaagattctatwttcttttcacaracacctgaacaattaataaaggtcaataataaaatactatcgactaaagctgtagcaggtacaattaaacgttcacaagatgaggacgaagatacaaaaaatgttgaagcatttttaaaagataataaaaacttaatcgaacatcgatttgttgttgacagtattttacatgatattaaaccttatatcactgaattacattatgataagacgcctaaaattctaaaaaatgatcatttatatcacttgtacactgaaataaaggcgccactgaaggatgattcgtatattagtttaattgatmatttacatccaacacctgctttaggtggctatccaaaagaatttgcratggattttattgarcagaaagaatttggtacrcgaggattatatggtgcrccggttggctatatagatatataygatgattgtgaatttattgttgcaattcgttcratgcttattaagaaagcacaagcaactttatttgctgggtgtggcattgttaaagattctgatccagatagtgaattggcagaaacgaaccttaagttcacacctatgatgaatgcattaggagtcgatatgaatgggaaatcataa

SEQ ID NO: 2572 - DNA, 219 bp, Staphylococcus aureus
atgcataaaggaataaaaataaatgcatatattcttaaggtgaggggtgattttatgtttatgactgtaaaagaagttgctcaattgttacgtataagtgaacgccatacttataaacttcttcaaaaaaacgttataccacatactaaaattggcggaaagatattagttaacaaagaaaggttattagaaactttagaaaaaaaggaggttaaataa

SEQ ID NO: 2573 - DNA, 1044 bp, Staphylococcus aureus
atgaaccactacawtagaacaattggttcaatgctcatcttagtatatagcatgctagctgcatttctrttcatcgataaagtttttgtaaatatcatctattttcaaggtatgttttatacacaaatattcggaataccagtytttttatttttaaatctcatcatcatattattgtgtattattgttggttcggtactcgcwtacaaaatcaatcagcaaaatgattggattaagacgcaaattgagcgttcaatggaaggcgaaacagttggcattaatgatcaaaatatagaaatatatagtgaaacgttagayttataccatacactygtacctttaaatcaagaattgcataagttgcgacttaaaactcaaaayttaaccaatgaaaattataatattaatgatgtgaaagttaaaaagattattgaagatgaacgtcaaagactagcwcgagaacttcacgattctgttagtcagcaactttttgcggcaagtatgatgctwtctgctatcaaagaaacgaagttagaaccaccattagaccaacaaattcckattttagagaaaatggttcaagattcgcagytagaaatgcgtgctttgctgttacatttaagaccgcttggtttaaaagacaaatctttaggtgagggtattaaagatttagttattgatttacaaaaaaaagtgccratgaaagttgtgcatgaaatacaagattttaaagtgcctaaaggtattgaagatcatttgttcagaattacacaggaagcaatttcgaatacattgcgtcattcaaacggtacaaaagtgacagtagaattgtttaataaagacgattatttattgttgagaattcaagayaatggtaaaggttttaatgttgatgaaaaattagaacaaagttatggacttaaaaatatgcgtgaaagagctttggaaattggtgcaacgttccatattgtatcattgccagattcaggtacacgtatcgaggtgaaagcacctttaaataaggaggattcgtatgacgattaa

SEQ ID NO: 2574 - DNA, 135 bp, Staphylococcus aureus
ttgcaaaatggtgagaaaagggataaatgcgagcaattgaatcaagaagaagtgaaaaccccaagattttccgtaggttataagaatagtgcgattttagatagatacgaagaattgcgtcaagaaggaaactaa

SEQ ID NO: 2575 - DNA, 654 bp, Staphylococcus aureus
atgacaactacaacaatcacgggtgatacgtgggatgtatattttaatgatagacgttatagaaatttgttaggagattttgaagatctaataacagaaacgaaatcattaattagacaaggctataaaacggatgttattaaaaataaaatggataataaggctttgagcctacaatctaaattcaaagaattaggacaaatattattagatgaacatgaagaaaaaatagtagaaatccaacaaaaagagaaagaatcttcatatgagaatccacaagttgaaatgttgaaacgtcaagacatagaggcgaaagtaaatttaattgatgcagaagaactatttaatcttgtttataatgccaatcctaaaaccactaatgtatatgaacttaatatctataaaaaagcgatagaaagtcgtcttactgaagatgaaaatgtaaggttaaaaccttactttgatgtattggtagaaaaggtaatttatccatatcgaaataatgaagaatatcaaaaattagagtataactataatgttttaagacagtttgggttacaaaataacgggcaaccagtcatcaaacatagtgatggcgatatagaaattattaacattcaaagtaagtataacgaagtgttccgtaacgcttaa

SEQ ID NO: 2576 - DNA, 969 bp, Staphylococcus aureus
atgaagccatttgaaagtcataataaacaattgaaaattctaagaagaagaggaatggaagtaccgagtagtgctaaaagagatttagaaaatgaaaattattataatatcataaatggttataaagatttatttttagaactagatgttaatggtaattttttggttcctgataaatataagcaaggtactcattttaaagaagtcttttctttatacaaactagatagaaaatttaggaatgttttattagagtatttgttagtatttgaaactcatattaaatcaagaatttcatattattttagcgaaaaatatagagaaccacattcatatttatactttaaaaattattcatctgacacaagtaagacagatagcatcgtgaaaatggttgctacatttagctcggttatgagtaatagaaaaaataaaccattaaaacattatattaatactcataatggagtgccactatggatattggtgaattatttaactttaggtaatgtttcaaaaatgtattccaatttggatgatgatcttcgattggaagttgctaaagactataaaaggaaattggaaagagattataaaacacgtgttcaaataactccatcagatgtagacagtatactacaacaagcacatatgtttcgtaacgtgtgtgcgcatgaagaaagattgtatgattataaaatagacagggctaaaagtagagctaatatattcgccaattataacaaaatatacgataaagaatacgttcctacaatgaatggtagttatgtattcgatttgttgatttcactatgtctatttttgaataaacatgattacataaaattgrtgaaaaatatggataaactaataagtaattattcacattctttctatacaattactatagatgacctatatacaaaaatgaattttccagatcaaacaaaaatactggatatgttataa

SEQ ID NO: 2577 - DNA, 402 bp, Staphylococcus aureus
ttgaagcatgtgaaagaaaatgacttagcgcacggagagtttggtaagtggcttgaaaaagttgggttagataagtaccaagctagcaggtttatcaaagttgcaaatgaacaatcaaaattgcactcgagcgcaaatttaggacttaaagcgctttatcagatagcaactattccagtagagcatcgagaagaaaaacaacaaacgtcttcaggagagatgaaaacaccatacgaaatgaccaataaagaacgtgaagaatttaagcgccaactcaaacaacgcgatgaagaaaacgcacaacttcaatcacaaatggaacaagcacaacgttcggaggagatagcgagaaagcaatataaatatggattaaataattatatttttactataaaattttag

SEQ ID NO: 2578 - DNA, 1674 bp, Staphylococcus aureus
atgggaaatcataaagcagctttaacgaagcaagtttttacatttgcatctgagttatatgcrtacggcgtaagggaagtagttatcagtccgggatcacgctcaacgccacttgcacttgcatttgaagcacatccaaatattaaaacatggatacaccccgatgagcgaagtgcagcrttttttgcagtkgggttaattaaaggyagtgaaagacctgtcgctatattatgtacgtcaggtacagcagcagcgaattatacgccwgcaattgctgaaagccaaattagtagaattccwttaatcgttttaacaagtgaccgtccgcatgaattaagaagtgtaggcgcaccacaagcgattaatcaagtaaatatgtttaataattatgtaagttatgagttcgatatgcckattgcggatgatagtaaagagaccattratgcaatttaytatcaaatgcaaattgctagtcaatatttatatggaccacataaagggccrattcattttaacttgccatttagagatccgttaacacctgatttgaatgcaacagaattgttaacttctgagatgaagattttaccgcactatcaaaaaagtatagatgcatcggcattaagacacattttaaataagaaaaaaggtttaattattgtaggrgatatgcagcaycaagaagttgatcaaatactracgtattcaacgatatatgatttgcctattttagctgatcctttaagtcatttaagaaaatttgatcatccgaatgttatctgtacatatgatttgctgtttagaagcggcttagacttaaawgtggatttcgtaattcgtgttgggaaaccagtgatttctaaaaarttraatcaatggttaaagaaaactgatgcatttcaaatattagtgcaaaacaatgataagattgatgtctttccdatagcrccagatatttcatatgagatttctgcraatgatttctttagrtcattaatggaagacacgacmrtyaatcgmgtaagttggttagaaaaatggcaaygcwtagagaaaaaagggcgtaaagaaattaaatgttatttggaacaagctacagatgagagtgcattcgttggtgaattgattaagaaaacatctgaaaaagatgcattatttattagtaatagtatgccwatcagagatgtagataacttgttattgaataaaaatatagatgtctatgcgaatcgtggtgcraatggtattgatggtatcgtwtcaactgcactkggtatggctgtscataaacgartwacattattgataggtgatttrtcattttatcatgatatgaatggactattaatgtcaaaattaaataatattcagatgaatattgtattattgaacaacgatggtggcggtattttttcatatttaccacaaaaagaaagtgcaacygactattttgaacggttgtttggcacaccgacgggattggatttcgagtatacagctaagttatatcaattcgattttaaacgttttaacartgtttcagaatttaaaaatgccacattgttatctgaaacttcgacgatttatgaattgataacgaatcgcgaagataactttaaacagcatcaaattttataycagaaattgagtgaaatgattcatgrcacattataa

SEQ ID NO: 2579 - DNA, 702 bp, Staphylococcus aureus
atgacacacaaatatatatcaacgcaaatgttgatcatttttactgcattaatgattattgccaatttttactacatattttttgaaaaaattggctttttactcgttctattattgggatgtgtattagtttatgtaggatatctttattttcataaaatacgtggccttttrgcgttttggataggcgcgctattaattgcattcacattattgtctaataagtatacaatcatcatcttgttcgtctttttattaytacttattgtgcgttatttaatacayaartttaaaccmaaaaaagtagttgcgacggatgaggttatgacttcaccatcttttattaaacaaaagtggtttggtgagcaacgtacaccagtttatgtatataartgggaagatgtmcaaattcaacatggaattggcgacctacatattgacttaacaaaagctgcaaatattaaggaaaataataccattgttgttagacacattttaggtaaagtgcaggttatattgccggttaattacaatattaatttacatgtagctgctttttatggaagtacttacgtgaatgaaaaatcatataaagttgaaaataacaatattcatattgaagaaatgatgaaaccggataactatacagttaatatctacgtatcaacgtttatcggagacgtagaggtgatttatcgatga

SEQ ID NO: 2580 - DNA, 696 bp, Staphylococcus aureus
ttggggctaaaaattatgaaatttaaagcgatagcaaaagcaagtttagcattgggaatgttagcaacaggtgtaatwacrtcgaatrtacaatcagtacaagcgaaaacagaagttaaacaacaaagtgaggctgatttaaaactttattataatggaccaagttttgaatataaaaaagtaactggatatggatttattgaaggtaaagatagattyattgattttatatacaatggacaatataataaaatatctttagttggttctgataaagataaatataatgaagaagttaacccagatatagatgtgtttgtcgttagagaaggaaacggtagacaagctgataatcattcgattggtggcrtaacaaaaactaatagaggagtgtattaygactatatacacwcwccaatccttgaaatyaagaaaggtaawgaagaaccacaaartagtctrtaycaaatttataaagaarayatctcaytaaaagaacttgattwtarattamgararcrwkyaatyarwcaamryggmttgtattcaaatggtcttaaacaaggtcaaattacaattacwatgaawgatggcamawcacatacwatcgatttaagtcaaaaacttgaaaaagaacgtatgggygaktctatcgayggcagacaaatacaaaaaattctagtagaaatgaaataa

SEQ ID NO: 2581 - DNA, 804 bp, Staphylococcus aureus
atgrcacattataawtwytatgaagcaaacgttgagaccaatcaagttttagtattwctgcatggwtttcttagcgacagycgtacttatyataatcacatcgawaaatwtactgatawctrtcatgtcatcactatagacttaccaggmcatggcgaagatcagtcttcaatggatgaaacgtggaattttgattatattacgacgttgttagaccgaattttagataaatataaagataaatcaataacattgtttggatattcaatgggtggrcgtgttgcattatattatgcaattaatggtcayatccctatatctaatttgatattagaaagtacgtcaccaggtattaaagaagaagcaaatcaattggaacgycgycttgttgatgawgcrcgtgctaaagtattagacatagcaggtattgaattatttgttaatgattgggaaaagttgccattatttcaatcgcaactagaattaccagttgaaatacaacatcaaataagacwacaacgattgtcycaatcgccacakaaaatggccaaagcattaagagattatggtacaggtcaaatgccaaacttatggccgcgcctgawagaaattaaagtaccaacattaatattagctggagaatatgatgaaaaatttgtacagattgcgaaaaaaatggcaaatttaattcctaatagtaaatgtaaattaatttctgctacaggtcatacaattcatgtggaagatagtgatgaatttgatacaatgatattaggatttttaaaggaggagcaaaatgactaa

SEQ ID NO: 2582 - DNA, 387 bp, Staphylococcus aureus
atgaactatgttgaacgttatattgaacagtttttgagagcaacagtaagaaataatatcaagcactaccttttaatgytagatgaaaaaatgaaaaatttagatgattatatgcrttatttaattactaaaaaagaacaacttagcaagttaattgacagtctaatgctaacattagaaaataaatatattgatattgytgaagcatttcaaattcaatgtgcaagagaaatcaataatcaagaaattgaaaatattaaatcagagttgaataaagttgaagcatattatgcacaaattgaaactcaaattcaacaaacttcaactgaaaaaatagcaacagaaaaaacatcgtatctaataaattatatgaacgctgtggcatag

SEQ ID NO: 2583 - DNA, 1047 bp, Staphylococcus aureus
ttggagcatacaactatgaaaataagaacaattgcgaaagcgagtatagcgttagggcttgtaacaacaggtgcaagtatagtaacaacgcaatcggccaatgcagaagtagcatcagcacttaaagcaggacagttagcaaagataaacgtatcaacaagcgcaatcacaacgacagcgcaagcagtgaacgcagaacaaaatcatacggctaatcctgaacaggcggcaaagtctaacacagaaaatgtatcaacatcgctttcaactcaaacagaacagacgccaaaatctaacatacaaaaagcaacacaaccagcaccaagcggaacaactcagtctttaccaaatgcacaaccgcaatcaacacaaccaacaccaagtgtaacaacaccgccttcatctaatgtcgaaacaccacaaccaacatcgccaaccacaaaacaagcacaaaaggaaataaaccctaaatttaaaggtttaagatcatattatacgaaatcaagtttagaatttaaaaatgagttgggtataattatcaaaaaatggacaacaataagatttatgaatattgttccagattatttcatatataaaatagctttagttggaaaagatgataagaaatatggtgaaggcgtgcataggcatgtcgatgtatttatcgttttagaacaaaataaatatggcgtagacaaatactcggtcggtggtatcacaaaagcaaatagaaagaaagttgattacaaaactggaataagtattactaaagaagataaaaaaggtacaatctcacatgatgtttcagaatacaagattactaaagaagagatttccttgaaagaacttgattttaaattgagaaaacaactcattgaacaacataatttgtacggtaatattggttcaggaacaatcgttattaaaatgaaaaatggtggaaagtacacgtttgaattacacaaaaaattgcaacaacatcgcatggcagatgttattgatggtacaaatattgatagaattgaagtgaatctaaaatcatcgtga

SEQ ID NO: 2584 - DNA, 699 bp, Staphylococcus aureus
atgaaattaaaaaatattgctaaagcaagtttagcactagggattttgacaacagggatgattacaactactgctcagccagtaaaagcaagtgagcaaagcagattatcagttacttcaaacgacacgcaagaattaaaaaaatactacagtggaacaggatataattttcaaaatgtgagtggttatagagaaaaggataaaatgaacattattgatgggacacaacttaatgtagttactttacttggtacagacaaagaaagatttaaagattatgactatgattatgaagggttagatgtctttgtagtcagagaaggatcaggtaaacaagctgaaaatatttcaataggtggaattaccaagacgaataaaaacgattataaagatttcgtaaataatgtaggtctagaaataactaaaccaacaggacataatacagcaacaagacaagcagaaacttatagaattaataaagaagaaatttcattaaaagaattagatttcaaattaagaaaacatttaattgaaaatcatgaactttataagacagagcctaaagacggtaaaattagaattactatgaaaggtggcggctactatacttttgaattaaataaaaaattacagcctcatcgtatgggtgatgtaattgatggtagaaatatagaaaaaattgaagtcgatttatattaa

SEQ ID NO: 2585 - DNA, 1488 bp, Staphylococcus aureus
atgagggaaaattttaagttacgtaaaatgaaagtcgggttagtatctgttgcaattacaatgttatatatcatgacaaacggacaagcagaagcatcagaggctaatgagaagccaagtacaaatcaagaatcaaaagttgtttcacagactgaacaaaattcaaaagaaacaaaaacagtagaatctaataagaactttgttaaattagatactattaaacctggagctcaaaagataacgggaactactttaccaaatcactatgttttattaacagttgatgggaaaagtgcggattcagtagaaaatggcggtttgggttttgttgaagcaaatgacaaaggagaatttgagtaccctttaaataatcgtaaaattgttcataatcaagaaattgaggtttcgtcgtcaagccctgatttaggtgaagatgaagaagatgaagaggtggaagaagcttcaactgataaagctggcgttgaggaagaaagtacagaagctaaagttacttacacaacaccgcgatatgaaaaagcgtatgaaataccgaaagaacaactaaaagaaaaagatggacatcaccaagtttttatcgaacctattactgaaggatcaggtattattaaagggcatacgtctgtaaaaggtaaagttgctttatctattaataataaatttattaattttgaagagagcgttaagggcggagttagtaaagaagacactaaagctagttcagatggtatctggatgcctattgatgacaaaggatactttaactttgacttcaaaacgaaacgtttcgataatttagagttaaaagaaggtaatgacatttcactaacatttgcacctgatgatgaagaagatgcattaaaacctttaattttcaaaactaaagtaacgagcttagaagatatcgataaagcagaaactaaatatgaccatactaaactcaacaaagtgaaagttttagataatgttaaagaagatttacatgttgatgaaatatatggaagcttatatcatacagacaaaggtaaaggtattcttgataaagaaggtactaaagtaattaaaggaaagactaaattcgcgaatgcagtagtgaaggtagactctgaactaggtgaagcacaattattccctgatttacaagtaaatgaaaaaggtgaatttagctttgactcacatggtgctggttttagattacaaaatggagaaaaattaaacttcacagtggttgatcctattacaggtgacttgttaagtaatgagtttgtttctaaagagattgatattgaagaaacacctgaacaaaaagcggatcgtgagtttgacgaaaaacttgaaaatacgcctgcttactacaagttatacggcgataaaatagttggattcgatactaacgatttcccgattacttggttctatccattgggtgaaaagaaagttgaacgtacaacacctaaattagaaaaataa

SEQ ID NO: 2586 - DNA, 822 bp, Staphylococcus aureus
atgactaacagacaatgggaaacacttagagaatatgatgaaatcaaatatgaattttaygaagggattgctaaggtaacaataaatcgccctgaagtacgcaatgcgtttacacctaaaacagttkctgaaatgattgacgcattttcacgtgcacgtgatgatcaaaacgtttcagttatcgtattaactggkgaaggtgatttagcattctgttctggtggtgaccagaagaaacgtggacatggtggttatgtaggtgaagaccaaatccctcgcttaaatgtattagatttacagcgtttaattcgtattattccaaaaccrgttatcgcgatggtaaaaggttatgctgtaggtggcggtaatgtactaaatgttgtttgtgacttaacgattgctgctgataatgctatttttggacaaactggtcctaaagtaggttcatttgatgcrggttatggttcaggatatttagcacgtatcgttggacataagaaagcacgtgaaatytggtacttatgtcgtcaatacaatgcacaagaagctttagatatgggyctagtaaatacagtggtacctttrgadaaagttgaagatgaaactgtgcaatggtgtaaagagattatgaaacactcaccaacwgckttacgattccttaaagcagctatgaatgctgacacagatggtttagctggtttacaacaaatggctggggatgcaacaytgctttattacacaacwgatgaagcgaaagaaggccgtgatgcgtttaaagaaaaacgtgatcctgacttcgatcaattccctaaattcccataa

SEQ ID NO: 2587 - DNA, 759 bp, Staphylococcus aureus
atgattgtaaaaacagaagaagaattacaagcgttaaaagaaattggatacatatgcgctaaagtgcgcaatacaatgcaagctgcaaccaaaccaggtatcactacgaaagagcttgataatattgcgaaagagttatttgaagaatacggygctatttcwgcgccaattcatgatgaaaattttcctggtcaaacgtgtattagtgtyaatgaagaggtggcacatgggattccaagtaagcgtgtcattcgtgaaggagatttagtaaatattgatgtatcggcwttgaagaatggctattatgcagatacaggcatttcatttgtcgttggagaatcagaygatccaatgaaacaaaaagtatgtgacgtagcaacgatggcatttgagaatgcaattgcaaaagtaaaaccgggtactaagttragtaacattggtaaagcggtgcataatacagctagacaaaatgatttgaaagtcattaaaaacttaacaggtcatggtgttggtttatcattacatgaagcrccagcacatgtacttaattactttgatccaaaagacaaaacattattaactgaaggtatggtattagctattgaaccgtttatctcatcaaatgcatcattygttacagaaggtaaaaatgaatgggcttttgaaacgagcgataaaagttttgttgctcaaattgagcatacrgttatcgtgactaaggatggtccgattttaacgacaaarattgaagaagaatag

SEQ ID NO: 2588 - DNA, 420 bp, Staphylococcus aureus
atgtataaacaacttgaaaaacttattacactgactaacaatgacttaaacttagtgaatagaagatttggacaacgcacggatatcacatctgaacagctagaacttctccgtattttatttaattacgatcgcttatcacagtatgatttgacgatgaagattagyagggaacaatctatagtttcaaggtggattaagaaattagttttgaaaggktacatcacaagtcaacaatctagcgaagatttaagatgtaaagaattaattttgactgatcaagcacgtacattaatttcacaaataaataatgcacgttgcgaattgattgaagcaagatgtcaatgtttatcggaagtcgaattagacaatttaaatcaattacttgataagttaaatcaacgacgcatatcgttgtaa

SEQ ID NO: 2589 - DNA, 414 bp, Staphylococcus aureus
atgaagccyactaaaktgatwttaaragatgcatcttatttacatagcaaaacatcgataacatttattttaaaagatgtagttatcgaagaagataataaaatttattatttcgacactagtgcaactttcgaagatcaagaarttaaatttgaatttgcactytttgatagtgacatggacaatttraaayatatkgawtrcgacaatccwgttacygaaatatattttatagaacctgatttacattttacrattattgattttaatcaagaactgctttgtatttatattgattttgattctggtttaaggcattcaaacatggyaacagaatctggtrtttcrttaaggataaayrttrctaaatcagrttttactaaatttattaatgaattagyctckttayattaa

SEQ ID NO: 2590 - DNA, 114 bp, Staphylococcus aureus
gtgggcattgtacctgaagttgttatgtggcgagatgttggggatatggatggtgttgtatgtggcgagatgttggcgcaagtatacagcgttgaaccagaaattttaatgtag

SEQ ID NO: 2591 - DNA, 108 bp, Staphylococcus aureus
gtgtcrttgtgcacacaacaaaaattgaatcatgaattacaagcaaaagtagcggtgattgttaaaattgatggtaaacaatcaccgctatttttgcttgtgtatgta

SEQ ID NO: 2592 - DNA, 108 bp, Staphylococcus aureus
ttggatggaaacaaccaaattgatgtgtgtttttttgttctagtgaataattattatacaatgagtatctatcctagaattatcaatagtaatggtgattatgcaaca

SEQ ID NO: 2593 - DNA, 1194 bp, Staphylococcus aureus
atgaaatttaataaagwraaaytrgttatacatgcgtgygtrctwttrttyatcattatytcyatagsrttartttttcatcgattacaracgaaracrmaytctatagamccwatacataargaaacaaaattatcrgayaatgmraaatatttrgtkgatcgtaataaggmaaaggttgmgccrtckaaaytaaargargtatayaatagyaargatccwaartataagaarattgacmrgtatttacaaarttcattatttaayggttcwgtagckrtatatgaaaatggcaaattgaaaatgagtaarggytatggatatcaagattttgaaaaaggwattaaaaayacaccraatacgatgtttytaatwggttcagctcaaaaattttcaacaggrttactgttaaaacagttagaagaagaacataaaatwaatatyaatgatccagtaagyaaataymttccatggtttaaaacatctaagcctatyccwttraaagayttratgytgcatcaaagtggattatataaatataaatcytcaaaagaytataaraayttagatcaagcagtkaragcrattcaaaaacgtggyattgatcctaagaaatacaaaaagcatatgtataaygatggraattatttagtrctwgckaaagtwatygaagaagttacmggyaaatcwtatgcygagaattaytatacwaaaataggwgatccwttaaaacttcagcaywcrgcattttatgatgaamaaycwtttaraaaatatytwgcaaaaggttatkcttataatagtacaggactttcwttcttaagaccwaatrttttrgamcaataytatggtgcaggtaatwtatayatgacaccaacagatatgggtaaattaattactcaratacaacaatataaattattyagtcctaaaataaccaatccattattacatgagtttggtacgaaamagtatccagatgaatatcgatatggtttctatgytaagccaacattgaatagacttaacgggggaytcttyggacaagtctttactgtttactataatgataagtatgtagttgtrcttgcattaaatgtaaaaggaaacaatgaagttcgaatcaaacatatttataatgatattttaaaacaaaataaaccttayaatacgaagggtgttattgttcaataa

SEQ ID NO: 2594 - DNA, 732 bp, Staphylococcus aureus
atgcatgaattgactatttatcattttatgtcagataaattgaatttatacagtgatataggaaatattattgctttaagacaacgtgcwaaaaaacgaaatattaaagttaatgtcgtagaaatcaatgaaacagaaggtattacctttgatgaatgtgatattttctttatcggtggtggaagtgatagagaacaagcattagcaacaaaagaaytaagtaaaattaagacaccacttaaagaagcgattgaagatggtatgccgggattaacratttgtggaggctatcaatttttaggraaaaaatatatcacgcctgatggtacagaattagaagggttaggtattttagatttttatactgaatcaaagacaaaccgattaacaggagatattgttatcgaaagtgatacttttggaactattgtaggttttgaaaatcacggtggtagaacatatcatratttcggtacacttggtcatgtyacttttggttatggtaataatgatgaagataaaaaagaaggcattcattataaaaatttattaggtacttatttacayggaccaattttacctaaaaattacgaaatmactgattatctgttagaaaaagcttgtgaacgtaagggkattccgtttgagcctaaagaaatagataatgaagcggaaawrcaagcgaaacaagtattaatagacagagcaaatagacagaagaartctcgttaa

SEQ ID NO: 2595 - DNA, 216 bp, Staphylococcus aureus
atgaccgctttaccatctcattatgatgatatgtttattttaaacactcaagctcatgcacgtcttgatcaaatggcacaacagtttgaagttgtttgtaatggcttgaacgaaaatgaagggcaagctattcaaacaatggatcaatctgcttcgttaattcgttcaaacttaattcaagttaaagaacaattagaaaaactagcagtatactaa

SEQ ID NO: 2596 - DNA, 1167 bp, Staphylococcus aureus
ttgaaaattatatattgtattactaaagcagayaatggtggtgcacaaacacatctcattcaactygcyaaccatttttgcgtacacmatgatgtttatgtcattgtaggcaatcatggaccaatgattgaacaactagatgcaagagtyaatgtaattattmtcgaacatttagtargtccaattgactttaaacaagatattttagctgtcaaagtgttagcrcagttattctcgaaaattaarcctgatgttatccatytacattcttccaaagctggaacggtcggacgaattgcgaagttcatttcgaaatcgaaagacacacgtrtagtttttactgcrcatggatgggcttttacagagggtgttaaaccagctaaaaaatttctatatytagttatygaaaaattaatgtcayktattacagatagcattatttgtgtttcagatttcgataaacagttagcgttaaaatatcgatttaatcgattgaaattaaccacwatacataatggwattgcagatgttcccgctgttaagcaaacgctaaaaagccaatcacataacaatattggcraagtwgttggaatgttgcctaataaacaagatttacagattaatgmcycgacaaarcatcaatttgttatgattgcaagatttgcttatccaaaattgccacaaaatctaatcgcggcaatagagatattgaaattacataacagtaatcatgcgcattttacatttataggcgatggacctacattaaatgattgtcagcaacaagttgyacaagctgggttagaaaatgatgtcacatttttgggcaatgtcattaatgcgagtcatttattatcacaatacgatacgtttattttaataagtaagcatgaaggtttgccaattagcattatmgaagckatggctacaggkttgcctgtyatmgcyagtcatgttggyggyatttcrgaattagtarctgataatggtatatgtatrrtgaacaaycaacchgaaactattgcyaaagtcytggaaaaatatttaatagacagtgattacatcaaaatgagtaaycaatctagaaaacgttatttagaatgttttacwgaggagaaaatgattaaagaagtggaagacgtttataatggaaaatcaacacaatag

SEQ ID NO: 2597 - DNA, 915 bp, Staphylococcus aureus
atgaccaacaaagttgttattttaggttcaacgaatgtcgatcaatttttaacagttgaaagatatgcacaaccaggcgaaacattacatgttgaagaagcacaaaaagcattcggcggaggtaaaggtgccaaccaggctattgccactgcacgyatgcaagcagacacaacatttattactaaaattggcactgatggcgttgctgatttcatcttagaagattttaaagyrgctcatattgatacrtcatatattatcaaawcarctgaagcaaaaacrggccaagcctttatcactgtgaatgcagaaggacaaaacaccatctatgtttatggtggtgcgaatatgacgatgacacctgaagatgttattaacgcaaaagacgctataatcaatgcagactttgtcgttgcacaattagaagtacccatcccggctattatatctgcatttgaaattgccaaggcacatggtgtgacgacwgtattaaatcctgcaccagcgaaagcattacctaatgaattattrtcattaatcgatattattgtgccaaacgaaacagaagccgaattgttatctgggattaaagtaacwaatgaacaatctatgaaagacaatgccaattactttttatctwtaggcattaagactgttttgattacgctaggtaagcaaggtacatattttgctactaaaaatcaaagccaacacatcgaagcttataaagtaaatgcgattgatacaactgctgcaggcgacacatttattggtgcatttgtcagtcgcttaaacaagtcgcaagataacttagcagatgctattgattttggtaataaagcgagctcactcactgtacaaaaacacggcgcgcaagcatctattcctctactagaagaagtaaatcaagtttaa

SEQ ID NO: 2598 - DNA, 420 bp, Staphylococcus aureus
atgttggattattttgaaattccgtacgaaaaacaagtagtatccgcacatcgtacgccaaaaaygatggttcaatttgcttctgaagcgagagaaagaggtataracattatcattgcaggcgctggcggtgcggcacatttaccaggtatggttgcatcattaacgacgctaccagttattggwgtgccgattgaaacaaaaagtttaaagggtatagattctttattatcaattgttcaaatgccaggaggtattccggttgcaacgactgcaattggtgcagcaggtgctaaaaaygcaggtatacttgcagcaagaatgttaagtattcaaaatccttctttagttgaaaaactaaatcagtatgaatcttcgttaattcaaaaagtggaggacatgcaaaatgarcttcaataa

SEQ ID NO: 2599 - DNA, 1314 bp, Staphylococcus aureus
atgagacagtggacggcaatccatctagcgaaattggcgcgtaaagcaagtagagcagtaggtaaaagaggaacagatttacctggacaaatcgctagaaaagtggatacagatrtattaagaaaattagcagagcaagttgatgatattgtatttatcagtggaacaaatggtaaaacaacgacttcaaacttaattggacatactttaaaagcraataatattcaaattatacacaataatgaaggtgctaatatggctgcaggtataacttytgcattcatcatgcaatcaacacctaagactaaaattgcggtaatcgaaattgatgaaggttcgattccacgtgtgttaaaagaagttacaccttcaatgatggtatttactaatttctttagagatcaaatggatcgyttcggtgaaattgatattatggttaataacattgcagagacaattagtaataaaggcatcaaattattgctaaatgstgatgatccatttgtgagtcgtttgaaaatcgcaagtgatacgattgtgtactatggtatgaaagcacatgcycatgaatttgaacaaagtacgatgaatgaaagtagatattgtccaaactgtggtcgcttattgcaataygattatattcattataatcaaattggtcattatcactgtcagtgtggtttcaaacgagagcaagcaaaatatgaaatatcaagwtttgatgtggcaccgtttttayatttaaatatcaatgatgaaaaatatgatatgaaaatwgcaggtgactttaacgcttataacgcgttagcagcatatacwgttttaagagagctagggttaaatgaacaarcaattaaaaatggctttgaaacgtatacatcagacaatggtcgtatgcagtactttaaaaaagaacgaaaagaagcgatgatcaatttagctaaaaaycctgcaggaatgaatgcaagtttatcagttggtgaacaattagaaggcgaaaaagtgtatgttatttcgctaaatgataacgctgcagatggtcgagatacttcatggatttatgatgcagatttygaaaaattatctaagcaacaaattgaagctatcatcgtgacaggtacacgagcagaagaacttcaattgcgattgaagttagcagaggttgaagtaccaattatagttgagcgtgatatttataaagcaacggcaaagactatggattataaaggtttcacagttgcaataccaaactatacatcattagcgcctatgcttgaacaattaaaccgttcgtttgaaggaggtcaatcataa

SEQ ID NO: 2600 - DNA, 1125 bp, Staphylococcus aureus
atgarcttcaataaattaaagtttggtgcgactattggcattattggtggtggtcagcttggaaagatgatggcacaatcagctcaaaaaatgggttataaagtggytgtattggatcctkctgaagattgtccatgtagatacgttgcacacgaatttatacaagccaagtatgacgatgaaaaggcactcaatcaattaggacaaaaatgtgatgtgattacttatgaatttgaaaacatttcagcccaacaattaaaactattatgtgaaaagtacaatattccgcaaggttaccaagctatacagttattacaagaycgcttaactgaaaaagaaacattaaaaagtgctggtaccaargttgtcccrttcatttcagtaaaagaatctamagatattgacaaagcaattgaaacattaggatatccttttattgtaaaaactagatttggtggctacgatggcaaaggtcaagttttaattaacaacgaaaaagacttacaagaaggtwttaaattaattgaaactagtgaatgcgtagctgaaaaatatttgaatatcaagaaagaagtatcwcttactgttacaagaggaaacaacaatcaaatcacttwtttcccattacaagaaaatgagcatagaaatcaaatacttttcaaaacaattgttccagcgagaatagataaaayagctgaggcgaaagagcaagttaataaaattatccaatcgattcatttcattggaacatttacagtkgaattttttatagatagtaayaaccaattgtatgtgaacgagatwgcaccaaggcctcacaattccggacattattcaattgargcatgtgattattcacaatttgatactcatattttagcagttaccggacaatcattaccaaattcaattgaattattaaagccwgcagtcatgatgaacttactaggtaaagayttagatttattggaaaatgaatttaatgaacatccagagtggcacttacatatttatggtaagtctgrgcgtaaagatagcagaaaaatggggcatatgactgtactaacgaatgatgtaaaccaaactgaacaagatatgtacgctaaatttgaggggagtaattaa

SEQ ID NO: 2601 - DNA, 90 bp, Staphylococcus aureus
atgactaaaaatacaataattagccttgaaaatgaaaaaacgcagatcaatgattcagaaaatgaatctagtgatctccgtaaagcaaaa

SEQ ID NO: 2602 - DNA, 705 bp, Staphylococcus aureus
atgacattaytatatgaaggaaaagcgaagcgcattttctcaacaaatcaagaaaatgaattaagagttgaatataaagatgaagttactgctggaaacggggctaagaaagacacaatggcaggtaaggggcgattaaataatcaaattacttctattatatttaaatatttacaagaaaatggaatagaaagtcactttattaarcaattatctgaaacagaacaattagttaagcctgtgaaaataattccattagaagtagttgttcgtaatattgctagyggatctattacaaagcgtttaggttttgaaaatggtgaagtttttagagaaccacttgtrgaatttttctataaaaatgatgcrttaaatgatcckttgatwacrgatgaycayrtyaaattrctsaatatwgcrwcagatraagatattgaaayaytaaaawcsaaagcrytararattaatmawgtrttraaacaattaatgsatgckatgartttaaaattagtagattttaaaatcgaatttggaaagactgagactggtcaaattttgttagcggatgaaatatctccagatacatgtcgaatttgggataaagctaccaatgcaaactttgataaagatgtatatagaaataacactggatcactgattgaaacatatcaaatatttttaaacaaattggaggatttaaaataa

SEQ ID NO: 2603 - DNA, 1071 bp, Staphylococcus aureus
ttgactgagagacgaattattcatatmgatatggactatttttttgcacaagtcgaaatgagagayaaccccaaattgaaagggaaaccagtyattgttggtggtaaagcaagyagtaggggygttgtctctacggcatcytatgaagcacgaaaatacggcgtccattcagcaatgcctatgtcacaagcgcataaattatgtccaaatggatactttgtcacaagtaattttggtgcttaccgagaaacatctgcgcagattatgtctattttccgwagttatacagataaggtagaaccgatgtcattrgatgaagcgtatttagatattacagaattagtgagaccagaccttcctgcttcgaaaattgctcagtatattagaaaagatattctagagcagacacatttaacagcatctgcaggtgtttcttataacaaatttttagctaaattagcgagtggtatgaataaacctgatggtwtgactgtgattgattatcraaatgtccatgatattttgatgacattggatattggagattttccaggcgtaggtaaagcttccaaaaaagtaatgcatgataatggtatttttaacggtagagatttatatgagaaaacggaatttgaattaatacgtttgtttggaaaaagaggtcggggtttatataacaaggcacgcggtattgaccatagtgaagtgaaatcawcaagagtaagaaaatcagtagggactgaacgcacatttgcaacagacgtgaatgatgatgaagagattttaagaaaagtatgggarttgtcaggtaaaacagctgaacgtctaaataaattacagaagtcrgctaaaactgtaacggttaaaattaaaacttatcaatttgaaacgytatctaaacagatgagtttaagagattckgttagttctgaagaagatatttataatattgcatatttactttataacgatttaaaagacccwgatgtaccaattcgacttattggtgtcactgtaggtaatttagaacaatcaacttataaaaatatgacgatatatgactttatataa

SEQ ID NO: 2604 - DNA, 402 bp, Staphylococcus aureus
atggaaataatggcaaagattaaaagaaaaaagaagatgacgctactcgaactggtggaatgggcatggaacaatcctgaacaagttgaaagtaaagtgtttcaatcagatagaatgggcacgcttggagaatgtagcgaagtacatttttcaactgatgggcatgggttttatacaaaagtagtaacagataaagatatttttactgtagaaatcacagaggaagtcactgaagatactgagtttgattgtctagtagaactaaacgatattgaaggttttgaaatatatgaaaatgattcaatcagagagttgatagacggtacttccagagcgttttatatactaaacgaagataaaactatgacattaatttggaaagatggggagttggtagtatga

SEQ ID NO: 2605 - DNA, 264 bp, Staphylococcus aureus
atgaaaacaattgaactacatatcacattacaaccacaagtattagatacgcaaggacaaacgcttactcgagctgtacatgayttaggttatgcacaagtgaatgatattcgtgtaggaaaagtattatatatgacagtggatgaggttagtgatgaaaaggtacacaacattattacaactctaagtgaaaaattgtttgcaaatacagtgattgaagaatatagctataaagtkttagawgatgaaaaggagaatgcataa

SEQ ID NO: 2606 - DNA, 531 bp, Staphylococcus aureus
atgcataaaattgatttaacgacaaataattttcaaatgcgaaggtttattatcttgcaacttgttattgcgttattcgtgattttatttacgtataagtgggcgttaggtgtcacagcggttgtcgatcaaaatatcatcatcaatcttgtatatgggtttgctggattcattattttattgattttacatgaacttatccatagagcattatttctkttatttaaaaaagatagcaaacctatgtttaatataaaaaaagacagaatcttattccaaacagcagatgcttgcttcaacaaatggcaattctcaattattatgctgtcaccactaatcytattaagtrctggcttgcttattttaattaaggtatttggttattcatcacttatttttatgtttagtatgcatacygcttattgctttatagatattctgcttgttgcattaacaatatctagtagttttaaatatgttcaacaagatgaagatagtatttatttgtatcatcaaaagccgrctcaataa

SEQ ID NO: 2607 - DNA, 444 bp, Staphylococcus aureus
atggaacaaatcacgttaaccaaagaagagttgaaagaaattatagcgaaagaagttagaaatgctataaaaggcgagaaaccaatcagctcaggtgcaattttcagtaaagtaagaatcaataatgacgatttagaagaaatcaataaaaaactcaatttcgcaaaagatttgtcgctaggaagattgaggaagctcaatcatccgattccgctaaaaaagtatcagcatggcttcgaatcaattcatcaaaaagtttatgtacaagatgttcatgaccatattagaaaattaacattatcaatttttggagtgacacttaattcagacttgagtgaaagtgaatacaacctagcagcaaaaatttatagagatatcaaaaactattatttatatatctatgaaaagagagtttcagaattaactatcgatgatttcgaatga

SEQ ID NO: 2608 - DNA, 672 bp, Staphylococcus aureus
atgaaatttgcggttcttgtttttccaggttcgaattgtgatagagacatgtttaatgctgctattaaaagtggtgttgaagcggaatatgtagattatagagaaacatcactaagtggatttgatggmgtacttattcctggtggattttcattcggggattacttaagatctggggcaatggctagtgtagcgccgrttatttckgaagttaaacgtcttgcarctgaaggtaagccagtattaggtgtttgtaatgggtttcaaattttaactgaaataggcttattacctggtgcattattgcataacgattcacatttatttattagtagaaatgaagagttagaaatagtgaataatcaaacggcwtttacaaatctttatgarcaaggtgaaaaagttatatatcctgtagctcacggygaaggtcattattattgtactgatgaaatatatcaamaattaaaagctaacaatcaaattattctgaaatatgtgaataatccgaacggttcatatgaygatattgcaggaattgttaacraaaaaggcaatgtrtgtggcatgatgccacatcctgaaagagctttagaaacgttgttaggtactgatagtggtgtgaaattatttgaagcgatggtaaaaagttggagggaacaacatgtctaa

SEQ ID NO: 2609 - DNA, 1362 bp, Staphylococcus aureus
ttgcaagcaatagctaaaaatgacatwaaaacgggaacagttgttgatttaacgcatgaaggycatggtgtygtaaaaatagatcgctttcctattttcataccacaagctttaattaatgaacaaattgaatataaaattatcaaagtaaaaaagaactttgcgataggtaagttgcttaatataaatacgagaagtgagaatcgtgttgcaccgccatgtatatattatgaacgttgtggtgggtgccaacttcaacacttatcatacgaagcacaacttgaaatgaaaaaggaacaagtgattaatttgtttcagcgaaaagcgcattttgataattctaagattaacgatacagttggcatgacagatccttggagatatcgaaacaagtcccagattccagttggtaagaatgaacagaatgaagttattatgggcttttatcgtcaaagaagccatgacattattgacatggraagttgtttaatacaagattcacaacatcaagaagtgatgaatgaagttaaatctattttaaaagatttaaatgtaagtatttatcaagaacaattgaaaaaaggtttaatgagacatttggttgtaagaacaggatatcatacagacgaaatgatgrttatttttgtaactaatggtaaaaaktggccacaaaaaaatgctgttgttgagaagatattagatgcatttcctaatgtgacaagcattaaacaaaacattaatgatagccactctaatgttattatgggrcgtcartctataacgctatatggtaaagatacaattattgatcaattaacagatagtacatttaaaataagtgatcagtcattctaccaaattaattctgaacaaacagagaaattatataataaagcaattgartatgcgcaattgacaggtaatgaagttgtattagatacctattgtggtattggaacaataggrctatatatggcaccacwtgcaaaacatgtatacggtgttgaagtwgtaccttctkcaattgaagacgcacaacaaaatgcgactataaaccaatgcaataatacaacttttgtctgtgggaaagctgaagaagttattttacaatggaaagcacaagggattaaaccagatgttgtaatggttgatccgccaagaaagggctgtgacgaaacgtttattcagactttgcttacattagaacctaagcgtattgtctatatttcatgtaatccckcaacacagcaacgtgatgcattattattagctgaaaaatatcaacttgaagaggtaacaccggtagatatgtttccacaaacaacacatgttgagacagtggcattattcaatttgaaatag

SEQ ID NO: 2610 - DNA, 228 bp, Staphylococcus aureus
atgatgtgttttgattattcagctttaataggtcgtataattgaaaagtatggtaatagatatgcttttgcatacgcgataggcttatcagaacgaagtttatctttaaaattaaatgataaaattggttggagagattccgaaatagctaaagcttgtgaattattatctatacccagagaagaaatacaagtatatttttttaattataaagttcaaaataattga

SEQ ID NO: 2611 - DNA, 1170 bp, Staphylococcus aureus
atggatgatagaattccaattaatgtgtggacaggagattcaatagcgagaacgggtaaagggactcctataaaattaaatctagaaaatcttagtgcattaagtaatttggtaactggtgaaacaagtaatatgttaaccgattgtgtaaattatttgaatgagagctataatatttcacaggttgaaaatgctaattttggagaaagaaaacataaacttaaacaagattttaaaaagattgtcgaagttgatatccttgaaggaatgagtagagaattaacttctttgaaaaaggatgcatttagcgcaattgataatgtcaaaaaaaatcttgttggaattgctttcatattttcatcagttgcagtccttatttttgaattaaatactattgaagaaatgcttgaagatttagataaaaaattacaacgtggcatagaaagtttacatgattcattggataacgtaattaaagaaatgtttaaaaatttagatcatgattttgaagatggcgtgacagaggaaatgatgaagcatttaaatgttgtgaataataatataaattttgtaaaaaaacaaaatgatgtatatggagagcagataaccgatattaaaaatataatgtctcatcaagatgcaacggtaatggatggaaacttatctattaattatagcggtgaacatatgatttcgggtcaagtacaatcttctaattatttaactagaaaaatgacaattttaaaaaaccatattgataatgcagttaacaaaattagtgattatgttcaagaagcttacaataattattttgaaccagtattaaactacattcttgaagttatacattcggtagaaacagctgtgagacatatttatgaaataagcagtttaatatacaaagtaacaatgaaaataaagataaaggctatgggaataaatgtcgacgaaattgataaaaaccttgaagttttaaaaagtaaacttaaaaatttagatgaatttttaaataacttaaaaacagcttcaccaattttagaaaatcacttagatgacattgttagaaatatgaagccattaattgttaatcaaatttttgaaccatctcattatgatgatatgtttatttcaagaaaagctttaacgccagtgttctcaagcgttttataa

SEQ ID NO: 2612 - DNA, 870 bp, Staphylococcus aureus
atgaaaaaaattaatgatagagatttagcagaattaagtggatactgggcatatcaagatttggacaaaagatatgtaattagagtaaataataataaatatagactaattgaagattattcagacaatcctaattctaaaagttttggtggtacagatgcaaaagtttttgaattggtaaatagcaataatgaattaacaggacaacaagctattatcttccaaggtacaaataataataagagtatcggaagcaacaatccttttcgtgggaaggttgctgatgattggattgaaaatataaagttaatgaatgataaaaataagtcaacttctttattagaacaaaataatgcttatattaaatcgtatgaacagaaactaaaagatgcagatacacttaaaagctctgattttttaaggaaatataagaaaaatccgtctacgtataaaaacaaaactattaagtctgatggaggcaattctcaagggggagcaagtgctaaccaccaagggatgattaacccgaataaaaatatagtttctacaaaccctgccatgttaccaaagtcaatatgggaaaatttcaaatctcaaaactttgaaaatatgattaattatcatagtaagtttgatattttatcttggctgcaggatccatttgccactccgacactaggaaaacgagtgaatttagaaactggtgtgccaacgatggatggattagtaaatagtcatttaggttataaaagaaaattaaatccaagatataatacttataaggatttagcagtttataaaattaaatcagttaaagatactatgattaaaaatggtaaaaaagtcaaaaaactattgaaatcgatataa

SEQ ID NO: 2613 - DNA, 159 bp, Staphylococcus aureus
atgattgatttttctgaagtactaaaaaagaaaaagaatattcctcatgatttgaatgtttctcttcaaattactgataaatatataaattcagcaagacctagttacagtaagaaagattcaatagaagtaggagtatttaatcatgaaaaaaattaa

SEQ ID NO: 2614 - DNA, 2190 bp, Staphylococcus aureus
atgtctaaatttatcgaaccaagcgttgaagaaattaaacttgaaaaagtatatcaagatatgggattaagtgatcaagaatatgaaaaagtttgcgatattttaggcagacaacctaactttacagaaacaggtatcttttctgttatgtggagtgaacattgctcttataaacattctaaaccgtttttaaarcaatttcctacgtcaggtgascatgtgcttatgggkccwggtgaaggtgcaggggtagtcgatataggtgataatcaagccgtagtatttaaagtagartctcacaatcatccatcagcaattgarccatatcaaggkgctgctacaggcgttggtggaatcattcgtgacattgtytctattggggctagacctattaatttgttaaacagtcttagatttggagaattagataataaacaaaaccaaagattacttaaaggkgttgtaaagggtatcggaggttatggtaactgcattggtattccaacaactgctggwgaaatcgaatttgatgaacgttatgatggyaatccacttgttaatgcaatgtgtgttggtgttatcaatcacgacatgattcaaaaaggcacagcaaaaggtrtaggtaattcggtcatttatgttggtttgaaaactggtcgagatggtattcatggtgctacttttgcatctgaagaattgacggaagaaagcgaaagtaaacgaccttctgtacaaatcggtgatccatttgtaggtaaaaaattaatggaagcaacacttgaagcaattacatttgatgaattagttggtattcaagatatgggtgctgctggtttaacatcttcatcktctgaaatggcggcaaaaggtggtagtggkttacatttgagattagaacaagtgccaacacgtgagccaggtatttctccttaygaaatgatgctttcagaaactcaagaacgtatgttactagttgttgaaaaaggtamtgaacaaaaattcttagatttatttgataagcacgaattggatagtgctgttataggtgaagtwacagatacaaatcgttttgttttaacatatgawgaygaagtttatgctgacattccagttgaaccactagctgatgaagcacctgtatatattttagaaggagaagaaaaarattataatacttctaaaaatgattatacacacatcgatgttaaagatactttctttaaattacttaagcatccgactatagcatctaaacactatttatatgatcaatacgaycaacaagttggtgccaatacgataattaagccaggacttcaagcatcggtagtacgtgtggaaggcacaaataaggcaattgcttcaacaattgatggtgaagcgckttatgtatataacaatccatatgaaggtggaaagatggtagtagctgaagcttatcgwaatttaattgccgtgggtgcaacaccattagcaatgacwgaytgyttaaattatggttctcctgaaaagaaagaaatytatcaacarttrryagattcaacgaaaggtatggcagaagcwtgcgacatwcttaagacaccwgtwgtttctggwaaygtwtctttatayaacgaaacgaaaggyacttctattttcccwacaccarttgttggwatggtaggtytgattgaaaaygtaraytatttaaatgattttsaacctcaagttggagataarttatatktaatyggtgatactaaggacgactttggtggtagtcaacttgaaaarttratttatggcaaagtwaatcaygaatttgartcwwtagatttgagttcagaagttraaaaaggtgaatcaatcaagaccgctattcgtsaaggrstattatcacatgttcaaacrgttggtaaaggtggcttactgattaccttagctaaactaagtgcgcattacggtttaggattaaartcttyaatagatataacaaatgcacaattgtttagtgagacrcaaggccgatatgttgtttctgttaaatcaggtaaaactttaaatattgataatgcaatagaaattggrcttttaacagatagtgataatttcaargtaacaacaccatatacagagattagtgaaaatgtttcagatattaaacaaatatgggaaggggcaattgctcaatgtttaactactcaggattaa

SEQ ID NO: 2615 - DNA, 948 bp, Staphylococcus aureus
atgaggaaacgtgctagaatcatttataacccgacatcaggtaaagagcwatttaaaagagaattacctgatgccttaataaaattagaaaaagcgggatatgaaacgagtgcatatgcaaccgagaaaataggtgatgccacacttgaagcagaaagagctatgcatgaaaattatgatgtattaatcgctgcaggtggtgayggaacattaaatgaagtagttaatggtatcgcagaaaagcctaatcgtcctaagctaggtgtcattcctatgggtactgttaatgactttggacgtgcattgcatatacctaatgacatcatgggggcacttgatgtcatcattgaaggtcattctactaaagtagatattggtaaaatgaataatcgatactttattaatttagctgcaggcggacaattgacgcaagtctcttatgaaacaccgagtaaattgaaatctattgttggtccatttgcttattacatcaaaggtttcgaaatgttacctcaaatgaaagctgtagatttaagaattgaatatgatggtaatgttttccaaggagaagcattattattctttttaggtttaacaaattcaatggcaggatttgaaaaattagtgccggacgctaagttagatgacggctattttacgttaattatagttgaaaaatcaaaccttgcagaacttggtcatattatgactttagcttcaagaggagaacatactaagcatcctaaagttatttatgaaaaagcaaaggcaattaatatttcatcattcacagacttacaactaaatgtagatggagaatatggtggtaaattaccagcgaatttcttraatctagaacgtcatatagatgtctttgcaccwaatgatattgtaaatgaagagttaataaataatgatcatgttgatgacaatttaatcgaagaataa

SEQ ID NO: 2616 - DNA, 1485 bp, Staphylococcus aureus
atgtttaactactcaggattaaacgaagaatgtggcgtgtttggtatttggaatcatcctgaagcagcgcaactaacatatatgggacttcatagtttgcaacatcgtggtcaagaaggtgcaggtatagttgtttctgatcaaaatgaattaaaaggcgagcgaggattaggcttactaactgaagcgattaamgatgaycaaatggaacgattaaaaggatatcaacatgcaattggtcacgtccgttatgctacttcaggtaataaaggtattgaaaatattcaaccgyttctgtatcacttttatgatatgagtgtaggtatttgtcataatggtaacctcattaatgctaaatcattrcgtcaraatttagaaaaacaaggtgctatcttccattcgtcttcwgatacwgaagtyattatgcatttgatwcgwcgmagtaargckccwacttttgargaagcrttraaagaaagtytkcgaaaarttaaaggyggttttacatttgcratwttaacwaargatgcgttatatggcgcagtagatccaaatgctatcagaccacttgttgtaggtaaaatgaaagatggkacatacatccttgcaagtgaaacatgtgcaatwgatgtgttaggtgcagaattygttcaagatattcatgcrggtgaatatgtcgtgattaaygataaaggtattacagttaaatcttatacacatcatacgacaactgcaatttctgcgatggaatatatttattttgckagaccagaytcaacratwgctggtaaaaatgtycatgcagtrcgtaargcttcwggtaaaawrttagcmcaagaaagycckgtaaawgctgatatggtcatcggtgtaccyaattcatcrytatcwgcwgcgagyggttatgctgaagaaatmggtttgccatatgaaatgggactagttaaaaatcaatatgttgcaagaacatttattcaaccaackcaagarttacgtgarcaaggtgtragagtkaagytatctgcrgtraaagatatwgtagayggkaaaaatatyattcttgttgatgattccattgttcgmggtacgacaattcgacgyattgtgaaaatgttaaaagattctggtgcaaataaagtgcatgtgcgtatagcatcaccggaatttatgttyccaagtttttayggaatcgatgtttcaactacggcagaattaatttctgcaagcaaatcacctgaagaaattaaagattatattggcgctgattcrttagcatatctatctgtagatgggttaattgaatcaattggtttagattatgacgcgccatatagtggcttatgtgtagaaagtttcactggagattatcctgcagggttatatgattatgaagcaaattataaagcrcatttaagtcatcgacaaaagcaatatatttctaaaaacaaacactwttttgatagcgagggaaatttaaatgtctaa

SEQ ID NO: 2617 - DNA, 144 bp, Staphylococcus aureus
ttgrttgctgacttagatgcaatcgagggtttatttatatctatagaagtcawattacttttaactttattcattgtacatgttaatggtaaaaatattaattttattaatgcgttagctttaattatattaaggcaaactgta

SEQ ID NO: 2618 - DNA, 900 bp, Staphylococcus aureus
atgaaaaacagccaaaatattgtttgtattggtgcagcaaatatagataaacaattatatttaaaatctgaattggttaataaaagttcaaaccctgtatcttcgataagcgtatctggaggtgtagctaggaatttagcgtataatattggcaaattaagtaataaaaaaactattctattaactttattaggtaatgataaagaagctgattatattttaaatgaagctaataagtttatcgatttaaaacatataaaaattatagaaaatatgaacacaggaatgttcacttctgtaatagattataatggggaaatgatatgtggttttgcagatatggatatatataacttaataaataacaaatatttaaatgaaaaaatagaagtaataaaaaatgcagattgtgtggttgtagactctaatattcccaaggaaagtatacaatatttaattcagttgtgtggaaagagtaatattccaataggtataatcccagcatctataaagaaggtgagaaacatactaaaaaacttagcaaagatagactatttaatatttaataaaaaagaagctgaagctttttggaacgtttctttaaatactaaaagtgattataaaaaaataaaaaaaattagtaaaacttcagaaataaaaaatatagttatcactaatggaaatgatgatatcttttatacaaatggagaattaagcatatttaaaaatgttcaacagagttcaaatataattaatgacacaggtgcaggagatgttttttcagcatcagtatttcattattggcttgaaaactatgaagttgataattacttagaaatggcattgtttaatgcctgttctacagtgagcactatatataatacttccatgattaattag

SEQ ID NO: 2619 - DNA, 1029 bp, Staphylococcus aureus
atgtctaaagcatatgaacaatctggtgtaaatattcatgctggttatgaagctgtagaaagaatgtctagtcatgttaaacgtacgatgcgtaaagaagttatcggtggtttaggtggattcggtgctacatttgatttatcacaattaaatatgacagcrccagttttagtttctggaacagacggagtaggtacgaaattaaaactagctatcgactatggkaaacatgattcgataggtatcgatgcagtygcaatgtgtgttaatgatattttaacgacaggtgcagaaccattrtattttttagattacatygctacaaayaaagttgttcctgaagttattgaacaaattgttaaaggtattagtgatgcatgygttgaaacgaatactgcacttatcggtggagagactgctgaaatgggtgaaatgtatcacgaaggygaatatgatgtagcyggatttgcwgttggagcagttgaaaaggatgactatgtagatrgttcagaagtgaaagagggacaagttgttataggrcttgcgtcaagtggcattcattcaaatggatayagtttagtgcgcaaattaattaatgaatcaggcattgatttggcatcaaacttcgataatcgtccatttatmgatgtctttttagaaccaactaaattatatgtyaaacctgtacttgctttraaaaaagaagtttctattaaggcaatgaatcatattactggtggaggtttttatgaaaatattccacgtgcattgccagccggatatgctgctagaattgatactacatcatttccaacrccaaaaatatttgattggttacaacaacaaggcaatatagasacaaatgaaatgtataacatttttaayatgggtattggctatacggttatcgttgatgaaaaagatgyaycacgygctttgaagattttagcagaacaaaatgtggaagcytatcaaattggtcatattrtgaaaaatgagtcaactgcaattgaattgttgggggtataa

SEQ ID NO: 2620 - DNA, 1428 bp, Staphylococcus aureus
atgcattttgaaacagttataggacttgaagttcacgtagagttaaaaacggactcaaaaatgttttctccatcaccagcgcattttggagcagaacctaactcaaatacaaatgttatcgacttagcatatccaggtgtcttaccagttgttaataagcgtgcagtagactgggcaatgcgtgctgcaatggcactaaatatggaaatcgcaacagaatctaagtttgaccgtaagaactatttctatccagataatccaaargcatatcaaatttctcaatttgatcaaccaattggtgaaaatggrtatatcgatatcgaagtcgacggtgaaacaaaacgaatcggtattactcgtcttcacatggaagaagatgctggtaagtcracrcataaaggtgagtattcattagttgacttgaaccgtcaaggtacaccgctaattgaaatcgtatctgaaccagatattcgttcacctaaagaagcatatgcatatttagaaaaattrcgttcaattattcaatacactggtgtatcagacgttaaratggaagagggatctttacgytgtgatgctaacatctctttrcgtccatatggtcaagaaaaatttggtactaaagcygaattgaaaaacttaaactcatttaactatgtacgtaaaggtttagaatatgaagaaaaacgccaagaagaagaattgttaartggtggagaaatcggacaagaaacacgtcgatttgatgaatctacaggtaaaacaattttaatgcgtgttaaagaaggttctgatgattaccgttacttcccagagcctgacattgtacctttatatattgatgatgcttggaaagagcgtgttcgtcagacaattcctgaattaccagatgarcgtaargctaagtatgtaaatgaattaggyttacctgcatacgatgcacacgtattaacattgactaaagaaatgtcagatttctttgaatcaacaattgaacacggygcagatgttaaattaacatctaactggttaatgggtggcgtaaacgaatatttaaataaaaatcaagtagaattattagatacwaaattaacaccagaaaatttagcaggtatgattaaacttatcgaagacggaacaatgagcagtaaaattgcgaagaaagtcttcccagagttagcagctaaaggtggtaatgctaaacarattatggaagataatggcttagttcaaatttctgatgaagcaacacttctaaaatttgtaaatgaagcattagacaataacgaacaatcagttgaagattacaaaaatggtaaaggcaaagctatgggcttcttagttggtcaaattatgaaagcgtctaaaggtcaagctaatccacaattagtaaatcaactattaaaacaagaattagataaaagataa

SEQ ID NO: 2621 - DNA, 567 bp, Staphylococcus aureus
atggttaaaattgcgatttttgcatcaggttcaggaagtaactttgaaaatatagttgagcatgttgaatcaggaaaacttgaaaatattgaagttacggcgctatatacggatcatcaaaatgcgttttgtatagatagagcaaaaaagcacgatattcctgtttatattaatgaaccaaaacaatttgrttcaaaagcagcgtatgaacaacatttagtawcaytattaaatraagataaggtagagtggattattytagctggctacatgcgtctaattggtccagayttattagcttcatttgaaggtaaaatattraatatacatccatcwctattgccgaaatataaggggattgacgcaataggccaagcatatcatagtggcgatactattactggttcgacagtacattatgttgatwgtggtatggatacgggagaaattattgaacagagamaatgtgatattagaccggacgattcaaaagaacaattagaagagaaagtaaaaaaattggaatatgagttatatccaagtgttattgctaaaattgtaaaataa

SEQ ID NO: 2622 - DNA, 1458 bp, Staphylococcus aureus
atgagcattcgctacgaatcggttgagaatttattaactttaatwaaagacaaaaaaatcaaaccatctgatgttgttaaagatatatatgatgcaattgaagagactgatccaacaattaagtcttttctagcgctggataaagaaaatgcaatyaaaaaagcgcaagaattggatgaattacaagcaaaagaycaaatggatggcaaattatttggtattccaatgggtataaaagataacattattacaaacggattagaaacaacatgtgcaagtaaaatgttagaaggttttgtgccaatttacgaatctactgtaatggaaaaactacataawgaraatgccgttttaatcggtaaattaaatatggatgagtttgcaatgggtggttcaacagaaacatcttatttcaaaaaaacagttaacccatttgaccataaagcagtrccaggtggttcatcaggtggatctgcagcagcagttgcagctggyttagtaccayttagcttaggttcagacacwggtggttcaattagacaaccggctgcatattgtggygttgtcggtatgaaaccaacatacggtcgtgtatctcgatttggattagttgcwtttgcatcttcattagaccaaattggtccattgactcgaaatgtaaaagataatgcaatcgtattagaagctatttctggtgcagatgytaatgactctacaagtgcaccwgttgatgatgtagactttacatctgaaattggtaaagatattaaaggattaaaagttgcattacctaaagaatacttaggtgaaggtgtagctgatgacgtaaaagaagcagttcaaaacgctgtagaaactttaaaatctttaggtgctgtcgttgaggaagtatcattgccaaatactaaatttggtattccatcatattacgtgattgcatcatcagaagcttcgtcaaacctttctcgttttgacggaattcgttatggttatcattctaaagaagctcattcattagaagaattatataaaatgtcaagatctgaaggtttcggtaaagaagtaaaacgtcgtattttcttaggtacatttgcattaagttcaggttactaygatgcttactataaaaaatctcaaaaagttagaacattgattaaaaatgactttgataaagtattcgaaaattatgatgtagtagttggtccaacagcgcctacaactgcgtttaatttaggtgaagaaattgatgatccattaacaatgtatgccaatgatttattaacaacaccagtaaacttagctggattacctggtatttctgttccttgtggacaatcaaatggccgaccaatcggtttacagttcattggtaaaccattcgatgaaaaaacgttatatcgtgtcgcttatcaatatgaaacacaatacaatttacatgacgtttatgaaaaattataa

SEQ ID NO: 2623 - DNA, 1479 bp, Staphylococcus aureus
atgaagaaagctattttgagcgtatcaaataaaacaggtattgtagagtttgctaaagcgttaacgcaattaaattatgaattatattcaacwggtggtactaarcgtatattagatgaagcaaatgtaccagttcgttctgtttcagacttaacacattttccagaaataatggatggccgtgttaaaacattacatccrgctgttcatggtggyattttrgctgatcgaaataaaccgcagcatttaaatgaattatcagaacaacatatagatttaattgatatggtagtagttaatttatatccattccaacaaactgttgcwaaccctgatgtgacgatggacgaagcaattgaaaatattgatattggtggtccaacaatgttacgtgctgcagctaaaaactataaacatgtaacaacaattgtacatcckgcagattatcawgaagtattgacgcgattaagaaacgattcgttagatgagtcatatagacaatcattaatgatyaaagtttttgagcatactgcagaatatgatgaagcgattgtacgtttctttaaaggggataaagaaactttaagatatggagaaaatccacaacaatcagcgtattttgtgagaacttcgaatgcwaagcacacgattgcaggygctaaacaattacatgggaaacaattaagctataacaatattaaagatgcagatgctacactagctttagttaaaaagtttgatacacctgctrcagttgcrgttaaacacatgaatccatgtggtgttggtatcggtgacacgwtwgaacaagcatttcawcatgcgtatgaagcggatagtcaatcaatatttggtggaattgttgcattaaaccgagctgtaacacctgagttagcagagcaattgcatagtatctttttggaagtcattattgcaccaaaatttacagatgaagcattaratattttaaaacaaaagaagaatgtaagattattagaaattgatatgactatagacagtaacgaagaagagtttgtttcagtatctggcggatatttagttcaagataaagacaattatgtcgtgccaaaagaagaaatgaaagttgttacagaagtwgcacctacwgatgaacaatgggaagcaatgttattaggatggaaagttgtaccatcagtaaaaagtaatgcaattattttaagtaataataaacaaactgtaggtataggtgctggacaaatgaatcgtgtcggtgctgctaaaattgcgttagagagagctattgaaatcaatgatcatgtagcgttagtatctgatggatttttccctatgggagatacagttgaacttgcagcacaacatggtataaaggcaattatccaaccgggtggttcgattaaagatcaagattcaattgatatggctaataaacatggtattgcaatggtagtcacaggcactcgacattttaaacactaa

SEQ ID NO: 2624 - DNA, 303 bp, Staphylococcus aureus
atgacaaaagtaacacgtgaagaagttgagcatatcgcgaatcttgcaagacttcaaatttctcctgaagaaacggaagaaatggccaacacattagaaagcattttagattttgcaaaacaaaatgatagcgctgatacagaaggcgttgaacctacatatcacgttttagatttacaaaacgttttacgtgaagataaagcaattaaaggtattccrcaagaattagctttgaaaaatgccaaagaaacagaagatggacaatttaaagtgcctacaatcatgaatgaggaggacgcgtaa

SEQ ID NO: 2625 - DNA, 1239 bp, Staphylococcus aureus
atggaaaatcaacacaatagtaaatwwctaacattgttacttatcggtttagcggtttttattcagcaatcttcggttattgccggtgtgaatgtttctatagctgactttatcacattactaatattagtttatttactgtttttcgcyaaccatttattaaaggcaaatcattttttacagtttttcattattttgtatacatatcgtatgattattacgctttgtttrctattttttgatgatttgatatttattacggttaaggaagttcttgcatctacagttaaatatgcatttgtagtcatttatttctatttagggatgatcatctttaagttaggtaatagcaaaaaagtgatcgttacctcttatattataagcagtgtgactataggtctattttgtattatagctggtttgaacaagtcccctttactaatgaaattrttataytttgatgaaatacgttcaaaaggattaatgaatgaccctaactatttcgcgatgacacagattattacattggtacttgcttacaagtatattcataattacatattcaaggtccttgcatgtggtattttrctatggtctttaactacaacggggtctaagactgcgtttatcatattaatcgtcttagccatttatttctttattaaaaagttatttagyagaaatgcrgtaagtgttgtgagtatgtyagtgattatgytratwytactttgttttacyttttataatatmaactactatttattccaattaagcgaccttgatgccktaccgtcattagatcgaatggcgyctatttttgaagagggstttgcatcattaaatgatagtggrtctgagcgaagtgttgtatggataaatgccatttyagtaattaaatatacaytaggttttggtgtyggmttagtggattatgtacatattggctcgcaaattaatggtattttacttgttgcccataatacatatttgcaratytttgyggaatggggcattttattcggtgcrttatttatcatatttatgmtttatttaytrtttgaattatttagattyaayatttctgggaaaaatgtaacagcaattgttgtaatgttgacgatgctgatttactttttaacagtatcrtttaataactcaagatatgtcgcttttattttaggaattatcgtctttattgttcaatatgaaaagatggaaagggatcgtaatgaagagtga

SEQ ID NO: 2626 - DNA, 405 bp, Staphylococcus aureus
atgaaaaaatcagctgttttaaatgaacatatttcaaaagcaatcgcgacaattggtcattttgatytattaacrattaatgacgctggcatgccaattccaaatgatcatcgycgtatcgacctagctgtmacwaaaaacttaccrcgctttattgatgtcttagctacagtgttagaagaaatggaaatccaaaaaatatacttagcagaagaaataaaagaacataaccctacacaattgcaacaaattaaacaattgatttcatcggaaatcgaaatcattttcattcctcacgaagaaatgaaaagtaacttagctcacccattaaataaaggtaatattcgtactggtgaracaacgccctactctaatattgcattagaatcgaatgttactttttaa

SEQ ID NO: 2627 - DNA, 1248 bp, Staphylococcus aureus
atgaatgtattagtaattggtgctggtggacgagaacatgcacttgcatataaacttaatcaatcgaatctagttaaacaagwgtttgycattccaggtaatgaggcaatgacacctatagctgaagtacacactgaaatttcagaayctratcatcaagsgataytagattttgctaaacrgcaaaatgttgattgggtagttataggtccagaacarccgctaattgatggattagcagacattttacgagcgaatggtttcaaagtgtttggtccaaataagcaagcagctcaaatcgaaggctcaaarttatttgctaaaaagataatgraaaaatataatattccaactgctgattataargaagtwgagcgaaaaaaggatgcwttaacatatattgaaaactgtgaattsccygttgttgtcaagaaagatgggttagctgctgggaaaggcgttattattgcagatacwattgaagcagccagaagtgctattgagattatgtatggtgatgaagaagaaggtactgttgtrttygaaacgtttttagaaggtgaagagttctcgctaatgacatttgttaatggtgawttagcagtwcctttcgactgtattgcacaagatcataaacgcgcatttgatcatgatgaaggaccaaatactggtggtatgggggcttattgtccagtaccacatattagtgacgatgttttaaaacttacaaatgaaacaattgcacaacccattgcaaaggcaatgcttaatgaaggttatcaattcttcggtgtattatacattggtgctattytaactaaaratggtccaaaagtaatagaatttaatgcccgttttggtgatcctgaagctcaagtattattaagtcgcatggaaagtgatttaatgcagcatattattgatttagatgaaggaaaacgtactgaattcaaatggaaaaatgaakctattgtaggggtcatgttggcatcaaaaggatatcctgatgcatatgaaaaagggcataaagtaagtggctttgatttaaatgaaaactattttgttagtggattaaagaagcaaggtgatacctttgttacttcaggtggtagagttatacttgccatcggaaaaggtgacaatgtacawgatgcacagcgagacgcatacraaaaagtatcwcaaatacaaagtgaccatttattctatcgtcatgacattgcgaataaagcactacaacttaaataa

SEQ ID NO: 2628 - DNA, 1200 bp, Staphylococcus aureus
atgaagcgtacattagtattattgattacagctatctttatactcgctgcttgtggtaaccataaggatgaccaggctggaaaagataatcaaaaacataacaatagttcaaatcaagtaaaagaaattgcwacggataaaaatgtacaaggtgataactatcgtacattgttaccatttaaagaaagccaggcaagaggacttttacaagataacatggcaaatagttataatggcggcgactttgaagatggtttattgaacttaagtaaagaagtrtttccaacagayaaatatttgtatcaagatggtcaatttttggacaagaaaacaattaatgcctatttaaatcytaagtatacaaaacgtgaaatcgataaratgtctgaaaaagataaaaaagacaagaaagcgaatgaaaatttaggacttaatccatcacacgaaggtgaaacaratcctgaaaagattgcagaaaaatcaccagcctatttatctaacattttagagcaagatttttatggtggtggagatacaaaaggtaagaatattaaaggtatgacgattggtttagctatgaatagtgtttattactataaaaaagaaaaagatggaycgacttttagtaaaaaactagatgatagcgaagttaaaaagcaaggtaaacaaatggctagtgagatattatcaaggttacgtgaaaatgatgatttaaaagatataccaattcattttgcaatttataagcaatcaagtgaagattcaatcacaccaggtgaatttatcactcaagcgactgcagaaaagagtcaaacaaagcttaatgaatggcataatatcaatgaaaaatcagctttattaccttcttcaacagcagyagattatgatgaaaatttaaataataatttcaagcaatttaatgataatttgcaatcatatttttctaatttcacacaagcagtaggraaagttaaatttgttgataaaaagccacaacgattagtagtagatttaccaatcgattactatggacaagctgaaacaattggtattacacagtacgttactgaacaagcgaataaatatttcgataaaatcgataactatgaaattcgkattaaagatggtaaccaaccacgtgctttaattagtaagacaaaagatgacaaagaaccgcaagttcatatttacagtaattaa

SEQ ID NO: 2629 - DNA, 561 bp, Staphylococcus aureus
atgaacaaggtagaagtaattaaatgcaatgatgatattaataaaatgtatgacgcgctcaaagctcgatctgatagggattatttgttttttaaattagctatacatagtggtatgaaaataacagaattattaacaattactgttgaagatactaaacgactgatagaaaaggggacactaagcgaattgtgtaaagcccattatcactcattgattaaaattagattgccagaaacattatctaatgagttacttcattatattgaaaacaaaagtctgtcaaatgaagatgtattatttcaatcattgagaactaatcaagtattatctaggcaacaagcctatcgtattattcatcaagcagcaattaaggctggcatagagaatgtaggactaacgacattgcgtaagacatttgcgtatcatgcatatcaaaagggcatacctattcctgtcattcaaaagtatttagggcatcaatcagctatagaaacattgaattttatcggtttagaaaatgaatgtgaacacagtatttatatttcattacaattataa

SEQ ID NO: 2630 - DNA, 1296 bp, Staphylococcus aureus
atgtcttttcttaggaaacacgccgaaattatttttagctatttaatcggtatcgtttcactcttcactggtctcattattttaattaacttgccwttaattaaacaattaaatggtggtaaaaaagttgatacacatgttcataatgtgtgggaatttctgaatgcatttttcagtgaaattattaaagtaatgagtcgatttataggtaatttccctatagttagtgcaattgtgataattatattcggtattttagttatgttgattggtcatacattacttagaactattaagtatgactatgatatttctatctttttcttagttatcggtatcatgtactttattattackcttatattaatgackcaagtwtatggattctttgcrgtrattttcattattccatttacaattcatatwggatatatcgtytataaagatgaattgaatcaggaaaatgtwaaaaatcattwcatgtggatwattgtragttatggtataagttayttaattacacaaattgcattgtatggcagaattgatgctaatgaaatagartcaattgatatcttaagtgtcaatgctttctttataattatgtggttacttggtcaaatggctatttggaatttcttgttcttgcgccgagctttacctttaacaaagcaagaattaggtgaagaggagccagaattatcaagaacaagtaaagggaatgtcacgaatcaaactaaaattcacttgaarcaactccaagataagactacagaatatgcacgtaagacaagaagaagtgtcgatttagataaaattagagctaaaagagataaattcaaaaagaaagttaatgatattatcgatattcaagargacgatattcctgattggatgagaaaaccgaaatgggttaaaccratgtatgtcgaactattttgtggtgtcgtcatctttttattcacatttttagaatttaataatcgtaatgcattatttgtatctggtgattggaaattatcacagacacaatatgttattgaatgggttacattaytaattctgytattcattattatcgcatatatcgctacaacgttaactttccacttgaaaggtaagttttattatttacaaytatttatggggagcattttattctttaaattgttaacggaattyataaatataatgattcatggactwytactttcagtgttcattacrccaacattactattaatgttattggcaatcatcatttcttattcgttacaattacgagagcgaccataa

SEQ ID NO: 2631 - DNA, 2004 bp, Staphylococcus aureus
atggctgatttatcgtctcgtgtgaacgagttacatgatttattaaatcaatacagttatgaatactatgtagaggataatccatctgtaccagatagtgaatatgacaaattacttcatgaactgattaaaatagaagaggagcatcctgagtwtaagactgtagattctccaacrgttagagttggyggtgaagcccaagcctctttcaawaaagtcaaccatgacacgccaatgttaagtttagggaatgcatttaatgaggatgatttgagaaaattcgaccaacgcatacgtgaacaaattggcaacgttgaatatatgtgcgaattaaaaattgatggcttagcagtatcattgaaatatgttgatggatacttcgttcaaggtttaacacgtggtgatggaacaacaggtgaagatattaccgaaaatttaaaaacaattcatgcgatacctttgaaaatgaaagaaccattaaatgtagaagttcgtggtgaagcatatatgccgagacgttcatttttacgattaaatgaagaaaaagaaaaaaatgatgagcagttatttgcaaatccaagaaacgcwgctgcgggrtcattaagacagttagattctaaattaacggcaaaacgaaagctaagcgtatttatatatagtgtcaatgatttcacygatttcaatgcgcgttcgcaaagtgaagcattagatgagttarataaattaggttttacaacgaataaaaatagagcgcgygtmaryratatcgatggygttttagartatattgaaaaatggacaagccaaagrgartcattrccwtaygatatygatggkattgtkatwaaggttaatgatttagatcarcaggaygaratgggattcacacaaaaatcwccwagatgggccattgcttataaattyccagctgaggaagtrgtaactaaattattagatattgaattaagtattggacgwacaggtgtagtcacacctactgctattttagaaccagtaaaagtagctggtacaactgtatcaagagcatcyttgcacaatgargatttaattcatgacagagatattcgaattggtgatagtgttgtagtgaaaaaagcaggtgacatcatacctgaagttgtacgtagtattccagaacgtagacctgaggatgctgtcacatatcatatgccaacccattgtccaagttgtggacatgaattagtacgtattgaaggcgaagtagcacttcgttgcattaatccaaaatgccaagcacaacttgttgaaggattrattcactttgtatcaagacaagccatgaatattgatggtttaggcactaaaattattcaacagctttatcaaagcgaattaattaaagatgttgctgatattttctatttaacagaagaagatttattacctttagayagaatggggcagaaaaaagttgataatttattagctgccattcaacaagcwaaggacaactctttagaaaatttattattyggtctaggtattaggcatttaggtgttaaagcgagccaagtgttagcagaaaaatatgaaacgatagatcgattactaacrgtaactgaagcggaattagtagaaattcatgatataggtgataaagtagcacaatctgtagttacttatttagaaaatgaagatattcgtgctttaattcaaaaattaaaagataaacatgttaatatgatttataaaggtatcaaaacatcagatattgaaggacatcctgaatttagtggtaaaacgatagtactgactggtaagctacatcaaatgacacgcaatgaagcatctaaatggcttgcatcacaaggtgctaaagttacaagtagcgttactaaaaatacagatgtcgttattgctggtgaagatgcaggttcaaaattaacaaaagcacaaagtttaggtattgaaatttggacagagcaacaatttgtagataagcaaaatgaattaaatagttag

SEQ ID NO: 2632 - DNA, 1173 bp, Staphylococcus aureus
atgaaaatagcaactctgaacaaaggcaaagaaacaaaatattttaatggatatcctttaattgaagaagaggatatctattcacaagatcatttaaaagaaggagatatttttcaaattgtgactgataaatcacaatatgtygcaacggcttatgttggtcgccaacataaaggattaggttgggttctaacatacgataaagctcaasaartcaacacagctttctttgtraaattgtttaatactgcattagcagaacgtgattattattttaatatagatggaacaaatgcttttagattatttaatgctgaaggtgatggwgttgggggattaacratcgacaattacgatggtcatttgttgattcaatggtactcaaaaggtatttataaatttaaatatgccattcttgaagcggttagaaargtatttgattataaatctatwtacgaaaaagtaagatttaaagacagcgaatatagtggtggttttgttgaaggmgatgcacctgagtttccaattgttatcgaagaaaacttcacattttataatgtagaccttgaagatggtttgatgacaggtatctttttagatcaaaaagaagtgcgcaagaaattaagggrtcaatatgccaaagaacgccatgttttaaacttatttagttatacaggtgctttttctgyaatagcagcaagtgaggcatcttcaacaacaagtgtagatttggctaatcgttctcgtagtttaactgaagaaaattttggattaaatgctattgatcctaaatcycaatatatttatgtcatggacacttttgatttctataaatatgctgcacgwcatggacatagttatgacacgatcgtgattgatccacctagctttgcrcgyaayaaaaaacgtayattttcagtgcaaaaagattatgacaaattaattamtggcgccttaaatatyttatcatctgaaggaacattattrttatgtacaaaygcaagtgtatatccattaaagcaatttaaaaatactattaaaaagackcttgaagagagtggcgttgattatgaattaactgaagttatgggwttaccaaaagattttaaaacrcatccacattataagccatctaaatatttaaaagctgtttttgtaaatattagacattaa

SEQ ID NO: 2633 - DNA, 2193 bp, Staphylococcus aureus
atgaatgcgttattaaatcatatgaatacagagcaaagtgaagctgtaaagacaacagaaggaccattgttaattatggcaggtgctggttcagggaagacacgtgttttaacacatagaattgcttatttattagacgaaaaagatgtctcaccatacaatgttttggctattacttttacaaataaagcwgcaagagaaatgaaagaacgtgttcaaaaattagtaggtgatcaagcagaagtkatttggatgtcaacattccactcaatgtgtgtkcgtattttacgtcgtgatgcagatcgaatwggtatagaacgcaattttacgataattgatcctacagaccaaaaatctgttattaaagacgtcttaaaaaatgaaaatattgatagtaaaaagtttgaaccwcgtatgtttatcggtgcgatcagtaatttgaaaaatgaacttaaaacacctgcagatgctcaaaaagaagccacagattatcactcgcaaatggtagcaacggtttatagtggatatcaacgccaattgtcrcgtaatgaagcgttagattttgatgaccttattatgacaacgattaacttatttgagcgtgtaccagaagttctagaatattatcagaacaaattccaatatattcatgtagatgagtatcaagatacyaataaagcacaatayacattagttaaattattagcaagtaagtttaaaaacttatgtgttgtaggtgactcagatcagtcaatttatggttggcgtggtgctgatattcaaaatatcttatcatttgaaaaagactayccagaagcgaatacaatctttttagagcaaaattatcgttcgacgaaaacgattttaaatgcggctaacgaagtgattaaaaataattctgaacgtaagccaaaaggactgtggactgcaaatacgaatggtgagaaaattcattactatgaagcaatgacrgaacgtgatgaagcggaatttgtaatacgagaaattatgaagcatcaacgtaatggtaagaaatatcaagatatggcaattttatatagaacraatgcacaatcacgtgtacttgaggaaacattcatgaaatctaatatgccatacacaatggttggtggccaaaagttctatgaccgtaaagaaatyaaagatttattaagttatttgcgtataattgccaatagtaatgatgacattagtttgcaacgtattattaatgttccaaaaagaggtgtaggtccttcatctgttgaaaaagttcaaaaytatgcacttcaaaacaatatcagtatgtttgatgcacttggagaagctgattttatcggattgtcaaaaaaggtgacacaagagtgtcttaatttttacgagttaatccaaagcttgataaaagaacaagaatttttagaaattcatgaaatagttgatgaagtattacaaaagtctggctaycgagaaatgcttgaacgtgaaaatacaytagaatctcgaagtagattagaaaacatcgatgaatttatgtcagtaccaaaagactatgaggaaaataccccattagaagaacagtcattaattaactttttaacggatttatcgttagtagctgatattgatgaggcagatactgaaaatggcgtaacactaatgacgatgcactcggctaagggccttgaatttccaatygtctttataatgggratggaagaatctttattcccacatattagagcgattaagagtgaagrtgatcaygaaatgcaagaagaacgtcgtatttgttatgtagcaatyacaagggctgaagaggtgttatayatcactcatgcgacatcaagaatgttatttggtcgccctcagtcraatatgccatcyagatttttaaaggaaattccagaatcactattagaaaatcattcaagtggcaaacgacaaacgatacaacctaaggcaaaaccttttgctaaacgyggatttagtcaacgaacaacgtcaacgaaaaaacaagtatygtcatctgattggaatgtaggtgacaaagtgatgcataaagcctggggagaaggcatggtgagtaatgtaaacgagaaaaatggctcaatcgaactagatattatctttaaatcacaagggccaaaacgtttgttagcgcaatttgcaccaattgaaaaaaaggaggattaa

SEQ ID NO: 2634 - DNA, 543 bp, Staphylococcus aureus
atgggattcaaaaayaatttaacatcaaatttaacaaataaaatyggtaattcagtytttaaaatagaaaatgttgacggaaaaggtgcaatgccaacgacgattcaagaattgagagaaagacgmsaacgtgctgaagcaattgtaaagagaaartctttaatgtcatcaacaatgagcgttgttccaattcckggwttagaytttggtgttgatttaaaattaatgaaagatattatcgaagatgtwaataaaatwtayggwttagatcataagcaagttaatagccttggggatgatgtgaaagaaagaattatgtctgcagcrgcaattcaaggtagtcaatttattggtaaaagaatttcaartgcatttttaaaaatwgtwattagagatgtagcwaaacgwactgcwgcwaaacaaacaaaatggtttcctgttgtaggacaagctgtgtctgcatctattagttactattttatgaataaaattggaaaagatcacattcaaaaatgcgaaaatgttattaaaaatgtcatgtag

SEQ ID NO: 2635 - DNA, 693 bp, Staphylococcus aureus
atgtatgacattaaaaaatggcgccatatttttaaattagacccagctaarcatatttcagatgatgatttagatgcgatttgtatgtctcaaacagatgcaattatgattggtggaactgatgacgttactgaagataatgtcattcatttaatgagcarrrtaagaagatacccattgcctttagtacttgaaatatcaaayatcgaaagtgtaatgcctggttttgatttttattttgtacctacagtactgaacagtacagatgttgyatttcacaatggtacattattagaagcgcttaaaacatatggacatagtatagattttgargaagtaatatttgaagggtatgtcgtgtgcaatgctgatagcaaagtggcaaaacataccaaagcaaatacagatttaacaacagaagatttagaagcatatgcccaaatggtcaatcatmtgtatcgattaccggttatgtatatagagtatagtggcatttatggcgacgtatcaaaggttcaagctgtctcagaacatctaacagaaacgcaacttttttatggtggcggtatttcctcagaacaacaagcgacagagatggcagctattgcagatacaattatcgtcggtgatattatttataaagatattaaaaaagctttaaaaacagtaaaaataaaggagtctagtaaatga

SEQ ID NO: 2636 - DNA, 1902 bp, Staphylococcus aureus
gtggcattaattatgagttttaatgagattatatttaaaaatttccgccaaaatttatcacattatgccatttatcttttttcgctaattacaagtgtagttttattttttagcttcgtagcactaaaatatacgcatagcattaacataactgagacatatcccattattaaagaaggatcgcaagtaggtagttactttctattttttatcattgttgcctttttgctatatgccaatgtactatttcttaaacgtcgtagttctgaacttgcattatatcaaacattaggtttatccaaattcaacattatatatatattgatgtttgaacaattattaatattttcaataacagctatattgggcattacgattggtatctttggttctaaaattttattaatgatagtgtttactttattaggtatcaaagaaaaggttccaattattttcagctttagagcagtgtttgagacactattattaattggcgttgcttatttcctaactgcagctcaaaatcttatcttagtattgaaacaatctatttcagaactatcaaagcataatcaggctaagcaaatgaatcataataaaattacatttgaagaagttatactaggaattctaggtattattttaatcatcagtgggtattactactctttacgcattgtacattactatgatgcaattggcgtccttatgtttatattgtttgcgacagtaattggggcgtatttattttttaaaagttcagtatccttggtatttaaaattattaaaagctttaaaaaaggtgtaataagtgtaaatgatgtcatgttttcttcatctattatgtatcgtattcagaaaaatgcattttcacttactgttatggcaattatttcagctattactttatcagtactttgttttgctgctatcagtagagcaactttattaagtgaaattaagtatacgtcacctcatgatgttacgattaaagatcaacagaaagcgaatcagttagcaagtgaattgaacaaccgaaaaattcctcatttttataattataaagaagtgattcatacaaaactttataaggatgacttatttgatataaaagcaaaggaaccatataacgtaacaattactagtgacaaatatattcctaatacggatttgaaacgtggtcaggctgatttatttgtagcggaaggcgctattaaagatttagtgaagcataagaaacatggtaaggcagtaataggaacgaaaaagcaccatgtggatattaaattacgtaaagatatcaataaaatttactttatgactgatgttgacttaggtggaccgacgtttgtgttaaacgatcaagattatcaagagataagaaagtatactaagccaaaacacattgtttctcaatttggatttgatttaaaacataaaaaagaaatgttagcattggaaaaagcaacaaataaagttgacaaatctattgaaacaagaagtgaagccataagttcgatatcgagtttaacgggaatattgttatttgtaacctcatttttaggaattagtttcctaattgccgtatgttgtatcatatacattaaacaaatagatgaaactgaagacgagttagaaaattatagtattcttagaaaacttggatttacacaaaaagatatggcaaaaggattaaaatttaaaattgcgtttaattttgggttaccattagtcattgcactttcacatgcatactttacatcattagcatatatgaaattgatggggacaacgaatcaaataccgatatttatagtaatgggactatatatttgtatgtatgccatttttgcaatgacagcttataatcattctaagcgtacaatcagacattcaatttaa

SEQ ID NO: 2637 - DNA, 267 bp, Staphylococcus aureus
atggaacaaaattcatatgtaatcatcgacgagactggtattcacgctagaccagcaacaatgttagtwcaaacagcttcaaaattcgattctgatatycaattagaatataacggtaaraargtwaacttaaaatcaatcatgggtgttatgagccttggtgttggtaaagatgctgaaattacaatttatgctgacggtagtgatgaatctgacgccattcaagcaatcagtgaygtcttatcaaaagaaggattgactaaataa

SEQ ID NO: 2638 - DNA, 303 bp, Staphylococcus aureus
atgcaaattgaaaaattacgaggtgcagcgttagatgaattgtttgatgcaatactaacgttagaaaatagagaagaatgttaccaatttttcgatgatttgtgtactgtaaatgaaattcaatcactgtctcaamgattacaagttgctaaaatgattaagcaaggttatacctatgcaacgattgaacaagaatctggagcatcgactgcaacgatttctagagtgaarcgttcattacaatggggtaatgatgcttatacaatgattttagatcgtatgaatattgaaacaaatgaataa

SEQ ID NO: 2639 - DNA, 1719 bp, Staphylococcus aureus
atgtctaaattaattaaaggwattgcygcatctgatggtgtygcaattgctaaagcttatttrttagttgagccagacttaacattcgacaaaaatgaaaaagtcactgatgttgaaggagaagttgcwaagttcaatarcgctatcgaagcttctaaagttgagttaactaaaattagaaataatgcagaggttcaaytaggtgctgataaagctgctatctttgatgcacatttattagttttagatgaccctgaattaattcaaccaatycaagataagattaaaaatgaaaacgctaatgctgctwcagcattaacrgatgtaacaacacaatttgttacratttttgaatctatggataaygaatacatgaaagaacgtgcggctgatattcgcgacgtttctaaacgtgtgttatcacatattttaggtgtagaattaccgaatccgagtatgattgatgaaagcgttgttattgtagggaatgacttaacgccatcwgatactgctcaattaaataaagaattcgtacaaggttttgctacaaacattggcggaagaacaagtcactctgcrattatgagtcgttctttagaaattccagcaattgttggtacaaaatcaattactcaagaagytaaacaaggcgacatkattatcgtagatggattaaatggtgatgtaatcgttaatccaactgaagatgagttaatcgcttatcaagataaacgtgagygttattttgctgacaagaaagaattacaaaaactacgtgatgctgatactgttacagttgatggtgttcacgcagagcttgctgcaaatattggtacacctaatgatttgccaggtgttattgaaaatggtgcacaaggtatcggcttatatagaactgagtttttatatatgggtcgtgaccaaatgcctacagaagaagaacaatttgaagcttataaagaagtattagaagcaatggrcggtaaacgtgttgttgtacgtactttagatataggtggagataaagaattatcatacttaaacttgcctgaagaaatgaatccattcttaggttaccgtgcgattcgtttatgccttgcgcaacaagatattttcagaccacagctacgtgcattattacgtgcatcagtttatggtaagttaaatatcatgttcccaatggttgcaacaattaacgaatttagagaagcwaaagctatattattagaagaaaaagaaaaccttaaaaatgaaggtcatgacatttcrgatgatatagaattaggaatcatggtagagatacctgcaacagcagcattagctgatgtctttgctaaagaagtagatttcttcagtatcggtacaaatgatttaattcaatacacattagctgctgaccgtatgtcagagcgtgtatcatatctataccaaccatataayccttcaatcttacgtttagttaaacaagttattgaagcgtcacataaagaaggtaaatggacaggtatgtgtggtgaaatggctggagatgaaacagctattccattattgcttggtttaggtttagatgagttctctatgagtgcaacgtctattctgaaagcaagaagacaaattaatggtttaagtaaaaatgaaatgactgaacttgctaaccgtgcagtcgactgygcaacgcaagaagaagttattgaattagttaacaactacgtaaaataa

SEQ ID NO: 2640 - DNA, 1296 bp, Staphylococcus aureus
atgattgaacgytattctagagaagaaatgtctaatatttggactgatcaaaatcgctatgaagcatggttagaagtggaaattttagcatgtgargcatggagtgaattaggacatataccgaaagctgacgtacaaaaaattcgtcaaaacgcaaaggtaaatgtcgaacgtgcacaagaaattgaacaagaaacgcgccatgatgttgtagcctttactagacaagtttctgaaacgctaggtgaagaacgtaagtgggtacattatggtttaacttctactgatgttgtagatacagctttaagtttcgttattaaacaagcaaatgacattattgaaaaagatttagaaagatttatcgacgttttagctgaaaaagcaaaaaattataaatatacattgatgatgggacgtacacatggagtgcatgcagaaccaactacatttggtgtcaaaatggcattgtggtacacggaaatgcaacgtaacttacaacgtttcaaacaagtaagagaagaaattgaagtagggaaaatgagtggtgcagtaggtacttttgctaacattcctcctgaaatagaaagttatgtgtgtaaacatttaggtattggcacagcgcctgtatcaacgcaaacattgcaacgcgatcgacatgcatactatattgcgacattagcattaatcgcracdtcactagaaaaatttgccgttgaaatwcgtaaccttcaaaaaacygaaacragagaagttgaagaagcatttgcaaaaggycaaaaaggttcatctgcaatgcctcataaacgaaatccaattggttctgaaaatatcacaggtatttcaagagtmattcgtggttatattactacagcttatgagaatgtgccattatggcatgaaagagatatttctcattcttcwgctgagcgtattatgttaccagatgttacaatagcactagattatgcattgaatcgtttcacraatattgtggaccgtttaactgtatttgaagataatatgcgtaataacatwgataaaacatttggtctgattttctcacaacgtgtcttattagcattaattaataaaggtatggtycgtgaagaagcatacgacaaagtacaaccaaaagcgatgatatcttgggaaacgaaaacacckttccgtgaattaatcgaacaagatgagtctattacaagtgttttaacaaaagaagaattrgatgaatgtttcgatcctaaacatcatttgaatcaagttgacactattttcgaacgcgctggattagcataa

SEQ ID NO: 2641 - DNA, 684 bp, Staphylococcus aureus
gtgcagaggatgaattatttcagatataagcaatttgacaaagatgtcattactgtagccgttggctactatctaagatatgcattaagttatcgtgatatatctgaaatattgagagaacgaggcatctatgttcatcattcaacaatttatcgatgggtacaggaatatgctcctattttgtatcaaatttggaagaaaaagaataagcaagcttattataaatggcatatagatgagacgtatatcaaaattaaagggcaatggaattatttatatcgcgctattgatgcagatggccatacactagatatttcgttacgtaagaaacgagataatcactcagcatatacgtttattaaacgtcttattaaacaatttggcaaacctcaaatgataattacagaccaagccccttcaacgaaggtggcaatgtccaaagtgattaaagattttaaacttacccccaactgtcattgtacctctaaatatttaaataatctcattgaacaagatcatcgtcatatcaaagtaaggaaaataagttatcaaagtatcaatacggcaaagaatacgatcaaaggcattgaatgtatttatggactatataaaaagaaccgcagatctcttcagatctacgggttttcgccatgccgtgtaattagcatcatgctagctagttaa

SEQ ID NO: 2642 - DNA, 165 bp, Staphylococcus aureus
gtgtctatgcgtagacatggagacacttcagaattatggagtgattacatgagtttaactatttttctttattcagttttaggaagtttattagcaaattatatctacgaaaaatcttcgaaaagaagttcagctcatgataacgagtttacctatgatgaatga

SEQ ID NO: 2643 - DNA, 315 bp, Staphylococcus aureus
atgtcttataaagaactatcaacaatattaaaaattttatcagattcaagtaggttagaaatattagatttactttcttgtggtgagctatgcgcttgtgacttattagaacactttcaattctcacaacctacactaagtcatcatatgaagtcattagtagataatgaattagttacaacacgaaaagacggcaataaacattggtatcaacttaatcatgctattttagatgatattatccaaaacttgaacatcattaatacatctaatcaaagatgtgtatgtaaaaatgtggaatcaggtgactgttga

SEQ ID NO: 2644 - DNA, 1296 bp, Staphylococcus aureus
ctgttgatgactattttagcaattgtaatttttcttttaactttaacctttgtgatttggcaaccaaaaggtttagatattggtattacagctttaattggagctgttgttgctatcattacaggagtcgtaagtctttctgatgtattagaagtaacaggtattgtttggaatgcaactttaacttttgtggctgttattcttatttcattaatattagatgaaattggtttttttgaatggtctgcgatacatatggtcaaggcttcaaacggtaatggcttaaaaatgtttgtttttattatgttacttggagcaattgtagcagcatttttcgcaaatgatggtgcagctttaatcttaacgcctattgtattagcgatggtaaggaatctaggatttaatcaaaaagtgatttccccctttattattgccagtggttttattgctgatactacatcacttcccttaattgtaagtaacttagttaatatcgtttctgcagattacttcgatattggatttattgaatattttagccgaatgatcattcctaatatattctctctgattgctagtattctcgttttatggttatatttcagaaaatccatacctaaaacgttcgatacagaaaatctatcagatcctaaaagtgcaattaaagattctaagttatttaagctttcatggatagtattagcagtactactcgttggatatcttgttagcgagtttatccaaattcctgtatcaattattgctggtattattgcttttatctttgtaatattagctcgtaaatctaaagcagttcatacaaaacaagtgattaaaggtgcaccatggaatatcgttgtattctctattggtatgtatcttgttgtgtttggactaaaaaatgtaggtattacaacggtccttggggatgttttaacaaacatttcaaattatgggttatttagcagcatcatgggtatcggctttatagctgctttcttatcttcgattatgaacaacatgccaactgttttaatagatgcaatagcgattggccaatccagtgctacaggaatattaaaagaaggcatggtttatgcgaatgtcataggttctgatttaggacctaaaattacgccaattggttctttagcaacattattgtggctacatgtcttaacacaaaaaggtgtgaagatttcgtggggaacatactttaaaactggaattatcatcactattccagtcctatttgtaacactcttaggtttataccttacactaatcatattttaa

SEQ ID NO: 2645 - DNA, 396 bp, Staphylococcus aureus
atggataagaaaacaatttattttatatgtacaggaaactcttgtcgtagccaaatggctgaaggttggggaaaggaaatattgggtgaaggttggaatgtctattctgctggtattgaaacacatggtgttaatcctaaagcaatagaagctatgaaagaagtagatattgatatatcaaaccatacgtcagacttgattgataatgatattttaaaacaatcagatttggtcgtaacgttatgtagtgatgcagacaataattgtcctattttaccaccaaacgttaaaaaagagcattggggttttgatgatccagcaggtaaagaatggtcagaattccaacgtgttagagacgagattaaattagctatagaaaagtttaaattgagataa

SEQ ID NO: 2646 - DNA, 294 bp, Staphylococcus aureus
atgaaaaagaaatttgtttctagttgtattgctagtacaatcttattcggcactttattaggtgtaacttataaagctgaagctgcaacagtacatgtagctggtggtgtttggagccatggtattggaaaacattacgtatggtcttattatagtcacaataaaagaaatcatggttcaacagcagtagggaaatattcatcttttagtggtgttgctcgacctggtgttcaatctaaggcatctgctccaaaggcttggggtggaaacaaaacattttatagtcttcactaa

SEQ ID NO: 2647 - DNA, 1935 bp, Staphylococcus aureus
atgaaaaaattcaaattatttttagattttagtactttattattaatttcagggctattatttttatttttcttcaaagaaaatgaagaaattatacctgaaagttccaatattttaacaatctctaattgggataaatctaacagtaaatcaaaagtgttagatgtcattgaatcaggcgccaaaaatcaaaatatacaaataattaaatccgttaaagattttgataataaaaaagaattttttgttttcaactcaaaacgaaataattctgactttatacgtaataaaacatcacttttaactccatcagatttattaaacagagagataaaaggaaagtattatattattggtgaacatttcaatgtagaagagcttacgagtgaattaaaaaaagctggtttaacatctgaagttgaatacataaatagaaacatattattttttgaattagtcatagataatgatttattagtgcctttcatattcttaggcgtattatatcttttgtacttcttatatgacagaggatataatttgaaattttatgctattcaaaagctacatggcttttcaactacacgcattatttttcataatattcatataaaaatcatttattggctagtacttaccrctattttctttattgctaatatattaatcattcatatagccaatttagaattggatttcttaatgtttattcgtagatttatcgtgttgctttttgtttttgcttgtattactacattgytgtggctgatttcgtatagtcttcttttgaagttaagtattccattaaycttaaaagggaaaaaaggatataagttttcaatatttatgggtaccttcaccaaatgtatcatggtgctaatactatcttttttactggcacaaaatttaaatgcttatacgaagttaaagaatatatatgactctgaaaaaatctggcaaaagttagataattactatacattagagatttctcctaatattagaaattcagaagaaaaacaaattttagaaactaatatatacaatttaattaagaaaagcgaacaacttggtggattgcttttaaagaataataatatagccaatcccgataaaaacaattacattcctgaaaatggcaatgtcttttttatcaataacaattttctgaatttctataaaaatataaatcatgattttaaaatgattgwcaatcattcggataaaataaacgtgtttattcctccaaggttacaatatcaaaaatctgaaattcaaaaaaatcaccaaggatggattgactttcaaaagcaacaaaacaaaaaagtagatgtgcaagtactgtcaaaaaacgtatctgttttttcttttgatcgcacaactaatttgaaatttggrtatctagattctccaatagtaatgttgttgacacytgacgatttaacaggagatttttatttagctgctgtttctcaaggtggatatctatttaaagatttagatacacttaaacagttgcttaaagataatcacctagaagaagaaattagcggtataactaattacaaggattctgtgttaaatgaattaaatgaaacgaaaacaaaaatgataataacaatagttactattattattaacgttttcattcttttgatagctactgtatttgaaacaattcaatattttagctggaataaaaagcaactattattaagaaaaattcatggttattcattattcagcagtaatgtacgttatttaacaatttctatyttactttctattatgttagcttacactacgcatattttatttggttcaaagatattactattcataataatgtctattgctattattcaacatttacttcaaattgcttatattaaatatcttgaaaaatactttaaagatttaatgagggagatttaa

SEQ ID NO: 2648 - DNA, 1362 bp, Staphylococcus aureus
atggatacagttgaaatcagtcggtttttgacagctatgactttagcagttcatatcatttttgcaacgattggtgttggtatgcctttaatgttcgcaattgcagaatttttaggtattcgcaaaaatgatcttcaatatatagctatggccaaaagatgggctaaagcttatacaattactgtagcagtgggagttgttacaggtacaattataggacttcaattatcattgatttggcctacatttatggaaatgggtggacacgttattgcacttccattatttatggaaacatttgcgttcttctttgaagctattttcttaagtatatatttatatacttgggaycgttttaaaaataaatggacacatttcttaattagtataccagtaattattggtggctctttctcagcmttcttcattacttcagtgaattcatttatgaatacgcctgcaggttttgagttgaagaatggaaagatggtcaatgttcaacctatagaagcgatgtttaacccatcgtttatagttcgatcatttcacgtaattactacagccggtatgacgatggcatttgttattgcatcaatagcagcttttaaattattgcgtaatcgtcaacctaargatactgtctaccataagaaagctttgaaaatgtctatgatwgttggattcttttcaacwttactttctatgttggcaggggatttatctgcaaaatttttgcataaattccaacctgaaaaattagcagcttatgaatggcatttcgatacatcttcccatgcyaaattattattatttggtgtgttagatgaaaagactcagcaagttaaaggtgcgattgaattacctggactattgagtttcttagcagataatagtgtcaaaactaaagtrcaagggttaaatgattttccraaaagtttacatccgcctatgatygtccattatttctttgatttaatggtaacgatgggaattttatgttttgtcatttcaggtgtttatgtyttaactttaatgtttaaaaagcttagaaakttttctactcataaatggatgctttayggaatattattaacaggmccagcttcaatgctagctatagaatttggatggttcttaacagagatgggtagacagccttggattgttcgtggttatatgcgcgtggcakaagcagcaacacaagcaggcggaataaccttygttacaattttatttggcatattgtacaycattttaatgtatacatgtgcatacgtattaattcgtatgtttaaaaataaaccggcgtatgaagatgtaaatcgtttagccaagaagcaaggaggagaaatagaaaaatga

SEQ ID NO: 2649 - DNA, 174 bp, Staphylococcus aureus
atgaaattcaaagtaaatgagaaygaaacaattgcwgattgtttgtcacgaatgaaaatgcaagggtatatgccggtaaaacgtattgaaaaacccgtgtttcargagcaaaaagatggcacggttgaagtatcacatcaagaaatcrtttttgtaggtaagaaaatccaataa

SEQ ID NO: 2650 - DNA, 312 bp, Staphylococcus aureus
atgaaaagaactttaattattgtaacaattgtactattaatcatcatacttagtctgttattggttagaaatgagcatttagatcgttttaacccactgttaaaagaaaaagtatcttatgccaaagttccaaaagatacccaggactatagaaatataactgtatactctaaaaatggagaaaaaaagagttataaattggattttttaggttatgatcctacaaaagaatatgtgaaagtaaatcataaagggaaatatgtgcgttcgatagaatacattacaaaagatattcctagctttttaaaatga

SEQ ID NO: 2651 - DNA, 627 bp, Staphylococcus aureus
gtgataaaacttgaaaatgtttttgtaaaaaaaggtaataaaaacattttagacggatgtaactttaattttgaaaaaggaaaatcatatgctttagttggagaaagtggcgctggaaaatctactttacttaacataatcgcygggttcgaagatgtatcacaaggaagcatatatattgaagataagttactaaaaaagaaagtcgatttttatagatatacgttagggtatttgtttcaaaattttgctttacttgaaaatcaaacaatcagtcaaaatttagrtttagccctaaagttcaaaaagaataaaaaagataatatgaacttaaagaaagaagtattaaaaaaggtcggcctagatttagatatcaagagaattgttagttctctaagcggtggtgaacaacaaagagtagcattggcaagattaatattaaaagatccgaaaatcattttagctgatgaacctactggrtcactagatacgaaaaatggaaaaatagttattgatttattattgaagctacttgatgaaaataaaactatgattgtcgtaacgcatgatttagagcttgcgaaacgatttgatgtcatagtcaatatttctgagcttagaagttaa

SEQ ID NO: 2652 - DNA, 555 bp, Staphylococcus aureus
ctgagtgtcatgtatgaaattaaaactaaaaatgtaggtggatggtttcataaagagaagcaagaaacaggcaatattgtaattactaaaactkattttgaaaaatacactaaacaaattaaagcagcacagatgatattagatgattatgaatgkattaaaagtgggaagtcattaaaaaaakcagagaaacaaaatgaaagtttagttaatgaattgactagtgtccatatggaaaatgaaaagctggttgaagaatttaatgatttagcacaacgttataattatttgttgtcagagaatgaaaagaaagataaagaactaaattatacgcttaagttattcaatcaagtttttaaaatcattaaaagtatgatgaaagaagagcgttatcatacrctaataaatcatattgataatcatttagacaattctaaaatacgtgaagtaatgacgatagataacaatgatgaacagttctttaagaagaaatatcaagcacaagaaygagaaatcatttttaaagaagatagagaagatggttatacattataa

SEQ ID NO: 2653 - DNA, 861 bp, Staphylococcus aureus
atgacaggagagacagttgtatataaaaatgaaatgaatttagttccattaaggcgatttacagctactgaaattaatttattttttgcgatgtgtaataaattaaaagagcaagatactaatacattacgtttgtcttttgatgaattaaaaaaattaagtaattatagtccagaaacacgtaatattaatagatttgctaatgatttagataatgtgtataaaaagatgttgaatttaaccattagatatgaagatgatgatgtaatagaaagattcgttttattcaatcattatagaatccataagcgagaacaatatctagaaatatcaacttcttcaaatttaaaacacatattgaattcaattactaataattttacaaaatttgaattaaaagaaatgactaggcttaaatctacatattctaaaaatatgtttagattacttaaacaatacaaacatacaggctatttaaaaattcacatcgatgattttaaaaatcgtttagatatacctaaatcttatcgtatgactgatattaacaaaaatgtttttaaacctattattattgaattaggttctatatttaataatcttactatcaataaaatcaaagcgaaaaaagggcgtaaaattgaatggatagagttcacatttgacgctgagaaacgcattcataacaaacgacaacctcaaatgtccaagatagataaatcaagacaatatgtgaggcgtgaaaagacgcctaaatggttagaagaacggtcatatgaaaagcaacctcaaaaagattacgacccacaattagagaaagaacgagaggattttttaaaacaacttgaactgaattgggaataa

SEQ ID NO: 2654 - DNA, 342 bp, Staphylococcus aureus
atgaaattagctgaagctataaaagaacagagagaattaaaargatggtctcaagaggaattagccaatatattaaaggtttccagacaaagtgtttctaaatgggaaagtgccaaaaactatccttccttagatattttgattgctatgagcgatttattyggaatctctttagagcatttaattaaaggagatgcacgttttaaaaaagttattttagagggaaattatagagagagtaacagggyaccttccatagttgattttctttatgatttttggtggcttttctttcctgttgccggatttttagtttgggccattcattcgttcatgggttga

SEQ ID NO: 2655 - DNA, 1020 bp, Staphylococcus aureus
atgatttatgcatttataggtataacagtgttatggttgtttttattttgctatatcattattgcttctatagattttggggcaggtttcttcgcattgcattcaaagttaactggtgatgaaaagaaaattaatcacttaatttcacgttatttraacccagtttgggaagttacgaatgtattctttgttttcttcttcgtaggattcgtaggtttctttccagagtcaatcaaatatttaggcacggtattgttartaccaggttcaatagcactgattatgatatcrttgagaaacagtttttatgcatttgaaaattatggtcaagatacaaaattagcatggatgatcatgtatggggtaagtggattrttaattccagcttcattatctactgctttaactattacagaaggtggytatattaatgttcgaaacaatgttatcgatctagattgggtgcagttaytrttaagcccatttgcttggtctgtagtattcttggcaattatttcagttttatatatttcatcaggatttttgacatattatgctaaaaaagcaaatgacgaaccagcatataatttaacaagacaatggcacatatttttagggccrccgatgattatcatttgtttattcgtatttctatcattacgcattcaaaattctgaacatttttattcagctgtttttgactaytggtggatgtttgstataagtttcytattctttgcattagcttcattgttaacattctttaagaaaaaacatggtttggcttttgtatttgttattttacaaatgatgttcgcgttctttggctatggaattagtaaattgccataccttttatatccgtttgtaaaaattacagatgcatatgttaatccagaaatgggctggacattagtgattgtctttattttaggtttacttttattacttccatcgttaatattattattaagattatttgttttcgacaaagaatatgttgaaggaaagaaatcataa

SEQ ID NO: 2656 - DNA, 603 bp, Staphylococcus aureus
atgtcattcgtaacagaaaatccatggttaatggtactaactatatttatcattaacgtttgttatgtaacgtttttaacgatgcgaacaattttaacgttgaaaggttatcgttatattgctgcatcagttagttttttagaagtattagtttatatcgttggtttaggtttggttatgtctaatttagaccatattcaaaatattattgcctacgcatttggtttttcaataggtatcattgttggtatgaaaatagaagaaaaactggcattaggttatacagttgtaaatgtaacttcagcagaatatgagttagatttaccgaatgaacttcgaaatttaggatatggcgttacgcactatgctgcrtttggtagagatggtagtcgtatggtgatgcaaattttaacaccaagaaaatatgaacgtaaattgatggatacgataaaaaatttagatccgaaagcatttatcattgcgtatgaacctcgaaacatacatggtggattctggactaaaggcattcgtcgtagaaagcttaaagaytatgaaccagaagaactggaaagtgtagtagaacatgaaattcaaagtaaatga

SEQ ID NO: 2657 - DNA, 996 bp, Staphylococcus aureus
gtgaagtccttaaaaagcaaagcctttatttatggtttattattcacatttatcatcgcagttataagtttattaggctcaaagttaccatttttagataagataggtgctttaacaattgctatactgattgcgattctatatagacattttaagggttaccctgaagcatatcgttcaggaatcgcattttcgtctaaacggttactgaaattagctattatattatatggattaaagttaaatatttatgatgtaattggaaaaggtagcgatttggtattaatcgatattggagtcatcctttttagtatcggattaatgttgttactaaataaatatattaaaggagataaaaacctcatcctattattaggtattggcactggggtgtgtggcgcggcagctattgcagcagtatctccaatattaaaatctagagaaaaagattctgcgattagtattggtattgtcgcacttattggcactatattttcgcttgcatatactgtaatatattctatttttacaatatctcctgaagtatttggggtctggtcaggtacaagtttacatgaaattgcacatgtaattcttgcttcagacttctcaggccaagaggctttgagtatgggactgttaggaaaactgggacgtgtgtttttattaatacctctgagtattattttaattttaattatgagaaaaaaatcgcatagtgagaatgaaaaaaagcgtattgatgtaccttactttttacttggttttgtcatgatggcattattccatacttatgtatccttgccacacatggttatgcaaattatagataatatcactactatatgcttattgatggcaatggttgcattagggttaaatgtttcatttaaagacttaaaagatcgtgctttcaaaccattaatagctgtcattattgtatctatttgtttatcaactgtgacatttattgttgctaagtacttttatagttag

SEQ ID NO: 2658 - DNA, 2130 bp, Staphylococcus aureus
atggtatatacccctatcccgtatatgttacactcaaattgtcttattactatctttaaaaatataaaattaggaggtttaattttgtcgaataacaaaaaacaccaaaatcatgagcatcatagtcatcaagaacatgaaaatcacactagtcatggtaatcatgaacatcaccatcatggaaattttaaaagtaaattctttatttctttgatttttgcgataccgattattattttatcgcccatgatgggagttaaattaccgtttcaaatttcatttacagggtcagattggattgtattaattcttgctacaattttattcttttacggaggaaagccatttttatcaggggctaaagatgaaatttcaactaaaaaacctggaatgatgacgcttgttgctctaggtatttcagtagcttatatttatagtttatacgccttttatatgaataacttcagtggttcatccacacatacaatggactttttctgggaattagcgactttaattttaatcatgttattaggtcattggattgaaatgaacgcagtaggtaatgcaggcaatgcactgaagaaaatggcagaacttttacctaatactgcagtgaagctgattgataacaatcaacgagaagaagttaaaatatcagatattcatattgacgatattgtggaagtcagagcaggcgaaagtatacccacagacggaatcattgttcgaggagaaacatcaattgacgaatcattagttactggcgaatcaaaaaaagttcataaaactcataatgatgatgttattggaggttcaattaatggttcaggtacagtacaagttaaagtgactgctacgggtgaaaatggctacctatctcaagttatgggtcttgttaaccaagctcaaaacgataagtcaaaagctgaactcctctctgataaagtcgcaggttatttgttttactttgcagtaagtattggcctgatttcatttatcgtatggatgcttattcaaaacaacgtcgatttcgcacttgaacggctagtaaccgtattagtcattgcttgtccacatgcattaggcttggcaatacctttagttacagcacgttctacctctataggcgcacataatggtttaatcattaaaaacagagaatctgtagaaatcgcacaacatattgattacatcatgatggataaaactgggacactaactgaaggtaacttttcagtgaatcactatgaaagttttacagacgagttaaataatgaagaaatattgagtctatttgcttcattagaaagtaattctaatcatccacttgccactggtattgttgattttgctaaaggcaaaaatatttcatatgctactcctcaagaagttaataatattccaggtgtaggcttagaaggcacagttgataataaaaaactcaaaatagtgaatgtttcttatctcgataaaagcaattttgattataataaagaacaatttacgaatctcgctcaacaagggaattctattagttatctaattcatgaccgacaagttattggtattatcgcacaaggcgataaaattaaagaaagttcaaaacaaatggtttcggatttattatcgagaaacattacgccagtcatgcttacaggcgataataaagaagtggcacaaacagtggctgaagaattaggtattagtgatgtccacgcgcaattgatgcccgaagataaagaaagtattatccaagattatcaaagcaatggtagcaaaatcatgatggttggtgatggtatcaatgatgcgccaagccttattagagcagatattggtatggcaattggcgcagggacagatgtagctattgaatcgggggatgtcatactcgttaaaagtaatccttctgatattatcaattttttgtccctttcaaaaaatacgatgaaaaaaatggttcaaaatttatggtggggcgcaggatataacgtgattgcagttcctcttgcagctggtatattagcttctattggtttaatattatcacctgctgtgggtgcaatacttatgtctttaagtacgatcatcgtagcaattaatgcatttacattaaaattaaaataa

SEQ ID NO: 2659 - DNA, 1434 bp, Staphylococcus aureus
atgtataaaaaaatgttcacaattttaattacgttattttctataatgtttatggttcctaatgatacttttgcagaaggtaagcacaacatgatggacatgaaagaaaatgatcaaaagcgaaatgatatgatggatatgaaaagtcatgacgaaagaaaaaatttgaattcttcacaaggaaaaaatgaaataacatttcccaaagttttagatcctaaaaaagataacaatggttataaaagttatacattaaaagcgcagaaaggaaagacagaattttacaaaggtaatttctctaacactttaggatacaatggaaatttacttgggccaactttaaaattaaaaaaaggagataaggttaaaattaagttagtcaacaacttagatgaaaatacaacatttcattggcatgggttagaaatagatggaaaagtggatggaggcccttctcaagttataaaaccaggaaaagaaaaaacaataaaatttgaggttaaacaagaggctgctacattatggtatcatccccacccctccccaaatacagctaaacaagtttataatggtttatcagggttattatatatagaggatgacaaaaagaataattatcctagcaattatgggaaaaatgatttgcctataataatccaagataaaacatttgtatctaaaaagttaaattatacaaaaacgaaagatgaagatggtactcaaggtgatacagtccttgtgaatgggaaagtagatcctaaattaacaacaaaagaaggaaaaatacgtttgagacttttaaatggctccaatgctcgggatttaaatcttaagctaagtaataatcaaagttttgaatatattgcttcagaaggcggccatttagaaaagactaaaaagttaaaagaaattaatttagctccttcagcaagaaaagaaatagtaatagatttatctaaaatgaaagaagaaaaagtcaatcttgttgataatgatgaaacagtaattttaccaattattaacaaagaaaaaagtactaacaaagacactactccaaaagtagataaaaaaatcaaattagaaggtatggacgataatgttactattaatggcaaaaaattcgatcctaacagaatagatttcacacaaaaggtaaaccgtaaagaaacttgggaaattgaaaacgtcaaagataaaatgagtggtatgaagcacccgttccatatccacggaacgcaatttaaagttttatcagtggatgggaagaaaccttcagaagatatgagaggcaaaaaagacgttatatctctggaacctggacaaaaagccaaaatagaagtggtttttaaaaatactgggacatacatgttccattgtcacatacttgagcatgaagataatggaatgatgggacaaataaaagtaacaaaataa

SEQ ID NO: 2660 - DNA, 663 bp, Staphylococcus aureus
atgggtaaagaatatgtagtcatcggtctaggtcgttttggaggtagtatcgttcgtgagttgaatgcattagacatggatgtaatggccatcgaccatgatgaaaatagagtgaatgaatatagtgatatcgctactcatgcggttgttgcagayacwacagatgaagcagttatgaaaagtttaggtatccgtaactttgatcatgtcattgtggcaattggtgaaaatattcaatcaagtacgttgacgactttrattttaaaagagttaggtgtaaaaaaagtaactgctaaagcacaaaatgattatcatgcaaagattttaaataaaattggagcagatacggttgtgcaccctgagcgtgatatgggtagacgtattgcgcataatgttgcgagtgcaagtgtacttgattatcttgagttggcagacgagcattctattgtagaattgaaagcractgaaaagatggcggggcagtctatcattgatttagatataagagcacaatatggaattaacattattgcaattaaacgaggcaaagagttcatcatttcaccaaatccaaatattaatttagaaataggtgatattttaatyatgattggacatgataatgatttaaatcgctttgaaaaaaatattgcgacgagataa

SEQ ID NO: 2661 - DNA, 822 bp, Staphylococcus aureus
atgagtaaattacaagacgttattgtacaagaaatgaaagtgaaaaagcgtatcgayagtgckgaagaaattrykgarttaaarcaatttataaaaarttatgtmcaatcacattcatttataaaatctttagtgttaggtatttcaggaggacargattctacattagttggaaaaytagtrcaaatgtctgttaacgaattacgtgaagaaggcattgattgtacgtttattgcagttaaattaccttatggagttcaaaaagatgctgatgaagttgascaagctttrcrattcattgarccagatgaaatagtaacagtcaatattaagcctgcagttgatcaaagtgtgcaatcattraaagaagcyggkattgtyctwacagayttccaaaaaggwaatgaaaargckcgygaacgtatgaaagtacaattttcaattgcttcaaaccgacaaggtatygtagtwggmacwgatcattcwgcwgaaaatataactggkttttatacgaartayggtgatggtgctgcagatatygcacctatattyggtttgaataarcgmcaaggtcgtcarttattagcktatcttggtgcrccaaarsaattrtatgaaaaaacrccaactgctgatttagaagatgayaaaccacagcttccagatgaagatgcattaggtgtaacttatgaggcgattgataattatttagaaggtaagccagttacgccagaagaacaaaaagtaattgaaaatcattatatacgraatgcacacaaacgtgaacttgcatatacaagatacacgtggccaaaatcctaa

SEQ ID NO: 2662 - DNA, 627 bp, Staphylococcus aureus
atgaaatttggaaaaacaatcgcagtagtattagcatctagtgtcttgcttgcaggatgtactacggataaaaaagaaattaaggcatatttaaagcaagtggataaaattaaagaygatgaagaaccaattaaaactgttggtaagaaaattgctgaattagatgagaaaaagaaaaaattaactgaagatgtcaatagtaaagatacagcagttcgcggtaaagcagtaaargayttaattaaaaatgccgatgatcgtctaaaggaatttgaaaaagaagaagacgcaattaagaagtctgaacaagactttaagaaagcaaaaagtcacgttgataayattgataatgatgttaaacgtaaagaagtaaaacaattagatgatgtattaaaagaaaaatayaarttrcayrgtgawtacgcgaaagcatataaaaaggctgtaaactcagaraaaacattatttaaatatttaaatcaaaatgaygcgacacaacaaggtgttaaygaaaaatcaaaagcaatagaacagaactataaaaagttaaaagaagtatcagataagtatacraaagtactaaataaggttggtaaagaaaagcaagacgttgatcaatttaaataa

SEQ ID NO: 2663 - DNA, 1443 bp, Staphylococcus aureus
atgttacataatgacttatatcaaataaatatggctgaaagttattggaatgataatattcatgaaaaaatggctgtatttgatttrtattttagaaaaatgccatttaatagtggctatgctgtttttaatggtttaaaacgcgtcattgattttatagaacattttggattttcaraatctgatttggaatatttaaagtctattggctacaaggatgatttcttatcatatttaaaagatttaaaattcacwggmagcatycgttcgatgcaagaaggcgarttatgctttggtaacgaaccattgttacgcgtagaagcaccattgattcaagcgcaattaatagaaacaattttattaaacattgtaaatttccatacaytaattacaacaaaggctagyagaattcgtcaaattgcatcaaatgataaattaatggagtttggtacacgtcgtgcgcaagaaattgatgcagcattgtggggcgctagagctgcttacatcgggggctttgattctacaagtaatgttagggcrggkaaattatttggtatacctgtgtctggtacacatgcacaygcatttgtccaaacttatggagaygaatatgttgccttcaaaaaatatgctgaaagacataaaaattgtgtgttcctagtagatacattccatactttaaaatctggcgtgccaaaygcaataaaagttgcaaaagaattaggtgacaaaattaactttgtaggtattcgattrgattctggagatatcgcttatttatctaaagaggcmagacgtatgcttgatgaagcaggatttactgaaactaaaattatcgcgtctaatgatttggatgaagaaacgattacgagtttgaaagcacaaggtgcaaaagtagattcttggggcgttggtacaaagctgattacaggatacgatcaaccagcattaggtgcagtatataaacttgtagctattgaaaatgaagakggttcatatagtgatcgtattaaattatcaaataacgctgaaaaggttackacgccaggtaagaaaaatgtatatcgcattataaacaagaaaacaggtaaggcagaaggcgattatattactttggaaaatgaaaatccatacgatgaacaacctttaaaattattccatccagtgyatacttataaaatgaaatttataaaatctttcgaagccattgatttgcatcataatatttatgaaaatggtaaattagtrtatcaaatkccaacagaagatgaatcacgtgawtatttagcacwaggattacaatcyatttgggatgaaaayaagcgtttcytdaatccacaagartayccagtcgatttaagyaargcatgttgggataataaacataaacgtattttygaagtkgcggaacaygttaaggagatggaagaagataatgagtaa

SEQ ID NO: 2664 - DNA, 696 bp, Staphylococcus aureus
atgrcaacacatttragttttagacaaggcgtrcragagtgtrtccyaacattattgggttatgccggtgttggtatttcatttggtatygtggcttcrtctcaaaactttagtattttagaaattrtcttgttatgtcttgttatatatgccggtgctgcgcaatttattatgtgcgcgttgtttatagcaggtacacckatatcagcgattgtactaactgtatttatcgtaaattcaagaatgttccttttaagtatgtcgcttgcaccaaacttcaagacatatgggttttggaaccgtgttggattaggttcattagtaactgacgaaacgtttggygtcgccattacaccttatttaaaaggagaagctatcaatgatcgttggatgcatggtcttaayatyacagcatatttattttgggyaattycatgtgtagcwggkgcwttrtttggcgartatatytcraatccrcaarcrytaggrttagattttgctatcacggctatgtttatctttttrgccattgcrcaatttgaatcaattactaaatcgcgwttaagaatttacatagtactcattattgccgtcatagtaatgatgttatcgctaagtatgtttatgccttcatatctagcaatattaattgcagccacaatttcagcagcgttaggagtgatgatggaacratga

SEQ ID NO: 2665 - DNA, 351 bp, Staphylococcus aureus
atgaaaacaaccactcaagaactcaaacaatatataactcgtctattccaactatctaacaatgaaacatgggaatgtgaagcgttagaagaagcagcagaaaatatacttcctactcgctttgtagaccataccccacttgcgcatcttacacttgamacttatacctactataaygatgarctacatgagctaagtatctatccatttctwatgtacrccaataaccaactcatcagtatyggttatctggatcattttgayatggactttytatayctcacagatactaaaaatacrattatcgatgaacgtcatctaytamaaraaggagggamtmrccatgaataa

SEQ ID NO: 2666 - DNA, 1380 bp, Staphylococcus aureus
ttgattagaacgatgacaccrctgattacaatacccattatttcacgtgcatttggtcccagtggtgtgggtattgtttcattttctttcaatatcgtgcaatactttttgatgattgcaagtgttggcgttcagttatattttaatagagttatcgcgaagtcygttaacgacaaacggcaattgtcwcagcagttttgggatatctttgtcagtaaattatttttagcgttaacagtttttgcgatgtatatggtcgtaattactatatttatwgatgattactatcttattttcctactacaaggaatctatattataggtgcagmactcgatatttcatggttttatgctggaactgaaaagtttaaaatwcctagcctyagtaatattgttgcgtctgktattgtattaagtgtmgttgttatytttgtsaaagatcaatcagatttatcattgtatgtatttactattgctattgtgacrgtattaaaccaattacctttgtttatctatttaaaacgatacattagctttgtttcggttaattggatacacgtctggcaattgtttcgttcgtcattagcatayttattaccaaatggwcarctcaacttatayactagtatttcttgcgttgttcttggtttagtaggyacataccaacaagttggtatcttttctaacgcatttaatattttaacggtcgcaatyataatgattaatacatttgatcttgtaatgattccgcgtattacyaaaatgtstatccagcaatcrcatagtttaactaaaacgttakctaataatatgaatattcaattgatattaacaatacctatggtctttggtttrattgcaattatgccatcattttatttatggttctttggtgaggaattcgcatcaactgtcccattgatgaccattttagcgatacttgtattaatcattcctttaaatatgttgataagcaggcaatatttattaatagtgaataaaataagrttatataatgcgtcaatyactattggtgcrgtratraayytagtattatgtmttrttttgatatatttttatggaatttacggtgckgctattgcrcgtttaattacagagtttwtcttrctyatttggcgatttrttgatattactaaaatcaatgtgaagttgaatattgtaagtacgattcaatgtgtcattgctgcygttatgatgtttattgtgcttggtgtggtcaatcattatttgccycctacaatgtacgctacgctgctattaattgcgattggtatagtagtttatcttttattaatgatgactatgaaaaatcaatacgtatggcaaatattgaggcwtcttcgacataaaacaatttaa

SEQ ID NO: 2667 - DNA, 882 bp, Staphylococcus aureus
atgagcattgttgcattacttatcgggttaggccccttaattggctggggcttcttcccaacagtcgcttcaaagtttggtggtaaacctgtacatcaaattatcggtgctactgtaggtacgttaatcttcgctattwtattagccgtagtcacatcaagtggcttycctactggaaccaatttgctattcgccttattatcaggtgcaggatggggattcggacaaatcattacatttaaagcgttcgaattartcggctcatctcgtgccatgccagtcacaacagcattccaattattaggcgcatctttatggggtgtctttgcattaggaaattggccaggcattggtcataaaatcattggatttacagctttagtcgttattctaattggwgcrcgtatgacagtttggagtgaacgcaaagaagcaagtaacgccaaaaatttacgtcgtgcagtggtacttctgttaattggtgaatttggatactggttatattcagctgcaccgcaagcaacttctattgatggcctaactgcctttttacctcaagcaatgggtatggtaattgttgcagtcatttatggctttatgaatatgaaakcagagaatccattccgtaataaaattacgtggttacaaattatttcaggtttcttctttgcatttggtgcyttaacatatcttatttcagcacaacctaatatgaatggtttagcaactggatttattctttctcaaacatccgttgtgcttgctacattaactggtatttatttcttaaaacaacataaaacktcaaaagaaatggttattacaatyatcggcttagtactcattttagtagccgcttctgttacagtatttataaaataa

SEQ ID NO: 2668 - DNA, 1113 bp, Staphylococcus aureus
atggctcctaagttacaagcccaattcgatgcagtaaaagttttaaatgatactcaatcgaaatttgaaatggttcaaattttggatgagaatggtaacgtcgtaaatgaagacttagtacctgatcttacggatgaacaattagtrgaattaatggaaagaatggtatggactcgtatccttgatcaacgttctatctcattaaacagacaaggacgtttaggtttctatgcaccaactgctggtcaagaagcatcacaattagcgtcacaatacgctttagaaaaagaagattacattttaccrggatacagagatgttcctcaaattatttggcatggtttaccattaactgaagctttcttattctcaagaggtcacttcaaaggaaatcaattccctgaaggcgttaatgcattragcccacaaattattatcggtgcacaatacattcaarctgctggygttgcatttgcacttaaaaaacgtggtaaaaatgcagttgcaatcacttacactggtgacggtggttcttcacaaggtgatttctacgaaggtattaactttgcagcagcttataaagcacctgcaattttcgttattcaaaacaataactatgcaatttcaacaccaagaagcaagcaaactgctgctgaaacattagctcaaaaagcaattgctgtaggtattcctggtatccaagttgatggtatggatgcgttagctgtatatcaagcaactaaagaagcacgtgaccgcgcagttgcaggtgaaggyccaacattaattgaaactatgacatatcgttatggtcctcatacaatggctggtgacgatccaactcgttacagaacttcagaygaagatgctgaatgggagaaaaaagacccattagtacgtttccgtaaattccttgaaaacaaaggtttatggaatgaagacaaagaaaatgaagttattgaacgtgcaaaagctgatattaaagcagcaattaaagaggctgataacactgaaaaacaaactgttacttctctaatggaaattatgtatgaagatatgcctcaaaacttagcagaacaatatgaaatwtacaaagagaaggagtcgaagtaa

SEQ ID NO: 2669 - DNA, 978 bp, Staphylococcus aureus
atggcacaaatgacaatggttcaagcgattaatgatgcgcttaaaactgaacttaaaaatgaccaagatgttttaatttttggtgaagacgttggtgttaacggcggtgttttccgtgttactgaaggactacaaaaagaatttggtgaagatagagtattcgatacacctttagctgaatcaggtattggtggtttagcratgggtcttgcagttgaaggattccgtccggttatggaagtacaattcttaggtttcgtattcgaagtatttgatgcgattgctggacaaattgcacgtactcgtttccgttcaggcggtactaaaactgcacctgtaacaattcgtrgmccatttggtggtggcgtacacacaccwgaattrcacgcagataacttagaaggtattttagctcaatctccaggtctaaaggttgttattccttcaggcccatacgatgcgaaaggtttattaatttcttctattagaagtaatgacccagtcgtatacttagagcatatgaaattgtatcgttcattccgtgaagaagtacctgaagaagaatatacaattgacattggtaaggctaatgtgaaaaaagaaggtaatgacatttcaatcatcacatacggtgcaatggttcaagaatcaatgaaagctgcagaagaacttgaaaaagatggttattctgttgaagtaattgacttacgtactgttcaaccaatcgatgttgayacaattgtagcttcagttgaaaaaactggtcgtgcagttgtagttcaagaagcacaacgtcaagctggtgttggtgcagcagttgtagctgaattaagtgaacgtgcaatcctttcattagaagcacctattggaagagttgcagcagcagatacaatttatccattcactcaagctgaaaatgtttggttaccaaacaaaaatgacatcatcgaaaaagcaaaagaaactttagaattttaa

SEQ ID NO: 2670 - DNA, 1563 bp, Staphylococcus aureus
atggcttatttcaatcaacatcaatcaatgatatcgaaaaggtatttaacattcttttcaaaatcaaagaaaaagaaaccgtttagtrcgggacaacttattggactaatattaggtccattacttttcctattaacattattrttctttcatccacaagacttaccttggaaaggcgtmtatgtyttagcgattactttatggattgcgacttggtggattactgaagcaattcctattgcagcaacgagcttattaccaattgtgttattaccattaggtcayatacttacaccagaacaagtatcatccgaatatggcaatgatattatctttttgtttttaggtggatttattttggcaattgcaatggaaagatggaatttacatacgagagtagckttgacwattattaatttrattggtgcaagcacttcaaaaatattacttggattcatggtggcaacaggattcttatctatgtttgtatcgaacactgcagctgtaatgatyatgattccgattggtttagcaattattaaggaagcacatgatttacaagaagccaatacgaatcaaacaagtattcaaaagtttgaaaaatctctagttttagcaattggctatgcaggtacgattggyggmttrggtacaytwatcggaacsccgccrytaattattttaaaaggacaatayatgcaacattttggacatgaaattagttttgctaaatggatgattgtagggattccaacggtcattgtwttgttaggtattacttggctctatttaagatatgttgcgtttagacatgatttgaaatatttacctggtggtcagacgttaattaaacaaaagttagacgagcttggcaaaatgaagtatgaagaaaaggtagtacaaactatctttgtacttgcyagcttattatggattacaagagagtttcttctgaaaaaatgggaagttacgtcatcygttgcagatggtacgattgctatttttatatcaatattattatttrttattccagctaaaaatactgaaaaacatcgccgtatcattgactgggaagttgcaaaagagctcccttggggtgtattaattttatttggtggcggtttagcattagcgaaaggtatttctgaaagtggtttagcaaaatggttaggcgaacagttgaaatcattaaatggtgtyagyccgattcttattgtaatygtcataacwatctttgtcytatttttaactgaagtgacatctaatacygcaactgcaacgatgattttaccgattttagcaacgttrtctgttgctgttggagtgcatccattactacttatggcacctgcagctatggcggctaactgtgcatacatgttaccagtagggacaccaccraatgcaattatctttggttcwggtaaaatatctatcaaacaaatggcatcagtaggattctgggtaaacttaatcagtgcaataattattattttagtcgtgtattatrtaatgcctatagttttaggtattgatataaatcaaccactgccattgaaatag

SEQ ID NO: 2671 - DNA, 1293 bp, Staphylococcus aureus
gtggcatttgaatttagattacccgatatcggggaaggtatccacgaaggtgaaattgtaaaatggtttgttaaagctggagatactattgaagaagacgatgttttagctgaggtacaaaacgataaatcagtagtagaaatcccatcaccagyatctggtactgtagaagaagttatggtagaagaaggtacagtagctgtagttggtgacgttattgttaaaatcgatgcacctgatgcagaagatatgcaatttaaaggtcatgatgatgattcatcatctaaagaagaacctgcgaaagaggaagcgccagcagagcaagcacctgtagctactcaaactgaagaagtagatgaaaacagaactgtwaaagcaatgccttcagtacgtaaatacgcacgtgaaaaaggtgttaacattaaagcagtttctggatctggtaaaaatggtcgtattacaaaagaagatgtagatgcatacttaaatggtggtgcaccaacagcttcaaatgaatcagctgmttcagctacaartgaagaagttgctgaaactcctgcagcacctgcagcagtawcattagaaggcgacttcccagaaacaactgaaaaaatccctgctatgcgtagagcaattgcgwwwssaatggttaactctaagcatactgcacctcatgtaacattaatggatgaaattgatgttcaagcattatgggatcaccgtaagaaatttaaagaaatcgcagctgaacaaggtactaagttaacattcttaccwtatgttgttaaagcacttgtttctgcattgaaaaaatacccagcacttawyacttcattcaatgaagaagctggtgaaatygtkcataaacattaytggaatatcggtattgcrgcrgacactgatagagghttattagtacctgtwgtkaaacatgctgaycgtaartctattttccaaatttcwgatgaaattaaygaattagctgttaaagcacgtgatggtaaattaacagccgatgaaatgaaaggtgcwacatgcacaatcagtaatatcggttcagctggtggacaatggttcactccagttatyaatcacccagaagtagcaatcttaggaattggccgtattgctcaaaaacctatcgttaaagatggagaaattgttgcagcaccagtattagcattatcattaagctttgaccacagacaaattgatggtgcaactggccaaaatgcaatgaatcacattaaacgyttatyaaataatccagaattattattaatggaggggtaa

SEQ ID NO: 2672 - DNA, 1098 bp, Staphylococcus aureus
atgtatatcaatatgaaagattatgggttaacaggcataaacaaaactaaagatactcgagcaatacaacrtgcgttaaatcrtggaagatgtaaaccaacgacagtttatataccgaaagggacgtatgatatttgcaaaccattaacgatatatggcaatacaacacttttgttrgataatgaaactattttacgycgatgtcattctggtcckttattaaaaaatggtcrtcgctttggtttttatcgtggttataatggacacagtcatattcatattaaaggcggcaagyttgatatgaatggygtatcgtatccttataayaatacagctatgtgcattggrcatgctgaagatattcaattaataggtgtracyattaagaatgtagtgagtggtcatgcaattgatgcttgygggattaayggactctatattaaaarytgttcatttgaaggattyrtagactatagtggcgaacgyttttattctgaagcaatacaattagacattcaagtacctggtgcttttccaaaattcggaacgacagatggtacgataacgaaaaatgtcrttatcgaagattgttattttggaccttcagaattgcccgaaatgggaagttggaatcgtgctattggctcacatgcaagtagacataatcgwtactatgagaatattmatattagaaataatatatttgaagatatacaaggttatgcattaactcccttgaagtataaagatgctttcattattaataataagtttattaactgtgagggtggyattagatatttaggagttagagatggtaaaaatgcwgcagatgtgatgacaggaaaagacttaggttcccaagcaggmataaatatgaatataattggaaatgaatttaaaggrtcaatgtctaaagatgcgatacatgtacgtaattataataatgttaaacataaagatgtattaatcgttgggaatacattcaataattcgactcaatcaattcatttrgaagatattgatacagtgtttttaagtcctgttgaagcgggtattcaagttactacaatcaatrtagatgaaataaaaaagtaa

SEQ ID NO: 2673 - DNA, 1407 bp, Staphylococcus aureus
atggtagttggagatttcccaattgaaacagatactatagtaatcggagcaggtcctggtggatacgttgcagsmattcgtgcagctcaattaggacaaaaagtaacaatcgttgagaaaggtaatcttggtggtgtttgcttaaacgtaggatgtattccttcaaaagcattactacatgcttctcaccgttttgttgaagcacaacattctgaaaacttaggtgttattgctgaaagtgtttctttaaacttccaaaaagttcaagaattcaaatcatcagttgttaataaattaactggtggtgttgaargcttacttaaaggtaacaaagtwaacatcgttaaaggtgaagcatatttcgtagataacaatagcttacgtgttatggacgaaaagagcgcacaaacatacaactttaaaaaygcaatcattgcaacaggttcaagaccaattgaaattcctaatttcaaattcggtaaacgtgttatcgactcaacaggtgctttaaayttacaagaagtaccaggtaaattagttgtagttggtggaggatacattggatcagaattaggtacagcatttgctaactttggttcagaagtaaccatccttgaaggtgctaaagatatcttaggtggcttcgaaaaacaaatgacacaacctgttaaaaaaggtatgaaagaaaaaggtgttgaaatcgttactgaagcwatggctaaatcagctgaagaaacagataacggagttaaagttacttatgaagctaaaggcgaagagaaaacaatcgaagctgattatgtattagtaactgtaggtcgtcgtccaaacacagacgaattaggcctagaagaattaggtgttaaattcgctgaccgtggattattagaagttgataaacaaagccgtacgtctatcagcaatatctatgcaattggtgatatcgttccaggtttaccacttgctcacaaagctagctatgaagctaaagttgctgctgaagcaattgatggtcaagctgctgaagttgattacattggtatgccagcagtatgctttactgaaccwgaattagctacagttggttattcagaagcgcaagctaaagaagaaggtttagcaattaaagcttctaaattyccatatgcagcaaatggtcgtgcattatcattagaygatactaacggatttgttaaacttattacacttaaagaagatgatactttaatcggtgctcaagtagttggtactggtgcatcagatattatctctgaattaggtttagcaattgaagctggtatgaatgctgaagatatcgcattaacaatccatgcacatccaacattaggtgagatgactatggaagcagcwgaaaaagctatcggatacccaatccatacmatgtaa

SEQ ID NO: 2674 - DNA, 171 bp, Staphylococcus aureus
ttgawtgttgtggccgttaattttaaatggtctttcgaattatatatgttgaaagttgaaaatagagcgatgaatcgtgtacataataatatttataactttaatcataacgaaaaaggtaggaagaaaacaaaaatttatactcaacatcgcaaatatttyaagaaaatg

SEQ ID NO: 2675 - DNA, 1674 bp, Staphylococcus aureus
ctgcggttctacaatctaaaaaatataaaggatgattttatgaaaggcattgaattacttaacaatccatttttaaacaaaggtacagcttttactaacgaagaaagaaaacagttagggcttgaaggattattacctgcgaatgttcgaactttagaacaacaagcagaacaatgttatgaacaattcaaggcgaaacaaaccgattttgagaaacgtttatttttaatggcaatttttaatcgtaatcgtacattgttttacaaattgacttctgagcatttagttgaatttatgccaattatttatgaccctgttattgcacaatcgattgaacaatataatgagaatttcagtagaccccaagatgcagtatttttatctgttgatagacaagaccaaattgaacaagaattgcgcaacgttgcaaatggcagagatattcgattaatcgtagtaacagatgcggaaggtatattaggtatcggcgattggggcgttgatggtgtagatattgcgataggaaaattaatagtatatacagcggcagctggaataaatcccgcacaagtattacctgtatctttagatgtaggtactaataatgaacaattactgaatgatgaactttatttaggaaatcgtcataaacgtgtcgatgatgagacatattacacatttgtagataaatttgtgagtgcagtgcgtaaagaatatcctaatgcactattacattgggaagattttggtagagggcatgctaaaaatattttagataaatatgaagatactttaccaacatttaatgatgatattcaaggtacaggtatagttacattagccggcgtactaggtgcattaaatatttctaaagtagactatacgaatcagacgttcttagtttatggtggtggtacagctggtatgggtattaccaatattttaaaagatgaactaattaaacaggatgtttcagaagataaagcaaatcagcatttctatattatggataaacaaggattgttgtttgatgatatggatgacttaactgaagctcaacaagtatttgctaaaaataggaatgaattttcaaatacagtaaactggaaaaatttaaaagaagtaattgaaaatattaagcctactgttttaatcggtacatcaactcaaacaggtgcatttacagaagatgcagtaaaagagatgttaaaacatacagaacgtccaatgattttcccattgtctaatcctacaaaattagcagaagcaactgcacaagatttattaaaatggactaatggaaaagcattaattggaactggtatcccatataatgacattgaatacaatggtgtgaattacagtattggtcaagcaaataatgcattgatgtatcctggtttaggtttgggtcttattgcgtcaaaagcgaagaaagtaaatcaacagattctatcagctgcgagtcatgcacttggtggcatggtcaatccagatgaaccaggagctgcagtcttaccacctgttgagaaaatacatcaatgttctcgtgccatagccaaagcggttgcacaaagtgtcattgatcaaggattaaacgctgaaactattgatgatattgatgaagcaattgaagctgaaatttggtatcctgaatacaaatcatacatttaa

SEQ ID NO: 2676 - DNA, 276 bp, Staphylococcus aureus
atggaatatgagtatccaattgatttagactggagtaatgaagagatgatttyagtgataaatttctttaatcatgtagagaagtattatgaatccggcgtgacggcaggmgactttatggrtgcatataaaagatttaaagaaattgtgcctgctaaagcagaggaaaaacaaatttttaatactttcgaaaaaagtagtggctataatagttacaaagcagttcaagatgtaaaaactcactctgaagaacaaagagtaacagctaaaaaataa

SEQ ID NO: 2677 - DNA, 1029 bp, Staphylococcus aureus
atgacaaatggatatattggttcttacactaaaaagaatggtaaagggatttatcgytttgaattaaacgaaaatcagtcacgtattgatttattagaaayaggatttgaattagaagcgtctacatatttgktgcgtaataaygaagttttatatggaatcaacaaagaaggagaacaatgcggtgttgcragtttgaaaattgatgacaatggtgaattgcatttattaaataaatgtttgtcttcaaaagctggtacaggttgttatgtatcgatttcagaagataaacgatatttatttgaagcggtatatggwgctggcatcatacgtatgtatgaattaaayacgcacacaggtgaaatwatacgtctaattcaagaacttgcrcatgattttccaacaggtacacatgaaagacaagatcatccacacgcacattatattaatcaaactccagatggtaagtacgttgcagtaacagatttaggtgctgatcgtatcgttacttataaatttgatgacaacgggtttgaattttataaagaatctttatttaaagatagtgatgggacaagacatattgaatttcatgataatggaaaatttgcttatgtcgtacacgaattatcmaatactgtgagtgttgcagaatataatgacggtaaatttgaasagctcgagcgtcatttaacaattcctgaaaactttgatggagatactaaacttgcagcagtgcgtttrtctcatgatcaacaattcttatatgtatctaatagagggcatgatagcattgcaatttttaaagttcttgataatggtcaacacttagaactagtaacaattactgaaagtggtggtcaattcccaagagattttaatattgcctcatcagatgaccttttagtttgtgctcatgagcaaggagattcagttgtaactgttttygaaagaartaaagaaacaggtaaaattackctatgtgataayactcgtgtagcatctgaaggtgtatgtgtcatattttaa

SEQ ID NO: 2678 - DNA, 540 bp, Staphylococcus aureus
atgaacataggtaataaaattaaaaatcttagaagaattaaaaatttaacgcaagaagaacttgctgaacgtacwgacttatcgaaaggctacatttcacaaatagaaagtgaacatgcctcaccaagtatggaaactttcttaaatattatagaggtgttaggracgacgccaagtgaattttttaaagacagtgaaaatgaaaaagtattatacaagaaggaagaacaagttatttatgatgagtatgatgaaggttatatattaaattggttagtttcaaagtcaaatgaatatgatatggagccattaatattaactttaaagcctggmgcatcatataaaaattttaatccatcagagtctgatacgtttatttattgtatgtcaggtcagataacacttaatttaggcaaagagrtatatcaagcacaagaagaagacgttttgtattttaaagcacgagataatcatcgtttgtcaaaygaatcaaacaatgaaacacgaatacttattgtagcgacagcttcatatttatag

SEQ ID NO: 2679 - DNA, 174 bp, Staphylococcus aureus
atgtggaattttattaaatgtgtgtttaaattcgtatttagcttagttgctattacaacattagttgctggtgttggtgtagtagcatttgcttatatctttaaaaaagattttgaagatattgaaagaaaaactaaagaaattatttctgatatygaaagtaaaaataactaa

SEQ ID NO: 2680 - DNA, 1158 bp, Staphylococcus aureus
ctgggattaacacacgaaagatatgagtcaatttataattcattaaaaaatcatcgtgaagaattttcaaaagaaatcgaagaaattaataataaaaatccagtgttaaaagaatataacaatgaggaacaaactaaagctgatacggaattaaacactcttgaaaatcaagtactaatgataggttatacattttatcactcgaataaaaatgaagtagaagatttatataacaaattagatatgattcttggttataaagatgaagagagaaaaaagaagagggctaccaatcaaagaatgttcaataataaaaaagaggatttagaaactattattgatgaattctttggagaaattggacaacaaaggccaacatctataccaacattagcgcctaaagaagaaaaagaaacaaatataaaaaatgcaaataaattaaaatctgacactgaagcagcaaaaaatgatgaagcaaaaagaagtttaaatacccacaatcacaaatctgtatctcaagaagtctctgaacaacaaaaagctgactacgaaagaaaagctgaagaaagaaaagcgagatttttagataagcaaaaaaataagaaaactcctgtagtttcattagaatatgattttgaacataaacaacgtgttgacaacgaaaacgacaagcaacttgtggtttctgagccatcaaagaaaccaacaacaccgcctacatacactgaaacaaccacacagctaccaatgcctacagttgagcgtcaaacacagcaacaaatcgtttacaaagcaccaaaaccattagctggattaaatggtgaaagtcatgatttcacaacaacgcatcaatcaccaactacttcaaatcacacgcataatcatcttattgaaattgaagaaacatctgctttacctggtagaaagacaggttcattggttggtttgagtcaaattgattcttcgcatttaactgaacgtgagaagcgcgtgattaaacgtgaacacgtgagagaagctcaaaagttagttgataattataaagatacacatagttataaagaccgattaaatgcccaacaaaaagtaaatactttaagtgcaggtcatcaaaaacgttttaataaacaaattaataaagtatataatggcaaataa

SEQ ID NO: 2681 - DNA, 1095 bp, Staphylococcus aureus
ttggaaccgttattatcattaaaatcagttagtaaaagctatgatgatcttaatatcttagatgacatagatattgatattgaatcaggatacttttatacattattaggtccttcaggttgtggtaaaacaacaattttaaaattaattgcagggtttgaatatcctgacagtggtgaagtgatttatcaaaacaaaccaattggtaatttaccaccaaataaacgtaaagtgaatacagtctttcaagattatgcattatttccacacttaaacgtmtatgataatatcgctttyggtttgaaattaaaaaaattatcaaaaaccgaaattgatcaaaaagtaactgaggcattaaaattagtwaarctttcaggttatgaaaaaagraatattaatgaaatgagtggcggacaaaagcaacgtgttgcaattgcacgtgctatygtaaatgaaccagaaatattattgttagatgaatctttatccgcattagatttgaaattgcgtactgaaatgcaatatgaattacgagaattgcaatctagattaggtattacatttatatttgtaacacatgatcaagaagaagckttagcaytaagtgactttctttttgtattaaaagatgggaaaattcaacaatttggyacaccaacagatatatatgacgaaccagtgaatcgatttgtagctgattttattggagaatctaatattgttgaaggrcgcatggttagagattatgtcgtgaatatttatgggcaagatttcgaatgtgtcgatatgggtattcctgaaaataaaaaagtagaagtcgttattcgaccagaagatatatcattaatcaaagctgaagaaggattatttaaagcaactgttgattctatgttrtttagaggggtccactatgaaatatgttgtatagacaataaaggttatgaatgggtaatacaaacgactaaaaaagcygaagtaggcagygaagttggtctttattttgatcctgaagccattcatattatggttcctggwgaaacagaagaagartttgataaacgtattgaaagctatgaggaagtagacaatgcgtaa

SEQ ID NO: 2682 - DNA, 843 bp, Staphylococcus aureus
atgaagaaattcttttttattgggcttttagtgtttgttgtcttttttacagcagcaaccattatttggttcagctatgataaaaacaaatatggtactaaacaatatgataaaacattcaaagacgatgcttttgacaatgtatctataaatttggatagtacagaacttcgtataaarcgggggaatcaatttagagttaaatatgatggtgacaatgatatattaattaatatagtagataagacgttgaagattagtgataaaaggtctaagacaagaggatatgcaattgatatgaatccttttcatgagaataagaaaacgttaacgattgaaatgcctgataaaatgattaaacgtttaaatmtatcrtctggagcaggaagtgttagaatcagtgatgttgatttagagaacacaagtattcaaagcattaacggtgaagtagttattaaaaactcaaatcttgacgcactagattcaaagacaaataatagtyctacttatattagtaaaagtaacattaaaaatagyaatattaaagttgttattggtaygctacaaatcgacaagagtcaaattaaacaatccatatttttaaacgatcatggtgacattgaatttaaaaacatgccatcaaaagtagatgcaaaagcttctactaaacaaggagatattcgttttaagtatgatagtaaacctgaagayactatactraagctaaatccgggaacgggtgatagcgtagttaaaaataaaacrtttaytaatggtaaagttgggaaaagcgayartgttttagaattttatacgattgatggtaatatcaaagttgaataa

SEQ ID NO: 2683 - DNA, 798 bp, Staphylococcus aureus
atgcgtaatactaataaatttctyttaatcccgtatttactatggatggttatatttattattgtaccagttgtattactcatttatttttcatttttagatatcaatggacattttagtttcacgaattatcaacaaatttttactacaaaatatttraaaatgtttgcatattcaattttatatgccgcytyaataacaattattacsttgrctatcagttatccagctgcctattatattactcgytcgaaatttcaaaatatcttattaatgataatgattattccaacatggataaatttattgttraagacatatgcttttataggtttattaagtcaygatggygtgattaatcaatttttccacttatttaatttaccatcattcaatttgttatttacaactggtgcstttttagtagtggcaagttayatttatataccatttatgattttacctatatttaatagcatgaaagcaattcctaataatttattgcargcctcaagtgatttaggtgcyagtccwttctatacttttagaaaagtaatcatgccgttaacaaaagaaggtgttatgactgggattcaagtaacctttattccatcactttcattatttatgattacaagattaattgcaggtaataaagtcataaatataggtacggcaatagaggarcaatttttaacaattcaaaattatggtatgggatcaactatagctatattcttaattgtatttatggcattcattttaatcattacaaaatcatctaatgggagagggtga

SEQ ID NO: 2684 - DNA, 483 bp, Staphylococcus aureus
atgtatgaatatgaacgttatttttatgagcaagaacttaatggcgttgatgaagrggaaattttaaagaagttaaaagacccacaagatgttgcagctgaaacaaaagctagaagtgtyattgattatgctgaatctaaaccaacwtttgaaaatatttcaagagctgttgctgcttcattaagtttaggcattctatctatttttgtcatccttataccagtatctatagttggattatttgtattagcattatttttaatatcacttttgctgctgttttgtccaattattttattagcatcagcaatatccagaggaattgtrgactcaattagtaatgtattttttgccatatcatattcaggattaggattagtatttatcattgtcatatttaagattttagaatacatttatcgtttaatcttaaaatatttactttggtatattaaaactgtcaaaggaagcgttagaaaatga

SEQ ID NO: 2685 - DNA, 810 bp, Staphylococcus aureus
atgaaatggtatggaaagctgtatatcgggatacttttagcgattttatacatcccaatattctttttaatgttctattcattcaattcggctggtaatatgattcactttgaacattttacattagagcattatcaatcattatttcaaaatgatcatttaatgtcggtcatttttaayacgatagctgtagcacttttagcagcctcaatttctacagttattggtacatttggtgccattgctatttattatttaagaaataaaaagtttaaagtaactttactaacattgaataatgtcttgatggtatcatccgacgttgtcataggtgcatcattcttaattatgtttacaacgattggccattttactggtcttggtttaggattttggacagttctaatatctcatattgcattttgcatacctatagttgtgattatcgtcttaccacaactgtatgaaatgaataataatatgttaaatgctgcaagagatttaggagcgactgaaccacaattattaagcaacattattattcctaatattttaccttctattataggaggwttctttatggctttaacttattcactagacgatttcacagtaagtttcttcgttactggtaatggctttagtgtgttatcagttgaagtttatgctatggcgagaaaaggaattagtatggaaattaatgcgatttcaacattaytgtttgctgttattgtattaggaatactaggatattatttgattcaatacgtgataaataagaaaaaactaatcaagcgaggtgtaaaataa

SEQ ID NO: 2686 - DNA, 525 bp, Staphylococcus aureus
atgctatatttaaataagtacaaagaaagggtgacatcagtgcgtattcaaaatcgctgggttgtgtttatattatttttaatctgttcttttggtgtattaattggtttatatcaatatcgtcatacgaaaactgtggatttgtctaatcttgaaataaacgatattaaattaaatgagaagtttgataaaaaaggctatgaagtaaataaaaaaattaagtttgatcgttttaaattttataacagtaaagctcaccctgaycttaccgttaaagtgagagaaaaggataacatcgttaaggggataatattagtaagagatgaaaagatacatactaattttgatggrggaattggttcgccgataaataacgcgattgaaaatcttggattcggatrtaaaagaacaaaagttggcaatgatttctcatcggtaaagtatattgatagagataaccatttaaaattaaacttactttatcaagatttagaaattaaacgtattgaattttttagtaaatag

SEQ ID NO: 2687 - DNA, 1074 bp, Staphylococcus aureus
atgaaacgwtttttacaactcattataggtgcattagttgtgggtatgctttgtcttactttaagtcattggtttaaatctaaagaacaagtgcatacaaatcaaaaaatttacgtatacaattggggcgaatatattgatccagagttaattaagaaatttgaaaaagaaactggcattcaagtcgtttatgaaactttcgattcaaatgaagcgatggaagccaaaattcgcaatggyggtacacattatgatgttgcttttcctagtgaatatacagttcaaaaattgaaaagagatcatttattgttaccaatagatcataataargtacctaatattaaaaatttagattcagattatatgaatatgtcatttgataraggcaataaatattctttaccttatttctttggaactgtaggtattttatataataaagaaaagtatccaaatgaatcatttgatagttggaagtcattgtataatcctaaatttaaaaaccaaattttactagttgacggtgctagagagattataggcatgagtttgaataaacttgggtataatcttaatgaccgtaattcgcaccatttaaaagaagcagagcgagatttaacyaaaytagcaccacaagtaagaggtgtcgtaggtgatgaaattaccatgatgcttsaacaaaatgaaggtaacatwgcggttgtttggagtggtgttgcagcacctctagtgcaagaaggggataaatataaytatgttattcctaaagaaggatcgaatttatggttcgacaatatggtaattccaaaaacggcacaaaataaagagggtgcatataaatttatgaattttttattagatgctaaaaataacaagcaaaatacwgaattcgtaggctatgcaacgccaaacaaggctgctcgacaattgttgcctaaagagattaaagacgaccatcgtttytatccgactaagaaagagcaagaacgccttgaagtttataaagatttaggacctgaagttttaagtgaatacaatgaaaactttttgaatttcaaaatgtcattaaaataa

SEQ ID NO: 2688 - DNA, 741 bp, Staphylococcus aureus
atgagaattttaaatttagttaagtatgatytttatagtatwtttaaaagtcctttaacatatttagcgatactagtcgtatctagtttgattgcaackcaaagtatacttatggcaaattckatggataacccgaaacatattattgtctatggatctgtatttgctgcagcaaaatggttattgttaataattggattaatgtttgttgttaagacaattacgcgtgatttttcacaaggtacaatycaactatatatgagtaaagttaaaacacgygttggatacattatttcgaaaacaatttcaattattttaatttcaatattatttgcattaattcattatgtgattttgattgttgtgcaggcatctagtaatggraaaaatttggcgttttctaaatatgtagataatttatggttcttcctaatctttttactattctttggcttgtttttattcttaatcacacttgcatcacaaaaaacagcaatgatattttcattaggtgtatttttagtactyattgtaccgtttattaaaccwttyattacatttatyccaagatayggtgawaaagttttagatgcttttgattatatcccttttgcttacttaactgataaaatgattagctctaactttgattttagcaattggcaatgggtaatttcattaggttctatagtratattcttcattttgaatatcttatatgtcgctaaaaaagacatttaa

SEQ ID NO: 2689 - DNA, 1368 bp, Staphylococcus aureus
atgaatactaaatatttatatttaaatttcgataaaatttatgaagaaaaagattttttcaacgttttacatgtagacattaaccttaaaatatcagaaataaaggaaagtaatgaagtattatatagtattgattcaattacttgtaagaaattgaatcattatgatccaaaattagaatcatacagagacagtatatatttattgaatgaacgtctaaataattataattttaatggtaaaaaagaatggaaattattttacttgtataaagaattaatccaaacttttgaaatattatatgatgatacttcaaccacgaattattatagaggtcaagcaaatgattggccaatgaaagcaggattattaagaaatgatataatagatgatttaaaaaaagagtttgagaatatatacgaagatatggcttataagtacccagatttaatagagtatacgtgcttaaataaaaaagaatataaagcagaagattttaaaaaaagagaaaacaatatggcttatttacaacattatgggctaagaactacattaattgatattactgaaaacccctttatagcgctcctatttttaacttctaactcacaagtgtttaacaatgcaaccttagacatgtataatatcaatcctaaaatacacagcgaacaaaatttgttttcaagagtaaaaatgattagtaaaaacaaaagaataatagctcaaaagggtgcgttttttaacttcgaaaagctattgatttttcagaatgaacaaaatgtaaatagagataaaattaataaaatacctctagttcgtttaaagttaaatttttcatatgactataaagaaaaattaaaaagggagttaaatcaaacgcaatctgcttttcaaaaactaaaaataactagagaagagaaattgaaaaatcataagagtagaattaaagaagacctcaaaagaatacgcaatttaactatgaaaactgaacatgacatggatagtgaaaaatctaatgattacaaagaggaattggaatatttaattaaacgaatcttaaaagatgaaagcgttattaaaatagataaagaaatggaagacttaaaaaagaaaaaactatatttagatgcaaggttgaaaaaagaggaaatcttgactagtgaatatttaaggcctgagatttgtaaagaattaagggagaaattaaaacagtatcattatgttgaaagtgaattattccctgacgtatacagacatataggttatattcaatctaattttctatcaaatcaaacaaataatcgtactattaataaaaataatatatcagaaaatctagtcgatttattaaaactaaaagaaaactaa

SEQ ID NO: 2690 - DNA, 570 bp, Staphylococcus aureus
atgactgccattgacaaagtttattatgaagatgtattagaagatgacatacttaatctgcttaaaccatatatacaggggaaagaaaaggaactttatatcacttctgataattttgcaattgatttaaataaagtgaccgcattactggatttaaaaattcagtatgaagatttggatgatgatgtttcgggttatattgatgaaagaactatttatgtaaataaaaatcattctagtaatagaaaaagatttacaattgcccatgaaataggacattttttacacaatcataaaaataaaatcaaatatagaaataatagttatgcatatgacactgaagaaatgattgaagaaagggtggctaatgacttttcagctaatttactaatgcccaaaaagcaaatggaagctttagtatataagttttacaaggaaaataatattaatttaacttctggtttatcaatttcagaaagagaagagttaattaactatattgcaattaagttggaagtttctaaaatagcagctgggattagactttataatttagggttggataaataa

SEQ ID NO: 2691 - DNA, 459 bp, Staphylococcus aureus
atgggggttaaaatgaaaaagagatatgtatttgtggtagttgttgcattattaatagtactaattgttattgcatacgcgtttcacaaaagtaaaaaagaacattatattgagacacaagaaaagcgaatcgatttatattttaagcataacctgaatcactataagtctatgaaaataacaaagtttcaaaaaagccctgtgaatgcttactttattaaaggatatataaataatgataaacaatataaatttcaggcatatataaatacaggagatgaaggaaatcagtttaatagtagcataggatataaggaagaaaaaatagggcgattattgaaagagaaagatgctaaagaccgattaacagtggatgaaataattgaaaaagaacacttagacaaaaatgaatatgaagccgagccaccgttgttcttcttttcgggatcgttggattag

SEQ ID NO: 2692 - DNA, 447 bp, Staphylococcus aureus
gtgatgaataagaaatatattttaataatagttagtgtaattttaataggtatgatagttatttcatatgcacataataaacaaaaaaaagaccattacattgaaacacaagaaaagagaatagatttattttttaagtataacctgaatcattataagtcacttaaagtaacgagatttaaaaagtcgccaatggacagttattttataggtggttatataaataacaataaagactatgaattccaagcttttattaatgtaggtggtagaaagcaatttcaaagagatataggatatgacgaagaaaaacttggaaaactattaaaagagcaagaagtaaaaacttggaaaaccgtcgatcaaataattaaaaatgaacacttagataaaagtgaatatgaagcggaaccaccgttgtttttcttttcaggatcactggattag

SEQ ID NO: 2693 - DNA, 447 bp, Staphylococcus aureus
gtgatgaaaaagaaatatattttaatattacttatagtaattttaataggactgctagtcattgcttatacgcacaataagaaaactaaagaccattacattgagacgcaagaaaaacgaataaatttatattttaagtataaccttaataattatagctctatgaaagttactagttttaaaaagacgcctatgggtggctatattgtggatggatatgttaatcacaacaaaaattatgattttaaagttctcatctctgtaactgacaatcatcaatttgaagatagcataggatacgatgataagacatttggtaaattatttaaagaaaaagaccataaaaatgaattaaaacctaaagatattataaaaaaagaacacttggataaaagtgaatatgaagcagaaccaccactgttcttcttttcagggagattagagtga

SEQ ID NO: 2694 - DNA, 600 bp, Staphylococcus aureus
atggcatttaaattaccaaatttaccatatgcatatgatgcattggaaccatatatagatcaaagaacaatggagtttcatcacgacaaacatcacaatacgtacgtgacgaaattaaacgcaacagttgaaggaacagagttagagcatcaatcaytagcrgatatgattgctaacttagacaaggtaccggaagcgatgaggatgtcagtccgtaataatggcggtggtcattttaaccattcattattctgggaaatactatcacctaattctgaagaaaaaggtggcgtaatagaygacatyaaagcgcagtggggcactttagatgaatttaaaaatgaatttgcaaataaagcaacaacattatttggatcaggttggacttggttagttgttaatgatggmaaattagaaattgtgacaacgccaaaccaagataatccattaacagaaggcaaaacaccaatcttactatttgatgtttgggagcatgcctactatctgaaatatcaaaataaacgtccagactatatgactgcattttggaayattgttaactgraaaaaagttgatgaattataccaagcagcaaaataa

SEQ ID NO: 2695 - DNA, 999 bp, Staphylococcus aureus
atgaaaaaagtgtcaattaaagatgttgctagagaagctggtgtatcagtyacaactgtgtcacatattttaaatcataatgatagtcgtttttccgcaacaacgataaaaaacgtacatgctgtttcagaacgtttaggctaygcccctaayaaacatgcaaaacaattgcgcggcagtaaaattcaaactattggcgtcattttrcctagcttaacaaatccgtttttctcagcactgatgcaaagtattcatgaccataaaccatctgatgttgatttatgctttttaacatctacagcaactgatttgtatgacaatattaaacatttaattgatcgaggtattgacggattaattatcgcacaatacatwtcatccccggacgccctaaataaytatctaaagaaacatcatgtaccttatgtcgtactggatcaaaatgaccatcaaggctatacagattttgttcggacaaatgaatatcaaggyggacaacttgcagcacaacatttaatagaactcggtcacaacmatatgatrattgttgcaccatatgacatgatggcgaatatgtcgactcgtgtcgctggatttgtygatactttgcgcgcgaatcaattgccagaaccacaaatcgtccatactgaattatctaagcgyggtgggctaaccattgttgatgacatcatggttcaatctgccactgcaatcttcgctattaacgatgaactcgctattggcattttacgaggactaattgaacatggcatcagtatyccgaaagatatctcattaataggttatgacgacattgattatgcagcgtacgtctcgccacctttaactactgtggcacaacctataactgatattggcaaaacatctttaaccttattacttcaacgattacagcacttagataaatccattgatatgattgaattaccaacgactttaaaaattcgtgcaacaactggctatcatctttcaaactaa

SEQ ID NO: 2696 - DNA, 1020 bp, Staphylococcus aureus
atgactggagaacaatttactcaaattaaacgtccagtaagtagattaactgaaaaagttctaggttggttatgttgggtgatgttattagtgcttactgtcattacgatgtttatagcacttgtttcattcagtaataacacatcgatwgctaatcttgaaaatacattaaacaataatgcatttatccagcaattattagctggaaatggctataatacaacacaatttgtaatatggttacaaaatggtatatgggctattatcgtttacyttattgtttgtttgttgatttcatttttagctctcatatctatgaatataagaatcttgtcaggtttcttattcttaatatcagcaattgtaacgattcctttagttttacttatcgttactttaatcattccgatattattctttattattgcgatgatgctatttataagaaaagataaagttgaaatggttgcgccacaatattatgaagagtayaayggaccgatttatgattatcgtgaacctgtgtatgagcgcccmcaaccgaaagatgattattatgatgtgcctaaatatgaaaaagaattggataaatcaaayactgtatatgatcaagaacwggaaagagataaatatgatcaatttcctaaacgtgcagttgaaagtgaatataatcatgatgagcgcactgaggaagaaccatcagtattatccagacaggctaaatacaaacaaaaaagtactgaagaactaggtattgaagatgatggttattatgcagaacctgaagttgatccaaaagaattgaaagcacaacaaaagcgagaaaaagctgaaattaaagctaagaaaaaagaaaaacgtaaagcttataaccaacgaatgaaagaacgtaggaaaaatcaacctagcgcagttagtcaacgtcgaatgaattttgaagagcgacgtcaaatttacaacaatgatatttctgaagaacgcaattcaagtgaagttaaggacaaaaaagagcaagaataa

SEQ ID NO: 2697 - DNA, 873 bp, Staphylococcus aureus
atgaaattagaacatattacaaaaaaatacggctcaaatgtcgttttaaatgatattgattttgactttggcgatagtagaattgtyggattaataggraaaaacggtgttggtaaaacaaccrttatgaaagtaatgaatggtaatattattaaatttgatggaaaagtagayattgataatgcagataatatcggttttttaattgagcatcctaaattatatgataataaatcaggattgtataacttgaaattatttgcacaagtattaggtaagggttttgataaagcatacacagacaaaattatagatgcatttggtatgagaccttatattaaaaagaaagttaagaaatattcaatggggatgaagcaaaagttagcaattgcagtatctttaatgaataaacctaaatttttaatcttggatgagcctacaaatggtatggatccagatggctcaattgatgtgctgactacaattaagtctytagtaaatgaacttgatatgagaattctaatatcaagtcataagttagaagatattgaattaatttgtgatagagctgtatttttragagacggacattttgttcaagatgtaaacatggaggwaggtgttgcatctgacacaacgatagttactgttgatcataaagactttgatagaactgaaaaatatcttgcagagcatttccaattacaaaatgtcgacaaagcagayggacatttaatgatyaatgcacaaaaaaattatcaagttatactaaaagcattatctgaattagatatttatccgaaatatattgaaacacgtaaaagttcattgcgtgatacgtacttcaatataaatcaaagaggtgataaataa

SEQ ID NO: 2698 - DNA, 321 bp, Staphylococcus aureus
ttgtattttaagcataatcttaacaattataaaaatatgaaggtgacagatttccataaaactccgatgggtgggtatttcattataggttatataaatgatgataaaaaatataaattccaagcaagtatagatccgggaagcgataatcaatatcagaaagatattggttaccatgaagataaattaggcaaattattcaaagaaaaagatcctaaatataaactctctgtcgatgaaataattgaaaaagaacacttagacaaaaatgaatatgaagcggaatcacctttattcttcttttcggggagattagagtga

SEQ ID NO: 2699 - DNA, 450 bp, Staphylococcus aureus
atgattcggaaaactaaagttattattttaattattattttaattatagcaatattaatgatgtttgcatatatgtcgcacaagcaaaaaaaagaacattatatcgccattcaagaaaaaagaattgatttgttttttaaacataacttaaataattataaaaatatgaaagtgacagatttccataaaactccaatgggtgggtatttcattgtaggttatataaatgatgataaaaaatataaattccaagcaagtatagattcgggaagcaataatcaatatcagaaaaatattggttaccatgatgataaattaggcaaattatttaaagaaaaagaccctaaatataaactctcagtcgatgaaataattgaaaaagaacacttggacaaaaatgaatatgaagccgatccaccgttatttttcttttcaggtccaattgaataa

SEQ ID NO: 2700 - DNA, 1821 bp, Staphylococcus aureus
ttgatggaaaaattaaatgaagcaattaaaaactatatagatagtgatgaattgttcgccctttttatagatggacaatggggagtagggaaaacttattatattaaaaataaaatattaaaggaatttgatgataaaatagaaattaggtatataagtttatatggcctgcaaaacttatatgaaattaagagtataatcataagtaaattgataaatacatctactaaaaatcttaggaaagtcctaaaaagcatgaaaaatttccaagtagtaccttatttaaatatgaataacttttctgataacatattacgttatattgatgataattcattaaaaaagataaaaaattccctgatgaaaaataataaaagtgctttgctaataatcgatgatgttgaaagaatgagtgacaaagtaagttttgaagaatttttgggatttattagaaatgatttaattgattatttagactgtaaagtgctatttataggaaatttagatgagctaaataaaaaagcggattttcataagaatagtgagaaaataatttctagaatattaaagtttcctaataatagagaagtagcaatggatatagtaaaaagtaatttacctaagttatttgtaaagaacatctctactaaagagctatttaatggtttttttgatataagtgatgaaaaaaaagaaattattttcgaaaaatctaaacaaaataatttaaattataaatattaccatttgaatatgagaactttgaatttagtagtttcaaacttcaagttaattattaataaaatgcaagatgagattaaatataaatcaaaagattttaaaatcaccttgtacatttcattattcatttcattattcattctgtataatgaatttcgaagcggaaatttaggtgaatctgaaattaaggatcttcaatttacatataatgattttaacaatttaaatacgaaaacatctattgctttgtttaaatacttatacaaaaataatgaactagcaaattatgtcttttttgatatagagctaaagaacttattattatatggtatttttgatgaatcaatttttttgaaaaatataacgaataacttcaaagaagaagatgctaaagctgatttattaaatgtattaaaagaattctttaaattaagtgaaagtgaactacttgaaaaagaaattcaagctatagaaataataaaagataaaaacaatgaaaattttaattataaagtaaaagcttatttatctttattaaatttaaaaggaaaaaacttatatttaatagatggcattaaaattagcgaattagaagatgaattagtggataattacgatttgcatcagaataatttaatagttggagatacgataaatagactagatttagttagcttttcaaacgagcaactatatgaagaaatcaaaagtttaaaagaccgtttaataaataaaagaacaactttgatgacttctatatataaccaatacttagaaactattttaaatggtgactttacaaatagaactaaattaaaagaagcgtatattggaatgaaagatatagatactatagaaataatctataataatttaaacaaagtatcaaatgagcttaaaagtagtaatgagaaaattattaatttaagtgcattcattaaagataatcattgtaataatgatgataatattcaattagaatatattataggtgagatgaaaaaattaaaagatggtactaaagatagagttacacaaatgtgttttagcatgttgatcgatacactgaaagatatatag

SEQ ID NO: 2701 - DNA, 1155 bp, Staphylococcus aureus
atgagtaatacacaaacgaaaaatgtgccagagttgagattcccagggtttgaaggcgaatgggaagagaaaaagttaggggatcttataaaagttaattctggaaaagattataaacatttggaaaaaggtgatataccagtctatggtactggcggttatatgacaagtgtttcagaaccactaagtgaaattgatgctgttggtattgggagaaaagggactataaacaaaccatatttgcttgaggcgccgttttggacggtggatacattattttattgtacacctaaaaaagaaacagacatactatttatattaagtttatttagaaaaataaattggaaagtatacgatgaatcaacaggtgtgccaagcttaagtaaacaaaccattaataaaataaatagatttgtcccttcaaataaagagcagcaaaaaataggcgaattcttcatcaaactcgaccgacaaattgaattagaagaacaaaaacttgaattacttcaacaacagaaaaaaggctatatgcagaaaatcttctcacaggaattgcgattcaaggatgagaatggaaacgattatccgaattgggaagagaagaaaatagaagatatagcaagccaagtatatggaggcggaacaccaaatacaaagattaaagaattttggaatggagatattccatggattcaaagctctgacgtaaaagtaaatgatttgattctacgacaatgtaataaatttatttccaagaattcaattgagctttcttctgcaaaacttattcctgccaattcaattgcaatagttacaagagtcggggttggaaaactgtgtttggtagaatttgattatgctacaagtcaagattttttatcattaagtagtcttaaatatgacaaattatactcattatattcattgctatatacaatgaaaaaaattagcgctaatctacaaggaacttcaattaaaggtataacaaaaaaagagttgttagatagtataataaagataccccataatctagaagaacagcaaaaaataggtgatctattttataaaattgataaatatatcagttttaataaatgtaaaattgagatacttaaaagtctcaaacaaggattacttcaaaaaatttttatataa

SEQ ID NO: 2702 - DNA, 420 bp, Staphylococcus aureus
atgaatagaaaacctgaattaatcatggcttggattgcaaatagtattagtattatttatttattagttatggggctatcctatttttctttaaaaagtggtaatgcatcacaacgtgaagaattagcgaagcaattatctcagaacggtggcaakgtttctttagatatgcttcagacaacaatgggtgcattagcaattattttattaatttcaacactttatggtatatttgcgacaatttgtattaaaggrcgtagaaaattatcgattatactttttgttatcgcgataattgtaagtttgatggctcttaatttaattgcaattgtcttatggrttatcgtgatgattatgttgatttctaaaaaagaatcaaaagaaacwacmcataaggacgatgagtatatttatcattaa

SEQ ID NO: 2703 - DNA, 681 bp, Staphylococcus aureus
atgaaggcattgttaattaggaattttaaattacgacgatatacacttatcatctatgttctattattaaccttatatcctttttatataatgcttgactcaacaaagttcttttacytattgcaatcttttataagtccaacaatattgattatttggattttagatgctggtcacttatttagactcaatcgtagattaggtggtaatgattcatattatttttatatgagtttaccwgtgtcaaaaaaacaattgcttaatgcsaactatattacatgcattgttttaacattarttggaacgcttgttattagtttatatgcttatgaagcagatgtgattgaaccaaattcaatytatttttcaactgcatatgcatttgtcatatctaacttcttgtctataccaattgcatttagtcaatttacagaattgcgyagagtcaaagtgccmtatggtatatacgtgtttactattatcattttagttccatttttattttcaattgcaatagtrttggtgaattattttsttctaagtcaatcatcattcccagatytatattcatatattttaaatattggttttctaattatmagcattgttatacttattgttaattattttaaacagctyaataaaataaatactagaaaatttaaaggaggcagtcgatga

SEQ ID NO: 2704 - DNA, 828 bp, Staphylococcus aureus
atggcactttatggatttgcccaaggacttattcaagaagcaggaattagaattaaacaattgatggagcaaaatttaacaattgaaacaaagtcaaatccgaatgaccttgttacaaatgtagataaagcaacagaagatttyatttttgatacaattttagaaacatatcccaatcatcaagtattaggtgaagaagggcatggtcatgacatcgatacttccaaaggtacggtatggrttgttgacccaatagacggtacattgaattttgttcatcaacaagaaaatttcgcratttcaattggtatttatatcgatggtaaaccttatgcaggttttgtatatgatgttatggctgaygtcttatatcatgctaaagtaggggaaggygcatatcgwggtagccaacccttgaaaccattgaatgattctaatctaagacaaagcattattgggatcaatccgaactggttractaaaccwrtkytaggagaratytttaargawrtygtwaatrwttcwagaagtgcaagggcatatggtagtgcagcgcttgaaatygtttcwgtygctacmggtaatttagaagcatatatgacrccwagactycaaccrtgggattttgctggmggaytrgtyattttawatgargtrrayggwcwagcttchaatttactasgagaaccattaacaattagtggtccaaattcaatcttagttggwaatcgwggtstycatmragaratymkcrrtgwwtatttagagccmyaycrygatrcgttaatacaattacatgaacaacgatttaaaagaaaatcaaaataa

SEQ ID NO: 2705 - DNA, 897 bp, Staphylococcus aureus
atgaatgccatagaaktaagtaatgttaattattcaagtgatcagtttaatttaaagaatatctctttcaaagttcctcaaggattcgtcactggttttattggtagaaatggcgctggtaaaaccacaataataaggttaattatggatttgtatcaaccacaaactggtgttattagagtattagaagaggatatggctctcaatccgatagagttaaagaatagwatwgggtttgtttackctgaaaattattttaatgagagatggactacgaagcaacttgaaaaaatgattgcccctttttatcgtaaatgggaccatcaagtatttgaattttatcttgaaaagttcgatttaccaatcaataaatcaataaaaacattttcgactggsatgaaaatgaaattatcaytagcagttgcattttcacatcatgctgaattgtatatttttgatgagcctacttcaggtctygatcccttagctagaaatgarctattggagataattcagcaagaattaattgatgaaaataaaacaatattcatgtcgacacacattatctcagatttagaaaaaatagctgattatatcattcacttaagtgacggtgaagttatcttaaatggttcaaaagaacaactgttacaaagatatcaagttgtgagtggtgcwaytgaggaccttgatgatgaattagcatctctacttatttwtgaagaacataagcgtacrggatttataggattaacagaacatgcgcaagtatttaaagaaattttaggtcataaagtgaatatcaytacaccttctattgaraacttaatggtttatcttgaaaagagaaaacctaaatatcatgaaaacatcaaattgatggaagaaggtttttaa

SEQ ID NO: 2706 - DNA, 1848 bp, Staphylococcus aureus
atgactaataaaagagaagatgtccgcaatatagcaattattgctcacgttgaccatggtaaaacaactttagtagatgagttgttaaaacaatctggtatattcagagaaaatgaacatgtcgatgaacgtgcaatggactctaacgatatcgaaagagagcgtggaattacgattctagccaaaaatacggctgttgattataaaggtacacktattaatattttggatacaccaggacatgcwgactttggtggagaagtagaacgtattatgaaaatggttgatggggttgtcttagtagtagatgcgtatgaaggtacaatgcctcaaacacgttttgtacttaaaaaagcgctagaacaaaacctraaacctgttgttgttgttaataaaattgataaaccatcagcacgtccagagggtgttgtagatgaagttttagatttatttattgaattagaagcaaacgatgaacaattagaattccctgttgtttatgcttcagcagtaaatggwacagctagcttagatcctgaaaarcaagatgataatttacaatcattatatgaaacaattattgattatgtaccagctccaattgataacagtgatgagccattacaattccaagtagcattgttggactacaatgattatgttggwcgtattggtattggtcgtgtattcagaggtaaaatgcgtgtcggagataatgtatcactaattaaattagacggtacagtgaaaaacttccgtgtaactaaaatctttggttactttggattaaaacgtttagaaattgaagaagcacaagctggagatttaattgctgtttcaggtatggaagacattaatgttggtgaaactgtaacaccacatgaccatcaagaagcattgccagttctacgtattgatgagcctactcttgaaatgacatttaaagttaacaattcwccatttgctggccgtgaaggtgactttgtaacagcrcgtcaaattcaagaacgtttaaatcaacaattagaaacagatgtatctttgaaagtttctaacacagattctccagatacatgggtagttgctggtcgmggtgaattgcatttatcaatccttattgaaaatatgcgtcgtgaaggttatgaattacaagtttcaaaaccacaagtaattattaaagaaatwgatggtgtaatgtgtgaaccatttgaacgtgtgcaatgtgaagtgccacaagaaaatgcaggtgckgttattgaatcattaggtgcacgtaaaggtgaaatggttgatatgactacaactgataatggacttacacgtttaatctttaatgtaccggctcgtggtatgattggttatacgactgaatttatgtcaatgacaagaggttacggtattattaaccatacatttgaagaatttagaccacgtattaaagcrcaaattggcggtcgtcgtaatggtgcrttaatttcaatggatcaaggttctgcaagtacttatgccattttrggacttgaagatagaggtgtaaacttcatggaacctggtactgaagtttatgaaggtatgattgttggtgaacataatcgtgaaaatgatttaactgttaayatcactaaaacaaaacatcaaactaacgtacgttctgcaacgaaagaccaaacacaaacaatgaatagaccgcgtatwctaacattggaagaagcgttacaattcattaatgatgatgaacttgttgwggttacwccagaaagyatacgtttaagaaagaaaattttaaacaaaaatgttcgtgaaaaagaagcaaagcgtatcaaacaaatgatgcaagaaaaygaataa

SEQ ID NO: 2707 - DNA, 381 bp, Staphylococcus aureus
atgaaaataattttaaaaaacaatagtgattttccgatttatgaacagattaagcaacaagtaaaacaaaatattttaaagggacatgttgctcctggagagcatttgccrtcaatgagrgaacttgccaaagatcttcaagtaagtttrattactaccaaacgtgcttatgaagatttagagaaagayggktttgttacmacaattagaggaaaagggacctttgttaaggagcaagatagttctattttaaaagagaaacaattttttaccattgaaaatttggttaaagaattggttaatgaagcgcaagccatcgaaatgtcacttgaggaactkcargatattttaacgttcatttatgaggaggaatcatcatga

SEQ ID NO: 2708 - DNA, 276 bp, Staphylococcus aureus
atggcgaaacaarcaacaatgaaaaatgcagctttgaaacaattgactaaagatgctgatgaaatcttgcatctgattaaagttcaactagataatttaacattaccttcatgcccattatatgaagaagtactagatacacaaatgtttggacttcaaaaagaagttgattttgctgttaaattaggtttagttgaccgcgaagatggcaaacaaattatgttacgtcttgagaaagaactttcaaaattacatgaagcttttacacttgtttaa

SEQ ID NO: 2709 - DNA, 852 bp, Staphylococcus aureus
atggatatatcattaaatttcaatcattatattgatttaaaaaagagtattaaaaatttatgcttaatgaaaaagtttgagccctatgtaaccaatgaaaattatgattttattgaaatgcctttggtagtagatggaaattatgtgctcttaaaaatttatcaagaaaaagacgctttaattaaacttcattatcaggaagtattaaactctaatcgaaaaagtgtaatacaagaaagtgatatagttagaatttcacgaagcatacttaatgaagctcttgatatcaatagtaatataaaatataaatctgatacttttggattaactattatatccgatgcagataattacacaacattaatacggactatacttgctcagcaagtgagcatagaacaatccaataaactatttttattatttattaatacttatggtgaaatttttgaactaaataataaagaatacacttttttaaattgggataaaatattcagtcgaatatataaagaacaaaaagttttagtaggtacgactaataatagaaagcaggctatcataactcttgctgaattacatataaaaaacggcttaagagaaaatgttttacaagttatttcaagtataaaaggtataggttcttggacagtgcaaatgtttatgctatttcaatttcctcacgtagcttttgaaaatattcctgtagcagacataggattgcacagggccatagaaaaaaatcatgatcttccacataaatcgattgataaaagtaagggagaatcttacttccaaaacatgaaatctatagatgtgtttaaatattggtatatatacatggttgaatag

SEQ ID NO: 2710 - DNA, 1227 bp, Staphylococcus aureus
atgaagaattttagaagtattttacggtatattggtaaaacctcaaagtttattgattayccgttattagttacatatattgtattgagtttaattggattagtgatggtatatagtgcmagtatggttccagcaactaaaggyacattgactggtggtatcgatgttccaggaacgtatttttacaaccgacaattagcatatgtcataatgagttttataattgtattttttattgcatttttaatgaatgttaaattactgagtaatattaaagtgcaaaaaggtatgattataactatcgtctcrctattattactgacgttagtaatmggtaaagatattaatggttctaaaagttggataaacttaggatttatgaayttacaggcatctgagttattaaaaattgcaatcatattatatatcccatttatgatyagtaaaaaaatgcctagagtattaagtaaaccaaaattaattttaagtcctattgtattagcattaggttgtacgtttttagttttcytacaaaaagacgtagggcaaacattactaatattaattattttagttgcgatyattttttattcaggaattggggtaaacaaagtcctaagatttggwataccagcagtrctaggattcttagtagtatttgtcattgcattaatggctggttggttaccaagytatttaactgccagatttagtacgctaacagatccattccaattcgaatcaggaactggataccatatttccaattcattgcttgcgataggtaacggtggcgtatttggaaaaggattaggaaatagtgcaatgaaattgggctatttaccagaaccacatacagattttatttttgcaattatttgcgaagaattaggtttaatcggaggattgctagttattactttagagttctttattgtatatcgtgccttccagtttgcaaataaaacatcatcatatttttataaacttgtgtgtgttgggattgccacatactttggaagycaaacgtttgtaaacattggyggtatttcggcaacaattccattaactggtgtgccattgccatttatcagctttggtggatcatcaatgattagtttaagtattgctatgggwttacttctgattgtaggtaaacaaatcaaagtagaccagcaacgaaagaaacaacaacaaaaagttgatataagaagacaatttaattaa

SEQ ID NO: 2711 - DNA, 96 bp, Staphylococcus aureus
atgatgtggtggcaagaagggatgatgacacttattacaggtggcttactaattatttttcgrctttggttagaactgaaatggaaaaataaaaaa

SEQ ID NO: 2712 - DNA, 3453 bp, Staphylococcus aureus
ttgaaacaaataaaaaagttacttgttgctaaccgtggagaaattgcaattcgtatattcagagcggcrgcagaattagacatcagcacagttgcaatttattcgaatgaagacaaaagttcattacatagatataaagcagatgaatcctatttagttggaagtgatttaggtcctgctgaaagttatttaaatattgagcgtatcattgatgtagcaaaacaagcgaatgtggatgcgattcatcctggctatggatttttaagtgaaaatgaacaatttgcgcgtcgttgtgcagaagaaggrattaaatttattggtcctcatttagaacatttagatatgtttggagataaagttaaagctcgtacaacggctatcaaggcagatttaccagttattcctggtacagacggtccaattaaatcatatgaattagcaaaagaatttgcagaagaagctggtttcccgctaatgattaargccacaagtggtggcggcggtaaaggtatgagaatcgttcgtgaagaaagtgaattagaagatgctttccatagagcaaaatcagaagcwgaaaaatcatttggtaatagtgaagtttacatagaragatacattgataatccaaagcatattgaagtacaagtyataggtgacgaayatggaaatatcgtacacttatttgaacgtgattgttcagtacaacgtcgtcatcaaaaagttgtagaagttgcaccatcagttggattatcaycaacattacgtcaacgtatttgtgatgctgcaattcaattgatggaaaatattaaatatgtcaatgcaggtactgttgaatttctagtatctggtgacgaattcttctttatagaagttaaccctcgtgtacaagtwgagcatacaattacagagatggtaacaggaattgatattgttaagacacaaattttagttgcagcaggtgccgatttatttggtgaagarattaatatgccgcaacaaaaagatattacaacattrggctatgccatccaatgtcgtattacaacagaagatccgttaaatgatttyatgccggatactggaacaatcattgcttatcgttcaagcggkggctttggtgtacgtctygatgctggagatggtttccaaggtgctgagatatcaccttattatgattcattactcgtaaaattatctacacaygcgatatcatttaaacaagcagaagaaaaaatggtacgytcattacgagaaatgcgtattcgtggtgttaaaactaatattccattcttaattaatgtaatgaagaataaaaagttcacaagtggtgattacacaactaaatttattgaagaaacaccagaacttttcgacattcagccgtctctagatagaggtactaaaacattagaatatataggtaatgtaacaattaatggtttcccaaatgttgagaaacgtccgaaaccagactatgaattagcatcaattccaactgtatcttcaagtaaaatcgcttcatttagtggtacgaaacaattgcttgatgaagtaggtccaaaaggtgtagctgaatgggttaaaaagcaggatgatgtyttactaacagatacaacctttagagatgcacaccaatcattattagctacacgagttagaactaaggatatgattaatatcgcatccaaaacagcggacgtatttaaagatggtttctcactwgaaatgtggggcggtgctacatttgatgtggcatataatttcttgaaggaaaacccatgggaacgacttgaacgtctacgtaaagctatyccaaatgtattattccaaatgttgttacgtgcttcaaacgcagttggttataaaaactatcctgataatgttattcataaattcgtacaagaaagtgctaaagcaggcatagatgtctttagaattttcgattcwttaaactgggtagatcaaatgaaagttgccaatgaagcagtacaagaagcgggcaaaatctcwgaaggtactatttgttatacaggtgacattttaaatcctgagcgatcaaacatttatactttagagtattatgtcaaactagctaaagagttagaacgtgaaggtttccatattttagcgattaaagatatggcaggcttattaaaacctaaagcygcttacgaattgattggtgagttaaaakcagctgtagatttaccaatycatcttcacactcatgatacaagtggtaatggtttattaacrtacaaacaagcaatagatgctggkgtcgatatcattgatactgctgttgcttcaatgagtggtttaacaagtcagccaagcgccaattcgttatattatgcattaaatggcttcccacgycaccttagaactgatattgaaggtatggagtcacttagtcattattggtcaactgtacgtacttattattcagactttgaaagtgatatcaaatcaccgaatactgaaatttatcaacatgaaatgcctggtggacagtattcgaatttaagtcaacaagctaaaagtttaggtttaggcgaaagatttgatgaagtcaaagatatgtatcgcagagtgaatttcttatttggtgatatcgtaaaagtaacdccatcgtctaaagtagttggtgatatggcactttatatggtacaaaatgatcttgatgaacaatccgtkattacagatggctataaattagatttcccagaatcagtagtgtcgttcttcaaaggygaaataggacaacctgtaaatggttttaataaagatttacaagcggttattttaaaaggccaagaagcaytaacagctcgtccaggtgaatatctagagccagttgattttgaaaaagtccgtgagttgcttgaagaagagcaacaaggtcctgttacggagcaagatattattagttatgtaytatatccaaaagtatatgaacaatatattcaaactagaaatcaatacggaaacttatcgttacttgatacgcctacattcttctttggaatgcgtaatggtgaaacagtagaaatcgaaatcgataarggtaaacgattaattattaaactagaaacgattagtgaaccagatgaaaatggtaatagaacgatttactatgcgatgaatggtcaagcgagacgtatttayattaaagatgaraatgtgcatacaaatgcgaacgttaagccaaaagcagataagagtaatccaagtcatatcggtgckcaaatgccaggttcagtaactgaagtcaaggttagtgtwggtgaawctgtgaaagctaaycagccgttgctaattactgaagctatgaaaatggaaacaacaattcaagcaccatttgacggtgtgattaaacaagtaactgtaaataatggtgacacaatagcgacaggcgatttattaatcgaaattgaaaaagcaactgactaa

SEQ ID NO: 2713 - DNA, 912 bp, Staphylococcus aureus
atgagcaaagagcatactttgtcacaaaatattagcagagttaacttcaaagaattgcaacagataattaaaatgggacttgttcaaggtaacttaattccggcttttgcgggcgcatggctagcagttgtaatgacaaatcattccttcttatcatcaatacctcaaattttattaatgctattwggatctactttaattatgggtggcgcatgtgcgttaaataattattacgaccaagatattgatcgtattatgcctagtaaacaaaatagaccaactgtaaataatagaattacagatcaaaatttattaytwttaagttttggtatgatgttagttggagaaatttgtttgtttttattgaatataccatcaggcgtacttggtcttatggggattgtaggttatgtgtcttattactcaatatggtctaaaagacatacaacatggaacacagtgattgggagttttcctggagcagtaccaccactaattggatgggttgcaattgaaggacaaattagtttaacagcgattgcgctgtttttagttgtattttgttggcaaccaattcatttttatgccttagctattaaacgtaaagatgaatatgcacttgcaaatattccaatgttaccatcagttaarggctttaaacgtacacgtgtcagtatgtttatctggttgattattttattgccagtrcctttattactaataaatttaggtgtcgtattcgtagtgttagctacmttattaaatttaggatggattgcattaggtttaacaacatttaagaaaaattcagatcaaacaaaatgggcaacacaaatgtttatatattcactaaattatttrgtgatctttttcgtgttagctgtrattgtttcattacttactttgatctag

SEQ ID NO: 2714 - DNA, 462 bp, Staphylococcus aureus
atgggcgttccaattttaccaacgatwagtacgacatgtattgtcattagtgcaattttaattgccattggttggagacttatttggaaaagggaaatarataaacacaaaaatgttatgttagctgcagctgtttttgctttaacttttttcttaatctatgcaagtagaacgattttyatcggtaatacagcatttggcggaccagcatcaattaagaaatattatacrattttcttatttttccacattaatttagcaacaattggtggtattctaggyctagttcaaattattactgcatttaaagataaatataatgtrcaccgcaaattcgggccattcgcttcagttatatggttctgtactgcaattacaggtgtagcagtttacttattattatatgtattatatccaggtggagaaacgacatcactgattaaagcaacatttggtcattaa

SEQ ID NO: 2715 - DNA, 1056 bp, Staphylococcus aureus
atgaaaaataaaaaacgtgttttaatagcgtcatcattatcatgtgcaattttattgttatcagcagcaacgactcaagcaaattcagctcataaagactckcaagaycaaaataagaaagaacatgttgataagtctcaacaaaaagasaaacgtaatgttactaataaagataaaaattcaacagyacckgatgatattgggaaaaacggtaaaatcacaaaacgaactgaaacwgtatatgatgagaaaacaaatatactccaaaatttacaattcgactttatcgatgatccaacttatgacaagaatgtattacttgttaaaaaacaaggctcaattcattcaaatttaaagtttgaatctcataaagaagaaaaaaattcaaattggttaaagtatccaagtgagtaccatgtagattttcaagtaaaaagaaatcstaaaactgaaatattagaccaattgccgaaaaataaaatttcaactgcraaagtagacagtacattttcatatagctcaggtggtaaattcgattcaacraaaggtattggacgaacttcatcaaatagctactccaaaacgattagttataatcagcaaaattatgacacaattgccagcggtaaaaataataactggcatgtacactggtcagttattgcgaatgacttgaagtatggtggagaagtgaaaaatagaaatgatgaattattattctatagaaatacgagaattgctactgtwgaaaaccctgaactaagctttgcttcaaaatatagatacccagcattagtaagaagtggctttaatccagaatttttaacttatttatctaatgaaaagtcaaatgagaaaacgcaatttgaagtaacatacacacgaaatcaagatattttgaaaaacagacctggaatacattatgcacctycaattttagaaaaaaataaagawggtcaaagrttaattgtcacttatgaagttgattggaaaaataaaacagttaaagtcgttgataaataytctgatgacaataaaycwtwtaragaaggataa

SEQ ID NO: 2716 - DNA, 726 bp, Staphylococcus aureus
atgaaaaaattagcaacagtaggttctttaattgtaacaagcactttagtattctcaagtatgccttttcaaaatgcgcatgccgacacracttcaatgaatgtgycgaataaacaaagccaaaatgtacaaaatcatcgyccttatggcggagtagtaccacaaggaatgacgcaagcacaatatactgaattagagaaarctttaycccaattaagcgctggcagtaatatgcaagactataatatgaaattgtatgatgcgacgcaaaatattgctgataaatacaatgtgataattacaactaatgtaggggtatttaaaccacatgctgttagagatatgaatggccatgcgttacctttaacaaaagatggcaatttttatcaaacgaatgtagatgcaaatggtrttaatcatggtggtagtgaaatggtgcaaaataaaacaggtcatatgagtcaacaagrccatatgaatcagaacacacacatgaaccaacagccacamatrcaacaaggtcatatgcaatcatcaaaccatcaaatgatgagtccaaaagcaaatatgcattcatcaaatcatcaaatgaaccaaagtaacaaaaaagttttaccagctgctggtgaaagtatgacatcaagtattcttactgcaagtattgccgcactactattagtatctgggttattcttagcatttagacgacgttcaacaaataaataa

SEQ ID NO: 2717 - DNA, 1377 bp, Staphylococcus aureus
gtgaataacacacaatcttcaccacgcagtaatattattattgcgattatgttgtctgcattaacatattggttgtttgcacaatcatttattaatataggacctctcgttggtcaaacrtatcaaacctctcctgccgtgttaaatttatctattagtttaacttccttcgccacaggtatcttcatggtrgctgcaggtgatattgctgataaaataggacaactgagaatgacatacatgggtctcataatcagtatgtttgcatctcttctattaattatatcggacatcactgcactgctcatcatcggtagaattttacaaggtctatcagcagctatcttgttaccttcaacagttggcgtkttaaataatcaatttaaaggagaacatttaagacgagcgattagttatctaatgattagtactgttggkggcatyggcctagctggtgttatcggcggtttaattgcywcaaatttcggatggcaaaygaatttcatcattagtatagkcattgctttcattgccatattrcttctaaaaggcacacctgaaaaagtaagtcaacatagccaycgtcatccrttcgattacaaaggtatgtcgattttcgctgttatgattggtagctttacattattgttaacacaaggattcgaacaaggttggtttagtacattytcawtcatttgtctgagcatttttatcatcactacgytgatattcatcatcatcgaacgtcgacatgaagtaccttttattgatttctcagtattacgcaaccgtccgttcattggtgcatttttaaataactttgttttaaatagyggyctaggcgtwacagtggtctttttcatatatgctcaaacacaccttggtttatcagctgcgcaatctggacttgttacattgccatatgccattgtggcagttgcgatgattcgtttaggtgaaaaagcaacattacgtttcggtggcaaattgatgctcatcattggtccgttgttccctgtcatcggcatcactattattagcatgactcamttawyggcatcacaatatrtcattgcwgttrtyattggkttygtcatwtgygcratwggwaatggtttagtcgcaacaccyggmcttacrattgcaattttcagtatgccwaatgaaaaagttggtttagctacaggattatataaaatgagtggtacattaggtggckcctttggtatagcactaagtactacagttttcagtatgttacaactaaactatgcaccaagtgtagctgcaacygtaacattyatmgtcagcattgtattratgatmctyggctcattgtctgcatacatgatcattccaaaaacrgttaaatcttaa

SEQ ID NO: 2718 - DNA, 666 bp, Staphylococcus aureus
atgaaaaaattagcaacagtaggttctttaattgtaacaagcactttagtattctcaagtatgccttttcaaaatgcgcatgctgacacaacttcaatgaatgtgtcgaataaacaaagccaaaatgtacaaaatcatcgcccttatggcggagtagtaccacaaggaatgacgcaagcacaatatactgaattagagaaagctttaccccaattaagcgctggcagtaatatgcaagactataatatgaaattgtatgatgcgacgcaaaatattgctgataaatacaatgtgataattacaactaatgtaggggtatttaaaccacatgctgttagagatatgaatggccatgcgttacctgtaacaaaagatggcaatttttatcaaacgaatgtagatgcaaatggtgttaatcatggtggtagtgaaatggtgcaaaataaaacaggtcatatgaatcagaacacacacatgaaccaacagccacacatgcaacaaggtcatatgcaatcatcaaaccatcaaatgaaccaaagtaacaaaaaagttttaccagctgctggtgaaagtatgacatcaagtattcttactgcaagtattgccgcactactattagtatctgggttattcttagcatttagacracgttcaacaaataaataa

SEQ ID NO: 2719 - DNA, 900 bp, Staphylococcus aureus
gtgaataaatcaaataaccatgctgaaaatccaaagcctaaagaaggtgttggtacatgggtaggtaaagayattaaagtgcttacttctaaatttggacaagcagatcgtgtctacccttttagagatggttacaaaaattatgtgtttaaagacaaaaacagttattacattgtttcaactaaacgtgaagaaatcgtttcagtgtatgctacaggtgagaawgtcaatgttagtccgttaaaaataggacaacattctgcagaaatttttaatcatacaagtattaatccagaaccktcctttamagttgatggtaaaaaatatgaatttgaactttcagatgaagatttaaaaacacaaacaytgattaaatatggcracatatatgcacaagtgtattctgatcaacaatcgaaaaaggtgctaagtgtacgatttttaacaaaagaaatgttagcagatattgaaccttatcrattaaattctaattctacgtcagaagagcataataagcgtccagttgagcaaaatccaaatcaattaatttctctttatgaagtaacgaatgaaatgagaaaattaaaaggattaaaaccattgaaaatcaatagcgatttagcacatattgcatctaataacttatatgaagcgacctctaatggttctgatagtgttgaatttacagaggacgcattaagagggcaattagataaaaatcaygttacttataaaacaactgctcaaaatgttggttatgcgtttaatgatgtaccaacattaatccatagttggatgaattcagatatacatcgatctcgtctattaaattcaaaatacgatgagatgggtggagatgtaatgagagattattattcactaattttcttagaaaaataa

SEQ ID NO: 2720 - DNA, 375 bp, Staphylococcus aureus
ttggatgatattcagaaaataaaaaaagagctttctgaattagttgaacgtgtkgatgatgttgaaatactagcaaaygaaacagctgatcatgtgcttgaacttagagaggaacataagcaacatcataatgaactaagagaatctcataaagaacttaaagataagcaagataaagttgtagatgagaatttagagcaaacaaagatattaaacagaattgaagaaagatatcaaacgcaagtagatgttgcgcaaaaaaaygaagaaaagacactcgcccaaaataaatggctcgtaggtgccatatgggcgcttgtaacaattgttatgattgcagtcattactgcatcaattactgcgttattaccttaa

SEQ ID NO: 2721 - DNA, 162 bp, Staphylococcus aureus
atgttgaaaaatatggatactctcatgatggacttaattgaaaatggtaaagacgctaacgaagttttaaaaatgccatttcattatgtactttccatatatcaaaataaaaacaatgacatttctgaagaaaaagcagaggctttaattgatgcrttttaa

SEQ ID NO: 2722 - DNA, 351 bp, Staphylococcus aureus
atggcaaaattaaaacgtaacattattcaattagtagaagacccgaaagcaaatgaaattaaattacaaacgtacttaacaccacacttcatttcatttgaaattgtatacgaagcaatggatttaatcgatgatattgaggacgaaaatagcacgatgaaaccaagagaaatcgctgacagattgatggatatggttgtaaaaatttacgataaccaattcacagttaaagacytaaaagaacgtatgcatgcacctgatggaatgaatgcacttcgtgaacaagtrattttcattactcaaggtcagcaaactgaggaaactagaaattttatccagaacatgaaataa

SEQ ID NO: 2723 - DNA, 645 bp, Staphylococcus aureus
atggcagtaaaacatgcaagtgcgccaaaggcgtatattaacattactggtttaggtttcgctaaattaacgaaagaaggcgcggaattaaaatatagtgatattacaaaaacaagaggattacaaaaaattggtgttgaaactggwggagamytraaaacagcwtatgctgatggyggtccaatygaatcagggaayacagacggagaaggtaaaatytcrttacaaatgcatgckttccctaaagagattcgcaaaatwgtwttyaatgaagaktatgatgaagayggygtttayraagaramwcaaggtaaacaaaacaaytaygtagcwrtwtggttcagacaagagcgtmgagacggyacatttagaacrgttttattacctaaagtyatgtttacaaatcctaaaatcgatggagaaacggctgagaaagattgggatttctcaagtgaagaggttgaaggtgaggcacttttccctttagttgataataaaaagtcwgtacgtaartatatctttgaytcagctaacatgacaaatcatgrtggmgacggtgaaaaaggcgaagaggctttcttaaagaaaattttaggcgaagaatatactggaaacgtgacagaggrtaacgaagaaactttgtaa

SEQ ID NO: 2724 - DNA, 408 bp, Staphylococcus aureus
gtgattgatattttgtacaaagttcatgaagtgattagtcaagacagaattattagagagcacgtaaatatcaataatattaagttcaataaataccctaatgtaaaagatactgatgtaccttttattgttattgacgatatcgacgacccaatacctacaacttatactgacggagatgagtgtgcatatagttatattgtccaaatagatgtttttgttaagtacaatgatgaatataatgcgagaatcataagaaataagatatctaatcgcattcaaaagttattatggtctgaactaaaaatgggaaatgtttcaaatggaaaaccggaatatatagaagaatttaaaacatatagaagctctcgcgtttacgagggcattttttataaggaggaaaattaa

SEQ ID NO: 2725 - DNA, 435 bp, Staphylococcus aureus
atgattaatgaagcttcactagcgatattagatgatattgatgaactrgctgatatgatagttgcatcagatatttatgcatcatttgagcaagctaaacaggcgctcgaaaacaatgacgaagcmcatttactttatcaatcatttttaaaatcaaaagagaaatatgatgaagtaatgcgwttcgggaaatatcatcctgattataagaaagtyatgttagagacaagacaacgcaaaagagcatatgagatgcttgacgttgtgatgcattacaaagctagggaaatggcacttcaacatttaatwgatgaagttgttacgaaaattgcgtacgctgtttcagarcatgtcaaaatagaaacaggyaatccattctttcaaacatcacatagtggttgtgcgacgggcggatcctgtaattgttcattataa

SEQ ID NO: 2726 - DNA, 444 bp, Staphylococcus aureus
atgagcataattacaagattgtttaataacagtgattttgaaaaattaaatcaactatgtaaattatatgatgatctaggttatccaacaaatgagaatgatttaaaaaagagactaaagaaaataacgaatcatgatgattacttcctactgcttttgataaaagaaaataaaataattggtttaagtggtatgtgtaaaatgatgttttacgaaaaaaatgcagagtatatgagaatccttgcgtttgttatacattctgaatttaggaaaaaaggttatggaaagagattattagctgattctgaagaattttctaaacggttgaattgtaaagcaataacactaaatagtggtaatagaaatgaaagactatctgcacataaactatatagtgataatgggtatgttagcaatacatctgggtttactaaacaactataa

SEQ ID NO: 2727 - DNA, 363 bp, Staphylococcus aureus
atgaagaaagtgtttaaaaaacctagaattacaactaaacgtttaaatactcgtgttcatttttataagtatactgaaaataatggtccagaagctggagaaaaagaagaaaaattattatatagctgttgggcgagtattgatggtgtctggttacgtgaattagaacaagctatctcaaacggaacccaaaatgacattaaattgtatattcgtgatccgcaaggtgattatttacccagtgaagaacattatcttgaaattgaatcaagatatttcaaaaatcgtttgaatataaagcaagtatcaccagatttggataataaagactttattatgattcgtggaggatatagttcatga

SEQ ID NO: 2728 - DNA, 285 bp, Staphylococcus aureus
atggtgaaatttaaagttgttagagcttttaaagacatagagcacaatcaacacaagtacaaagtaggggagttgtatccagctgaagggtataacaatcctcgtgttgaattgttgacaaatcaaatcaaaaataagtacgacaaagtttatatcgtacctttagataagctgacaaaacaagaattattagaactatgcgaatcattacaaaaaaaagcgtctagttcaatggttaaaagtgaaatcgtcgacttattgaatggtgaagacaatgacgattga

SEQ ID NO: 2729 - DNA, 1146 bp, Staphylococcus aureus
atgactataaatttatcggaaacattcgcaaatgcgaaaaacgaatttattaatgcagtaaacaacggtgaaccgcaagaaagacaaaatgaattgtacggtgacatgattaaccaactatttgaagaaactaaattacaagcaaaagcagaagctgaaagagtttctagtttacctaaatcagcacaatctttgagtgcaaaccaaagaagtttcttcatggatatcaataaaaacgttaactataaagaagaaaaacttttgccagaagaaacaattgatagaatttttgaagatttgacgacgaatcatccgttattagctgatttaggtattaaaaacgctggtttgcgtttgaagttcttaaaatctgaaacttctggcgtagccgtttggggtaaaatctatggtgaaattaaaggtcaattagatgctgcgttcagtgaagaaacagcaattcaaaataaattgacagcgtttgttgttttaccaaaagatttaaatgattttggtcctgcgtggattgaaagatttgttcgtgttcaaatcgaagaagcatttgcagtggcgcttgaaactgcgttcttaaaaggtactggtaaagaccaaccaatcggcttaaaccgtcaagtacaaaaaggtgtatcggtaactgagggtgcttatccagagaaagaagaacaaggtacgcttacatttgctaatccgcgcgctacrgttaatgaattgacgcaagtgtttaaataccactcaactaacgagaaaggtaaatcagtagcggttaaaggtaatgtaacaatggttgttaatccgtccgatgcttttgaggttcaagcacagtatacacatttaaatgcaaatggcgtatatgttactgctttaccatttaatttgaatgttatcgagtctacagtccaagaagcaggtaaggttttaacgtacgttaaaggtttatatgatggttatttagctggtggtattaatgttcagaaatttaaagaaacacttgcgttagatgatatggatttatacactgcaaaacaatttgcttacggcaaagcgaaagataataaagttgctgctgtttggaaattagatttaaaaggacataagccagctttagaaggtaccgaagaaacactataa

SEQ ID NO: 2730 - DNA, 738 bp, Staphylococcus aureus
atgaaagcggagattaaaggcgtcatcgtttccaacgaagataaatgggtttacgaaatgcttggtatggattcgacttgtcctaaagatgttttaacacaactagaatttagtgatgaagatgttgatattataattaactcaaatggtggtaacctagtagctggtagtgaaatatatacacatttaagagctcataaaggcaaagtgaatgttcgyatcacagcaatagcagcaagtgcggcatcgcttatcgcaatggctggtgaccacatcgaaatgagtccggttgctagaatgatgattcacaatccttcaagtattgcgcaaggagaagcgaaagatctaaatcatgctgcagaaacattagaacatgttggtcaaataatggctgaggcatatgcggttagagctggtaaaaacaaacaagaacttgtagaaatgatggctagggaaacgtggctaaatgctgatgaagccattgaacaaggttttgcggatagtaaaatgtttgaaaacgacaatatgcaaattgtagcaagcaatacacaagtgttatcgaaagatgtattaaatcgtgtaacagctttggtaagtaaaacgccagaggttaacattgatattgacgcaatagcaaataaagtaattgaaaaaataaatatgaaagaaaaggaatcagaaatcgatgttgcagatagtaaagtatcagcaaatggattttcaagattccttttttaa

SEQ ID NO: 2731 - DNA, 1188 bp, Staphylococcus aureus
atgagtattctagaaaagatatttaaaactaggaaagatataacatatatgcttgatttagatatgatagaagatctatcacaacaagcgtatgtgaaacgtttagcgattgatagttgtattgaatttgttgcgcgagctgtcgctcaaagtcattttaaagtattggaaggtaatagaattcaaaagaatgatgtttactacaagttaaatataaaaccaaatactgacttatcaagcgatagtttttggcaacaagttatatataaactaatttatgataacgaggttttaatcgtagtaagtgacagcaaagaattacttatcgcagatagcttttacagagaagagtacgctttgtatgatgatatattcaaagatgtaacggttaaagattatacttatcaacgtactttcacaatgcaagaggtcatatatttaaagtacaacaacaataaagtgacacactttgtagaaagtctattcgaagattacgggaaaatattcggaagaatgataggtgcacaattaaaaaactatcaaataagagggattttgaaatctgcctctagcgcatatgacgaaaagaatatagaaaaattacaagcgttcacaaataaattattcaatacttttaataaaaatcaactagcaatcgcgcctttgatagaaggttttgattatgaggaattatctaatggtggtaagaatagtaacatgcctttttctgaattgagtgagctaatgagagatgcaataaaaaatgttgcgttgatgattggtatacctccaggtttgatttacrgagaaacagctgatttggaaaaaaacacgcttgtatttgagaagktctgtttaacacctttattaaaaaagattcagaacgaattaaacgcgaaactcataacacaaagcatgtatttgaaagatacaagaatagaaattgtcggtgtgaataaaaaagacccacttcaatatgctgaagcaattgacaaacttgtaagttctggttcatttacaaggaatgaggtgcggattatgttaggtgaagaaccatcagacaatcctgaattagacgaatacctgattactaaaaactacgaaaaagctaacagtggtgaaaatgatgaaaaagaaaaagatgaaaacactttgaaaggtggtgatgaagatgaaagcggagattaa

SEQ ID NO: 2732 - DNA, 1662 bp, Staphylococcus aureus
atgattagtaataaatacgttgatgaatatataaatttgtggaaacaaggaaagataattttaaataaagaaagaattgatctctttaattatctacaaaaacatatatattcacgagatgatgtatattttgatgaacagaaaatcgaggattgtatcaaatttattgaaaaatggtattttccaacattaccatttcaaaggtttatcatagctaatatatttcttatagataaaaatacagatgaagctttctttacagaatttgctattttcatgggacgtggaggcgggaaaaacggtctaataagtgctattagtgattttctttctacgcccttacacggagttaaagaatatcacatctccattgttgctaatagtgaagatcaagcaaaaacatcgtttgatgaaatcagaaccgttttaatggataacaaacgaaataagacgggtaaaacgccaaaagctccttatgaagttagtaaagcaaaaataataaaccgtgcaactaaatcggttattcgatataacacatcaaacacaaaaaccaaagacggtggacgtgaggggtgtgttatttttgatgaaattcattatttctttggtcctgaaatggtaaacgtcaaacgtggtggattaggtaaaaagaaaaatagaagaacgttttatataagtactgatggttttgttagagagggttatatcgatgcaatgaagcacaaaattgcaagtgtattaagtggcaaggttaaaaatagtagattgtttgctttttattgtaagttagacgatccaaaagaagttgatgacagacagacgtgggaaaaggcgaacccaatgttacataaaccgttatcagaatacgctaaaacactgctaagyacgattgaagaagaatataacgatttaccattcaaccgttcaaataagcccgaattcatgactaagcgaatgaatttgcctgaagttgaccttgaaaaagtaatagcaccatggaaagaaatactagcgactaatagagagataccaaatttagataatcaaatgtgtattggtggtttagactttgcaaacattcgagattttgcaagtgtagggctattattccgaaaaaacgatgattacatttggttaggacattcgtttgtaagacaagggtttttggatgatgtcaaattagaacctcctattaaagaatgggaaaaaatgggattattgaccattgtcgatgatgatgtcattgaaattgaatatatagttgattggtttttaaaggctagagaaaaatatgggcttgaaaaagtcatagctgataattatagaactgatattgtaagacgtgcgtttgaggatgctggcataaaacttgaagtacttagaaatccaaaagcaatacatggattacttgcaccacgtatcgatacaatgtttgcgaaacataacgtaatatatggagacaatcctttgatgcgttggtttactaataatgttgcagtaaaggttaaacccgatggtaataaagaatatattaaaaaagatgaaaatagaagaaaaaccgatgggttcatggcttttgttcacgcattatatagagcagacgatatagtagacaaagacatgtctaaagcgcttgatgcattaatgagtatagatttctaa

SEQ ID NO: 2733 - DNA, 345 bp, Staphylococcus aureus
atggagattatagttgatgaaaacttagtgcttaaagaaaaagaaaggctgcaagtattatataaagacatacctagcaataaattaaaagtagttgatggtttaattattcaagcagcaaggctacgtgtaatgcttgattacatgtgggaagacataaaagaaaaaggtgactatgatttatttactcaatctgaaaaggcgccaccatatgaaagggaaagaccagtagccaaactatttaatgctagagatgctgcatatcaaaaaataatcaaacaattatcggatttattgcccgaagagaaagaagacacagaaacgccatctgatgattacctatga

SEQ ID NO: 2734 - DNA, 417 bp, Staphylococcus aureus
atgataaagattgagaaacacgatatcaaaaagcttgaagaatacattcagcacatcgataactatcgaagagagttgaagatgcgagaatatgaattacttgaaagtcatgaaccagataatgcgggagctggcaaaagtaatttgccgggtaayccgattgaacgatgtgcaataaagaagtttagtgataacaggtacaatacattaagaaatatagttaacggtgtagatagattgatagatgaaagtgatgaggatacgcttgagttattaaggtttagatattgggattgtcctattggttgttatgaatgggaagatatagcacattactttggtacaagtaagacaagtatattacgtagaaggaatgcactgatcgataagttagcaaagtatattggttatgtgtag

SEQ ID NO: 2735 - DNA, 255 bp, Staphylococcus aureus
atgaatttaatcccaagaactagtattgtagtttatttaaaacatatgaaacatgaacgacaaatccgaaaatatggacatatcgttcattcaaatagagatcgtaaatttgtaattatgtatgtgaatgagcargatgttgatcaaattgtacataaactaatgcaacttaaatacgttagacacattgatggctcaccatataaatacttaaagaaaacttacgaaaaagagaaacacgaaatatataattaa

SEQ ID NO: 2736 - DNA, 435 bp, Staphylococcus aureus
ttgtttatttctctagctatttggtcaataaattcgatgggtaataaacaatgcattagtttgaatttattgctttcggatgatactttcgcagtaatttcagtaatgacaactttgggaactgctattttaggaggtrtagcaccttcaatatatggtatttttacatcgcctatagataaaaaaagtagttttagggctattagcgattgggagcaagaacaaagaaataatgttaaagatctgatgatgctattaccatttacattacttagtattttaattgtgatttttatttttcagtttgcatattctaaactatttaatacgatagctattataatatttattataatacttgttgttatgttttttttaattttattaatctgttataaaattactgtgawgatatgcagatatttttcaaaagaa

SEQ ID NO: 2737 - DNA, 201 bp, Staphylococcus aureus
atgaggaggaacaggaaaatgagcattagtgtaggagacaaggtttttaatccagaaacaaattcaactttagaaattgtacaacttgttggcgatattagagacacgcattacaagttatctgacggatctattattagtcttatagactttgttgttaaaccaattcatttaatcaaggaggagcaggaaaatgactaa

SEQ ID NO: 2738 - DNA, 174 bp, Staphylococcus aureus
atggaaatgatgaatgctgaaaagcatatgcaaatgatgcaaatgttacaaaattgtgtgattgataagtatgtatcacacgacgaatacgaagagttaattgccatagataagcatggtaataaaatgtttattaaattttatccgaatacggaggatgacactaatgaataa

SEQ ID NO: 2739 - DNA, 543 bp, Staphylococcus aureus
atgcgcgtcattgcaggtaaacataaaagtaaagctttagaaagtatggaaggccgtaatacgagaccaactatggataaagttaaagaaggtatctttaatagtttatatgatgtgtcaggtataggtttagatttatttgcaggaagyggggcgcttggaatagaagcactctctcgaggtatrgataaggtwatctttgttgatcaaaattttaaagctgtaaaagttattaaatcaaatcttgcgaatttggatttagaggcacaatctgaagtttataaaaataatgcagatagagctttaaaagcattgtcaaaacgkgatattcaatttgatgtcattttcttagayccaccttataataaaggtctcattgataaagctttaaaactaatttcagagtttaatttattgaaagaaaatggtatcatcgtttgtgaatttagcaatcatgaagaaatagaytatcaaccgtttaatatgattaaacgttaccattatgggttgacagacacattgttattagaaaagggagaatag

SEQ ID NO: 2740 - DNA, 327 bp, Staphylococcus aureus
atgactaaaaattataaagacatgacgcaggaagaattaagagatttattggctgaaaagaatggagaattgtttgaagtagtgaatgaaatcaataaagaaactgaatttgccgttttacttttttcaactgtaggggttagcaatggagatactacatcatcgtcacattgtgcgcttggggatattgtaggtcttgctaatttattgaataacgaaaatgattaccacgatatcgctaatgttatcgaaatgtataaattaaaaaaacttttaggtctagctgacaacaaggaggacgagaatgatgtattacaaaacgggtga

SEQ ID NO: 2741 - DNA, 1119 bp, Staphylococcus aureus
gtgatattattcacatgtcgatacctatcaacaatattaaatataagaaagaaggttataacaatgaaaaataaaaagcgcgtattcattgcgtcatcattatcatgtgtacttttattgttatcagcagcaaatacagaagcgaattcagcgaataaagactcacaagaccaaactaagaaagaacatgttgataaggctcaacaaaaagaaaagcgtaatgtgaatgataaagataaaaatacaccaggacctgatgatattggtaaaaacggtaaagttacaaagcgtactgtatctgaatacgataaagagacaaatattttacaaaatttacaattcgactttatcgatgatccaacatatgacaagaatgtcttacttgtcaaaaaacaagggtcaattcattcaaatttaaagtttgaatctcatcgaaatgaaacaaacgcatcatggttaaaatacccgagtgaatatcacgttgattttcaagtacaaagaaaccctaaaactgaaattttagatcaactgccaaaaaataaaatttccactgcgaaagtagatagtacattttcttatagcttaggtggtaaattcgattcaacaaaaggtattggacgaacatcatctaatagctattctaaatctatcagttataaccaacaaaattacgacacaattgcgagcggtaaaaataataatagacacgtacactggtctgttgttgccaacgatttaaaatacgggaatgaaattaagaacagaaatgatgaattcttattctatagaaatactagattatctactgtagaaaatcctgaattaagttttgcatcaaaatatagatatcctgcgcttgtaagaagcggatttaacccagaattcttaacttatatttctaatgaaaagtcaaatgaaaaaacacgattcgaagttacatatacacgtaatcaagatattttgaaaaataaacctggtatacattatggacaaccaattttagaacaaaataaagatggtcaaagatttattgtagtttatgaagtagattggaaaaataaaacagttaaagtcgttgaaaaatactctgatcaaaataaaccatataaagaaggataa

SEQ ID NO: 2742 - DNA, 483 bp, Staphylococcus aureus
atggaacatacaatagcggtcattccgggtagttttgaccccattacttatggtcatttagacattattgagagaagtacagatagatttgatgaaattcatgtctgtgttcttaaaaatagtaaaaaagaaggtacgtttagtttagaagagcgtatggatttaattgaacaatctgttaaacatttacctaatgtcaaggttcatcaatttagtggtttactagtcgattattgtgaacaagtaggagctaaaacaatcatacgtggtttaagagcrgtcagtgattttgaatatgaattacgcttaacttcaatgaataaaaagttgaacaatgaaattgaaacgttatatatgatgtctagtactaattattcatttataagttcaagtattgttaaagaagttgcagcttatcgagcagatatttctgaattcgttccaccttatgttgaaaaggcattgaagaagaaatttaagtaa

SEQ ID NO: 2743 - DNA, 1617 bp, Staphylococcus aureus
atggttaaacaattgaaattctctgaagatgcrcgtcaagcaatgttacgtggtgtwgaccaaytwgcaaatgcagttaaagtaacgattggtcctaaaggacgtaatgttgtattagataaagagtttacagcacctttaattacgaaygatggtgtracgattgctaaagaaatcgaattagaagatccatatgaaaatatgggrgctaaactagttcaagaagtygcaaataagacaaatgaaattgctggtgacggtacgacaacygcaacagtattagctcaagcaatgattcaagaaggmttgaaaaatgttacaagtggtgcraacccagttggtttacgwcaaggtatcgacaaagcagttaaagttgctgtwgaagcrttacatgaaaattctcaaaaagttgaaaataaaaatgaaatwgcgcaagtaggtgcgatttcagcagcagatgaagaaattggacgytatatttcwgaagctayggaaaaagtaggtaacgatggtgtcattacarttgaagaatcaaatsgmytraacactgaactwgaagtggttgaaggtatgcaatttgatcgtggttatcaatcaccrtatatggttactgattcagataaaatggttgctgaattagaacgcccataywttytagtaacagataaraaaatctcktctttccaagatatcttacctttattagaacaagtggttcaatctaatcgtccaatcttaattgtagctgatgaagttgaaggcgatgcattaacaaatatcgtrctaaaccghatgcgtggyacatttacagcygttkcwgtaaargcrcctggtttyggtgatcgtmgwaaagcratgytwgaagatttagctattttaactggtgcgcaagtgattacwgatgatttaggcttagayytwaaagatgcawcrattgatatgttaggtactgcaagtaaagtagaagtwactaaagataatacmactgttgtwgatggtgacggtgacgaaaacagcattgatgcacgtgtwagccaattgaaatctcaaattgaagaaactgaatctgactttgatcgtgaaaaattacaagarcgcttagctaaattagcaggyggtgttgcagttatyaargtaggtgcagcaagtgaaacagarcttaaagaacgtaaattacgtatygaagatgcwttaaaytctacacgtgcagcagttgaagaaggtattgttgcaggtggtggtactgcaytagtaaatgtttaccaaaaagtaagtgaaawtgaagcwgaaggygacattgaaacaggtgtraatattgtacttaaagcaytaactgcaccagttcgycaaattgctgaaaatgcaggattagaaggytctgtyatygtwgaacgyttgaaaaaygcagarccrggtgttggttttaaygstgctacaaacgagtgggttaatatgttagaaghaggtatcgttgatccaactaaagtaacacgctcagcattacaacatgcwgcaagtgttgcrgcaatgttcttaacractgaagcggttgtrgcatcaattccagaaaaaaataatgaccaacctaacatgggtggcatgccrggaatgatgtaa

SEQ ID NO: 2744 - DNA, 342 bp, Staphylococcus aureus
atgttagataaaatatcaaacacgttaaagaagaagttatatcaaaagggtgaaactcacagtggaaatgacaatttaatcatacaaggatacttaattgctcaaatagaaaaaaattattctgaagaagcattggctacaaaatccataaatgcaaacgatttattaactttagcatatgtgaaagttttagaaggtgcgaacatatttggcggttcatatatttggatagagtatgaggatgtagatagattaagagaattttatagaaaatttggatttacagaaatcaaagatcatacaagtgaaaataatttgaagatggctattcttaaaatataa

SEQ ID NO: 2745 - DNA, 351 bp, Staphylococcus aureus
atgaaatttaaaaaatatatagtagcaggaacattagcagtactattatcaacaacagcagtatcaacgttagatgggaataaagcagatgcaagtagtaagaaagactatataattcaaagtgagtttcatgataaacgaattgctgaagaattgaaatcattacttgatcaatcttatgtaaatgatttagctgcaggaagcttaaacccatactacaaacgtatgattatgatgaaccaatatagagcaaaagcagcactaaaaagtaataatttcgcaaaaatggctgaagctaaagttggattagaaaacatttacaaagaaattgatgaaattataaatagataa

SEQ ID NO: 2746 - DNA, 558 bp, Staphylococcus aureus
atgaaatggtcaattacgcaattaaggaaatatcaaggtaagccatttgaatttgatcaaacggtgagttttgacaatttaaaagaatcattagatttaattgatttatctccaattacaatccaaggtcagttaaccattaagtcaacagaagtcgttgcggatattcacattactggaacgtatacaatgccttgtgcacgtactcttgtaccagtwaaagtcccactagatgtaactactacagaagtatttgatttagaagggtacaatcagtataacgatgatcaagatgatgtagatgaacactatcacattattaaagatggtatggttaatcttcaggatattgtcgaggatatagttattattgagaaaccaatgagagcttattcagagcaaagtgaccaaatgttgacagtaggtaatggttgggaagtaatcgatgaggatcaattagatgagcttgctaaacagcaagaacaagatgattcagaatcacgacaagttgatccaaggcttcaaaaattacaacaattatatgataaagagcaataa

SEQ ID NO: 2747 - DNA, 285 bp, Staphylococcus aureus
atgctaaaaccaattggaaatcgtgtgattattgagaaaaaagaacaagaacaaacaactaaaagtggtattgttttaactgatagtgctaaagaaaaatcaaacgaaggcgttatcgttgcagtaggaacwggacgyctattaaatgatggtacaagagtgactcctgaagtgaaagaaggggaccgtgtcgtgttccaacaatatgcwggtacagaagttaaacgagataatgaracwtatytrgtwttaaatgaagaagatattttagcrgtwattgaataa

SEQ ID NO: 2748 - DNA, 438 bp, Staphylococcus aureus
atggttgaaaggagaacggatttgaaaatatttattggtacgatgttaacttttttatttgtatgctcattgattgtgtgtggattttttgcttataaaatatattttcctacagatgctgaaaataagtcagaaatcccgaatcatatgcaagaaaacaaacatgaaaaagaaaacacgcataatattaataataatggtagtgaagctaatgagaattttaataataataagaatcgtatagaaaatattgaagataaacaaaaagcatatgctttgatgagtataccacgacataatttaccagaaagtgagaaggctatttatgacaaagtaatttcaactgccattcaaaatataaataatggggtggggaatgaagaagactttaggctcaaagaaatatacgatggtatacaaagcgtgcaacctcaataa

SEQ ID NO: 2749 - DNA, 174 bp, Staphylococcus aureus
atggcagtaccaaaaagaagaacttctaaaactagaaaaaacaaacgtcgtacgcatttcaaaatttcagtaccaggtatgactgaatgcccaaactgtggcgaatacaaattatcacaccgtgtatgtaaaaactgtggttcttacaatggcgaagaagtagcagctaaataa

SEQ ID NO: 2750 - DNA, 1248 bp, Staphylococcus aureus
atgtcatatcattggtttaagaaaatgttactttcaacaagtattttaattttaagtagtagtagtttagggcttgcaacgcacacagttgaagcaaaggataacttaaatggagaaaaaccaactactaatttgaatcataatataacttcaccatcagtaaatagtgaaatgaataataatgagactgggacacctcacgaatcaaatcaaacgggtaatgaaggaacaggttcgaatagtcgtgatgctaatcctgattcgaataatgtgaagccagactcaaacaaccaaaacccaagtacagattcaaaaccagacccaaataaccaaaacycaagtccgaatccwaaaccagatccagataacccgaaaccaaaaccagacccagataaaccaaagccaaatcyggatccaaaaccagatccagataacccgaaaccaaawccagatccaaaaccagacccagataaaccaaagccaaatccggatccaaaaccagatccagataaaccaaagccaaatccgaatccaaaaccagaccctaataagccaaatcctaacccgtcaccagatcccgatcaacctggggattcmaatcattctggtggctcgaaaaatgggggracatggaacccaaatgcttcagatggatctaatcaaggtcaatggcaaccaaatgggaatcaaggaaactcacaaaatcctactggtaatgattttgtatcccaacgatttttagccttggcaaatggggcttacaagtataatccgtatattttaaatcaaattaataagttgggcaaagattatggagaagttactgatgaagacatttataatattattcgaaaacaaaatttcagcggaaatgcatatttaaatggattacaacagcaatcgaattactttagattccaatatttcaatccattgaaatcagaaaggtactatcgtaatttagatgaacaagtactcgcattaattactggtgaaattggatcaatgccagatttgaaaaagcccgaagataagccggattcaaaacaacgytcatttgarcckcatgaaaaagaygattttacagtwgtwaaaaaacaagaagataataagaaaagtgcgtcaactgcatatagtaaaagttggctagcaattgtatgttctatgatggtggtattttcaatcatgctattcttatttgtaaagcgaaataaaaagaaaaataaaaacgaatcacagcgacgataa

SEQ ID NO: 2751 - DNA, 684 bp, Staphylococcus aureus
ttgaaaaatattttaaaagtttttaatacaaygattttagcgttaattatcatcatcgcgacattcagtaatwctgcaaatgccgcagatagcggtactttgaattatgaggtttacaaatacaataccaatgacacgtcrattgctaatgactattttaataaaccggcaaagtacattaagaaaaatggtaaattgtatgttcaaataactgtmaaccacagtcattggattacwggaatgagtatmgaaggacataaagaaarwattattagtaaaaayactgccaaagatgaacgmacttctgaatttgaagtaagtaagytraacggtaaaatagatggraaaattgaygtttatatcgatgaaaaagtraayggaaarccwttcaaatatgaccatcattacaayattacatataaatttaatggaccawctgatgtagcaggtgctaatgcaccaggtaaagatgataaaaattctgcttcaggtagtgacaaaggatctgatggarcgactactggtcaaagtgaatctaayagttcgaataaagacaaagtagaaaatccacaaacaaatgctggtacacctgcatatatatatrcaataccagttgcatccttagcattattaatcgcaatcacattgtttgttagaaaaaaatctaaaggcaatgtggaataa

SEQ ID NO: 2752 - DNA, 135 bp, Staphylococcus aureus
atgagttgtttaattttaagaatttttatcttaattaaggaaggagtgatttcaatggcacaagatatcatttcracaatcrgtgacttagtaaaatggattatcgacacagtgaacaaattcactaaaaaataa

SEQ ID NO: 2753 - DNA, 1077 bp, Staphylococcus aureus
atgagaaatgttaaacaaattgctacaaaatctattatagctattattagcttakgtatwcttacatatacaacaatgattggtagcgtgttggctgatgagataaaatatccatcagccaaatttaatcaacctgaagcaaaagataaaacagaattaactwcatcaatttttgatgaaaagataaaagagaataaagcgttagarttactaatttttaatcaagaaaataaaaatgtaactgaggaacaacaactagttgacgaaaaggcgcaattgatttcagatatgactggtaaaatttacttgcaagtaaarctaaaaggtcaaatwgataaagaacaacttgtttttcaaaatgacaaaaatgaagaattyccytttgttataaaagatgaaaaggatgacacaatagtaagaattttaattgaacagcatatggataaaatcaatatgcatgttaaaacgttggctgaaaagaaaratctagataacaaagaaatgstgtattctattcattttaaagagaaaaaagtacaacatgaygatgcaaaagaagtgccttcaaaacatcaaaatcaagaaaataatcaagatcagcttaaaaaagatattgatgacaaaaaagatagtcaaaaatcagayaytaaggaaagacgtactagcctttttactgaaaaaggattaaatgatattcctgtacaaaaagataaagtgcaacaagacagtaataaaaagattgaaaaygagcgacctaaagcatcaggtacattaaaagttgaaaatagccctccaacartaaaaaaggttgaaaataatcacaaagagcaaccgaaacataaagatgaaaaatcaaaaaaggaaaagaaaaaagtagttgaaaaagaaaaagcgttaccagcttttaatagagatgatgatagcaagaatagtagtcaattatctagtgatattaaagaacttgatgaaccaaatcataaaaagcaatatatkttatttgcagytggcattgtgttagcaacyattttacttatttcggcacatttatacagcagaaagagaggtaaccaagtttga

SEQ ID NO: 2754 - DNA, 960 bp, Staphylococcus aureus
atgagacgtytattttcaataggagaagcgttaattgattttattccaaatrttacaaatgcgaatttaaaagatgttcaaacatttacgaagcaaattggtggcgcgccatgcaatgtakcttgtacagttcaaaagttaggacaacaagcgyatatgattacacaattaggtaatgatgcatttggagatagcattattgaaacgatatcaagtattggtgtagatgtatcaaaagtgtatcgcacgaatgaagcaaacactgcgttagcttttgtgagtttgactgaagcgggmgagcgagatttttctttttatcgtaagccctctgctgatatgttatttgaaccaagttttgtgaatgatattgatgtgaatgaaaaygatgtagtacatttttgttctgttgatttggtcgatagtccratgagagatgcrcattatcaattgattaccaaaacattaaatgcaaatggtactgtcgtatttgatcctaatgtaagattgccattatgggataacgcwgaagatttaagacaaactattcatacctttttgccattggcrcatattgtaaaagtttcagatgaagaattagaatttattacaggtattcatgatgaaaatgaagccattcaatcattatttacaggtaatgtyactgtagtcatttatacgaarggagcagatggtgctgccgtatatttgaaraatggtattaatcattatcatagtggctataaggtaaaayctgttgatacaactggggcaggggatgchtttattggtgcagttattagcaggattttagcaaccgatgtgttaaatttaactcagttatttgaaaatgaaggtgaggaaattttagcgtttagcaatcgcgttgctgcaatagtgacaacgaagtatggtgcyattaatagtttgccaacattacaagaggttgaacaagcattttaa

SEQ ID NO: 2755 - DNA, 879 bp, Staphylococcus aureus
ttgagaatcataaagtatttaaccattttagtgataagcgtcgttatcttaaccagctgtcaatcttccagttctcaagaatcaactaaatccggcgaattcagaatcgtaccaacaactgttgcattgacaatgacattggacaaattggatttaccaattgtcggcaaacccacgtcatataagacattgcctaatcgttataaagatgtaccggaaattggtcaaccaatggagccgaatgttgaagctgttaaaaarttaaaaccaacacatgttttgagtgtgtcaacgattaaagatgaaatgcaaccattttacaaacaattaaatatgaaaggctacttttatgattttgatagtttaaaagggatgcaaaagtcgattacacaattaggtgatcaatttaatcgtaaagcacaagcaaaagaattaaatgaccatttaaattctgtaaagcaaaaaattgaaaataaagcagctaaacaaaagaaacatcccaaagtattaatattaatgggtgtacckggtagctatttagtagcaactgataaatcatatattggtgatttagttaaaatagcaggtggagaaaatgttattaaagtgaaagatcgtcaatatatttcgtctaatactgaaaatttgttgaatatcaatccagatattattttamgattaccacacggaatgyctgaagaagttaagaaaatgtttcaaaaagaatttaaacaraatgatatttggaaacattttaaagctgtgaaaaataatcatgtttatgacttagaggaagtgccattcggtattacagcaaatgttgatgctgataaggcaatgactcaattatatgatttattttataaggataaaaaatag

SEQ ID NO: 2756 - DNA, 1485 bp, Staphylococcus aureus
atgaccgaatggactrgagaagaacgttatcaacgaatcgaggacgttgatactgaktattttaaaacattaaaacaacaagttgatcaatcaaaatttcgtcaacaatttcatatacaaccagaaacrggyttattaaaygaycccaacggactwattttttataaaggraagtattatgtttcacatcaatggttcccattaggcgcagtacatggcttaaagtattggtataactacacgagtgatgacttaataaactttaaasctgaagggccaatwttaaayccagatacyaaatatgacagccatggtgtwtatagcggtagcgcttttgaatataacgggcatttatattatatgtacacaggaaatcatcgagataatcattggcaacgmcatgcgagtcagatgatcgcacgattgaaagaagacggttcagttgaaaagtttccaaagccagtaattagccarcaaccagaaggatatacragtcattttagagatcctaaagtttttaaatatrrtgagaaatattatgcratcattggygcacaaaataatgatcagcaaggtcgattattactttataatactgaagatataattaattggcattatttaggtgaaataaatacagagttrgatgattttggatatatgtgggaatgcccwgattactttaatktagataatcaagatgtcatacttatttgtccacaaggtattgaaccaaaakgcratcagttcaamaatatttatcaaagtggttatatacttggaaagtttgatattgaaaagttaacatatgaacatgaaaattttgtcgagcttgataatggytttgatttctatgcacctcaaacatttttagatgaaaaaggccgacgagtactaattggatggatggggttaccggaaatcgaatatcctacwgataatgaaggatgggcccattgcttaacaaytcctcgtgtattaaatgtagaaaatggtcaacttaagcarcgtccatatccagcgttggaaaaattacgtcacaataaagagacagcattaggctacgcaaataaatttactcgaaaattacatccgtatgaaggtaaacagtatgaattaatcatagatattttggataatgatgctaccgaagtrtactttgaattacgtacrtctaagacttcttcaacattaatygcttataacaagcgtgaaaataaaataacattrgatcgcagcgacagtggtttattgcckacaaatgttgaaggtacgacgcgtagtacgatattagamacgccattaaagcaattacaaatttttgttgatacatctagtatagaaattttctgtaatgatggrgaacgtgttttgacatctcgaattttcccgacagaagacgcactaggtattaaaacatcaacagaatcagggcaagtatatttacaatttactaaatatgatttaaaggatgaacataaatga

SEQ ID NO: 2757 - DNA, 708 bp, Staphylococcus aureus
atgaaatcaacaccacacattaaaccaatgaatgacgtcgaaattgcagaaacggttctattgccaggagatccgttaagagctaagttcattgcagaaacwtatttggaygatgtggaacagttcaatacagtgcgaaayatgtttggttttaccggaacatataaaggtaaaaaagtttctgtcatgggttcaggwatgggtatgccatctattggcatttactcttatgaattaattcatacatttggttgtaaaaaattaattcgcgttggytcttgtggcgcgatgcaagaaaacattgatttatatgatgtgattrttgcacaaggtgcctctactgattcaaattacgttcaacaatatcaattaccaggtcattttgcgccaattgcttcttatcarttattagaaaaagcwgttgraacagcacgtgacaaaggtgtacgtcatcatgtaggtaatgtgttatcaagtgatattttctataacgcggatacaacagcgagtgaacgttggatgcgtatgggtattttaggtgtagaaatggaatcagctgcattatacatgaatgcaatttacgctggtgtcgaagcattaggtgtgttcacagtgagcgatcatttaattcatgaaacgtcaacaacacctgaggaaagggaacgtgcatttacagatatgattgaaattgcactgtcattggtktag

SEQ ID NO: 2758 - DNA, 660 bp, Staphylococcus aureus
atgatagaaattaataayctttcaaagcgttaccgyaacaaacagattttcaatcatttaacyatgtcctttgawagtaatcgtttaaccgtattacttggtgataatggygctggaaaatcaacattacttcgtatgatygctggtattgaaaaagctaatgatggaactatcaactatttcggcgaaaaatggaatcaaagacaaatmcaaaatcacatcggttatgtgccacaagacattgcgttatttgarcacatgacagtggctgaaaacattaawttttttaaatcactttgtaaaaatccaattaaygatacaactatcaacgaatatttacagcaattaaaytttgatgatacgtctgccaaagtatctacattgtccggtggraataaacgtaaaattaatatattagtaggtttactaggtcaacctcgaattcthattttagatgaaccgacagttggtattgatttraaatctagacatgacatccaccaactrcttaacatyatgaaatctaaatgtttaattatattaactacccatcatttagatgaagtkgaagcacttgcagatgatatcaagttaattggccaagatcctttttatcaacatgttttagaggacaarcaatggrcttatacctattattaa

SEQ ID NO: 2759 - DNA, 966 bp, Staphylococcus aureus
atgataaaaaataaaaagaaactactatttttatgtttgttagtcattttaatcgcaackgcttatatttcgtttgtaaccggtacaattaaattgtcatttaatgacctawttacaaaatttacaactggtarcaatgaagcagtggattcaatyattgatttgcgattgccacgtatattaattgcattgatggttggcgcaatgttagcagtttctggagcattattacaagcagcactacaaaatcctttggcagaggcgaatatcattggcgtttcmtcaggtgcacttataatgagagcactttgtatgttgtttattccacaattgtacttttacttaccattattaagttttattggaggtttaataccatttttaataattatattgttgcattctaaatttagattcaatgctgtwagtatgatattagtaggtgttgcgttattcgtattattaaatggtgttttagaaattttaactcaaaaccctttaatgaaaattcctcaaggcttaacaatgaaaatatggagygacgtatacatattagcagtatcagcattattgggattaatattaacattactattgtcccctaaattgaatttactaaatttagaygacatacaagcgcgaagtatcggttttaatattgatcgttacagatggttaacaggtttattagcagtatttttagcaagtgcaactgttgcgattgttggacaactagcctttttaggtattattgtgccacatgtggttagaaagctagttgggggcaattacagagtacttattccgttttctacagttattggtgcatggctattgttagtggctgatttattaggacgagtgatacagcctcctytagaaattccagccaatgctattttaatgattgtcggtggtccaatgctaatttacttaatttgtcaaagtcaacgaaatcgaatctaa

SEQ ID NO: 2760 - DNA, 951 bp, Staphylococcus aureus
atgaaaaatatatctgatattgccaaattggcaggcgtttcaaaaagyacagtatctagatttttaaataatggatctgtcagtaaaaaaacaagtgaaaaattaacaaraattatagcagaacatgactatcaaccgaatcaatttgctcaaagyttaagagcgagacaaacacaccttattggtgccattatacctagaatgaattcatatgcagtagaygaaacaatcaaaggattggcaaaacaatgccaaaaatatgaatcacaattaattttaaattayacaggtttaaatatcgaagcagaaatacaagcgcttgaaacattagcacgcagtaaagtagatggtattgttttaatggctacagayataacagagagacatattgaagtcattaataaaatgaatgtaccaatcgttattgttggtcaacaacatgaacaactkcatagtattgtgcatgatgattataaagcaggtcaaattataggygaatggattggtcaacagggatatcaacaagttgaagtgtttagygtragtgaaaaagatattgcagttggtatacatagaaaacgtggtttacttgaccagttagcyaaataycaaattaaacctaatatacatgaaacaaattttacttatgtggaagcacaaaaagatgttgcaaatgytttggaaaatgtrgagcaagtagatgcggttgttggagcaactgatacgattgcattagctgcctataaatattattctgataaaaawgatgttatgaaaccacatcaaatatatggttttggtggtgayccaatgacacaattagtgtctccatcgataaaaacaattcattataattattttgaagctggycaatgcgcgatggaagagatacaacagatgcttaaaaagcaagatatgccatatagcgtcacagtagatgttaatatttag

SEQ ID NO: 2761 - DNA, 735 bp, Staphylococcus aureus
atgagaatgaagcgatttttaactattgtacaaattttattggttgtaattattatcatttttggttacaaaattgttcaaacatatattgaagacaagcaagaacgcgcaaattatgagaaattacaacaaaaatttcaaatgytgatgagcaaacatcaagmacatgtgagaccacaatttgaatcacttgaaaaaataaataaagacattgttggatggataaaattatcaggaacatcattraattatccagtactacaaggtaagacaaatcacgattatttaaatttagattttgagcgagaacatcgacgtaaaggtagtatttttatggattttagaaatgaattgaagawtttaaatcataatactattttatacgggcaccatgtcggtgataatacgatgtttgatgtgttagaagattatttaaagcaatckttttatgaaaaacacaagataattgaatttgacaataaatatggtaaatatcaattgcaagtatttagtgcatataaaactactactaaagataattacatacgtacagattttgaaaatgatcaagattatcaacaatttttagatgaracaaaacgtaaatctgtaattaaytcagatgttaatgtaacggtaaaagataraataatgactttatcaacgtgcgaagatgcatatagtgaaacracgaaaagaattgttgttgtcgcaaaaataattaaggtaagttaa

SEQ ID NO: 2762 - DNA, 1251 bp, Staphylococcus aureus
atgaatcttaacgatacgatatttatgtttttgtgtacattattagtttggytaatgacaccaggattaagtttattttatggtgggttagttsaatctaaaaatgcgctwaatactgtcatgcaaagtatggcagcaattgtgcttgttacatttgtatggataacagtwggttttacaattagttttgggrawgggaatttatggttyggwaaytgggaatatacwtttcttaatcatgtaggtttygcgacwcaagaagatattagyccrcatattccwttsgcwttrtttatgttattycaaatgatgttttgtacgattgcaatytcwatwttatcwggttcaatcgctgagaaaatgaagtttattccttatttattattygtagtaatatggactgctcttgtatacagtccagtagcacattgggtttggggcggcggttggattaayaaactcggtgtattagatttcgctggaggtacrgtygttcatattacatcaggtgtttctggtttagtattagctatwatgattggaaaaggaaacaaacattctgaatcaacaccacataatcttatcattacrttgattggcggtatattcgtgtggattggttggtatggatttaatgtaggyagtgcttttacatttgatmawattgcratgcttgcatttacraatacwgtyatttcwgccagtgcmggkkctatwggttggttaattttagaatatatttttaaaaagacgacaagtttacttggacttttactcggtgcattagcaggattagttgtyattacwcctgcagcwggatatgtaacatatcttagtgcaacaatmatggctttaataggrggtatctgttgttatattgtcatyaattacatmaaggtaaaaytaaartatcatgatgcattagatgcatttggtatycayggtgttggyggtattattggtgcwgywttaacagcmkttttccaaagtaaaaaagcmaatccwgayattgaraatggytttatttayactggtgacrtrcatattatacttgtrcaaatattatgtgtaacagcagttgtaatttttagyatmgtcatgacgtttattattgcgaaagtaattaaattaattacaccattatctgttacrgaacaagaaacgaatataggrttagacaagattgttcayggtgaacatgcttactttgaaggtgagytaaatagattcaataaacatattcgatattag

SEQ ID NO: 2763 - DNA, 324 bp, Staphylococcus aureus
atgaaatttatggcagaaaataggctgacgttaacaaaaggaacagcaaaagatattatagaacgattttacacgagacatgggattgaaacattagaaggctttgatggcatgtttgttacacaaactttagaacargaagattttgatgaagtgaaaattttaacagtttggaaatcaaagcaagcttttacggattggttaaaatctgatgtctttaaagcagcrcataaacatgttagaagtaaaaatgaagatgaaagtagcccgattathaataacaaagtaattacatatgatataggctatagttacatgaaataa

SEQ ID NO: 2764 - DNA, 741 bp, Staphylococcus aureus
atggaacaaattacttctgcacaaaataatagaattaaacaagcgaacaagctaaaaaagaaacgtgagagggataaaactggattagctttaattgaaggtgtgcatttaattgaagaagcttatcaaagtggrattgtaattacacaattatttgcaattgaaccggcaagattagatcagcaaattatcgcatacgcgcaagaagtttttgaaataaacatgaaagttgctgaatctttatcaggtacagtgacaccacaagggtttttcgcaatcattgagaagccrcahtatgatatttctaaagcacaacaagtattgctyatcgatcgtgttcaagatcctggaaatttaggcacattaattagaactgcggatgctgctggaatggatgctgtaataatggaraagggtacgacagatccttatcaagataaagtgttgcgagcgagtcaaggtagtgttttycatttgccagttatgacacaagatctcgatacgtttattactcartttaatggtcctgtttatggtacagcacttgaaaacgcagtggcatayaaagaagttacttcaagtgattcttttgcattactattaggtaatgagggagaaggtgttaatcctgaattattagcacatactacacaaaatttaatcatacctatttatggtaaagctgaaagtttaaatgtagcgattgcaggtagtattttactttatcatttgaaaggttga

SEQ ID NO: 2765 - DNA, 225 bp, Staphylococcus aureus
atgatacacgaattaggtacagtaggaatggtatgtccatttccgttaattgaagcgcaaaagaaaatggcaacattgcaatctggagatgaattaaaaattgattttgattgcacrcaagcgacggaagcyattccaaattgggcwgcagaaaatggwtatcctrtaacaaactatgaacaaattgataatgcttcatggacaattacarttcaaaaagtttaa

SEQ ID NO: 2766 - DNA, 1344 bp, Staphylococcus aureus
atgcgtttaaaatcaattgtaactgtaatagctttaatattaatcatgtttatggctgcaatcgaatcatcaattatttctttagcgttaccaacaattaagcaagatttaaatgcagggaatttaatttcattaatttttaccgcgtattttatcgcattagtaattgccaatcctatagtaggtgaattattaactcgttttaaaattatttatattgctatcgcaggtcttacactattcacggttggtagtttaatgtcaggtttaagcacacattttagtatgttggttatatcacgtgtaattcaagggtttggatctggtgtcatgatgtccttgtcacaaattgtgcccaaattagcatttgaaattccattacgctataaaattatgggtatcgttggtagcgtttgggggatttcgagtatcattggaccacttctaggtggtggcatattagaatttgcaacatggcattggttattctacataaacataccgattgcgattattgcaataatattggttgtctggacatttcattttccagaagaagaaactgtggctaaatcaaaattcgatactaaaggtatcaccctgttttatattttcattggtttaattatgtttgcattgttaaaccaacaacatttatatttaaatatcataggttttgtcttagcaatattagttgcacttcgattatttaatgttgagaaaaaagtttcatccccattcttaccagtagcagaatttaatcgaatgattactttggtctttattacagatcttcttacagctgtttgtttaatgggctttaatttatatattcctgtgtatcttcaagaacaactggggttatcgccattgcaaagtggattagttatttttccactttctgtagcgtggattacattgaattttaatttgcaccatattgaagcgaagttatcaagaaaagttatctatttgtcgtcttttacattattattattaagtagtataatcattgcgtttggtataaaattaccaattcttatagcatgtgtcttaattttaagtggactaagctttggatatatttatacaaaagatagtgtaattgtccaagaggaaacaagtccaatacaaatgaagaaaatgatgtcgttttatggattaacaaaaaaccttggcgcatcaataggttcgacgattatgggatacctttatgcgttaaaatcaggattgtttggtgcaaacttgcataatattttaggcgttgtatccttgataagtgtagggctcatcgttgtatggctcatattttatagagaagcggcgtcacaaacaaaagaatag

SEQ ID NO: 2767 - DNA, 1059 bp, Staphylococcus aureus
atgtctgaacaacaaacaatgtcagagttaaaacaacaagcgcttgtagatattaatgaagcaaatgatgaacgtgcactgcaagaagttaaagtgaaatacttaggtaaaaaagggtcagttagcggactaatgaaattgatgaaggatttgccgaatgaagakaarcctgcrtttggtcaaaaagtgaatgaattgcgtcaaacaattcaaaatgaattagatgaaagacaacagatgttagttaaagaaaaattaaataagcaattggctgaagaaacaattgatgtatcattaccaggtcgtcatattgaaatcggttcaaagcatccattaacacgtacaatagaagaaattgaagacttattcttaggtttaggttatgaaattgtsaatggatatgaagttgaacaagatcattataacttcgaaatgctgaatttacctaaatcacaccctgcacgtgatatgcaagatagtttctatattacggatgaaattttattacgtacgcatacatcaccagtgcargcacgtacgatggaatcacgtcatggtcaaggtccagttaaaattatttgccctggtaaagtgtatcgtcgtgactctgatgatgcgacacatagtcatcaatttacacaaatygaaggattagttgttgataaaaacgttaaaatgagtgatttgaaaggyactttagaattgttagctaagaaattatttggtgctgatcgtgaaattcgtttacgtccaagttacttcccattcactgaaccttctgtagaagttgatgtgtcatgttttaaatgtaaaggaaaaggttgtaatgtgtgtaaacacacaggatggattgaaattttaggygctggaatggtacatcctaatgtattagaaatggctggttttgattcttcagagtactctggatttgcatttggtatgggaccagaccgtattgcaatgttgaaatatggtatagaagatattcgtcatttctatactaatgatgtgagatttttagatcaatttaaagcggtagaagatagaggtgacatgtaa

SEQ ID NO: 2768 - DNA, 987 bp, Staphylococcus aureus
atgtatgtgcaaaagaataataagatgttctatgcattattaatcgctattactrttcaaagtataggattattgattttgacgrcaacagrtattttamaaattcctgcacatagttttccaatattgggaacarttataggttcttttatttttggaattggaatagtattgrctggaggrtgtgcaacaggtacttggtatcgcgctggtgaagggctaattggtagttggattgcattagtattatatgctgttactgcagcaatcactaaaacagggattttaaagccagtaatggataaaattaatcaaccaacgaatgtaaatagtgatatgtctcaaacaackggcattccgttttggggattagtcgttatattaactataatcaccatttttctmgttgtaagaacrctcaataataagaaagttcgagttgctgttccaaaactaaagcaacgttatacaggtattagatattaccttttcgaaaaacgataccatccatttattgcagcaattgyaattggacttatcgcactcttagcttggccaatgagtgcatcaactggaagaaatgacggtttaggtataacaacgccwtcagcaaatttagtacactttttgattacaggtgaaactaaatttattgattggggtgtctttttagttctaggaattttcattggttcatatattgcagctagaggakcaagagaatttaaatggcgattgccagayaagattacaatacgaaacagtgcbattggtggyatatgtatgggatttggtgcgtcagttgctggtggttgttctatcggtaacggtttggttgaaacrgcaacgatgacttggcaaggatggattgcgctagcatcratgatagttggkgtatggacaatgagtcattttatctttgttcgtccaatgaaaaaagtacamcaacaatcygcaaaggtymaacagcaaacgcaaatagtatag

SEQ ID NO: 2769 - DNA, 2403 bp, Staphylococcus aureus
atgttgatatcaaatgaatggttgaaagaatatgtaacaatcgatgattctgtaagtratttggcagaacgtattacgcgcacaggtattgaagtggatgatttaattgactacacaaaagatatcaaaaatttagttgtyggyttcgttaagtcaaaagakaaacatcctgatgchgataaattaaatgtttgccaagttgatatcggagaagacgaacctgtacaaatmgtwtgtggtgcmccgaacgttgatgcaggacaatatgtcattgttgctaaagtaggtgghagattgcctggtggtattaaaattaagcgtgccaaattacgcggtgaacgttcrgaaggtatgatttgttcgttacaagaaattggtatttcaagtaaytatataccgaaaagttttgaatcaggcatttwtgtwtttagtgaakcccaagttccaggaacagatgccttacaagctttatatttagatgatcaagtaatggaatttgatttaacgccgaatcgtgcwgatgctttaagtatgataggtactgcttatgaagttgcagcattrtataatacaaaaatgactaagccagasacaacatcaaatgagcttgakttatctgcaaatgatgaaytgactgtgacaatwgaaaatgaagataaagtaccatattatagtgcacgtgttgttcacgacgtgacaattgaaccytcgccaatttggatgcaagyacgcttaataaaagcrggtatacgtcctattaataatgttgtygacatytcaaattatgtgttattagaatacggtcaaccattgcacatgtttgatcaagatgcgattggttcacaacarattgttgttcgtcaagctaatgaaggcgaaaaaatgacaacattagatgatacagaacgtgaattattaacgagcgatattgtyattactaatggacaaactccaattgcattagctggtgttatgggtggcgatttttcagaagttaaagaacawacatcaaatatagtkattgaaggtgctatttttgatccagtttcaattcgtcatacatcaagacgtttaaatttacgcagtgaatcatctagtcgttttgaaaaaggaatagctactgaatttgtagatgaagcagtcgaccgtgcatgttatttattacaaacttatgcaaacggaaaagtgctaaaagatagagtgtcttcaggagaacttggtgcatttattacaccaatcgacatcactgctgataaaattaatcgcactattggatttgatttgtcacaaaatgatattgttactatttttaatcaaytagggtttgatacagaaataaatgatgatgttattacagtgcwagtrccrtcacgtcgyaaagatattacaattaaagaagatttaattgaagaagttgcacgtatwtatggwtacgaygatattccwtcaacrttacctgtcttcgawaaagttactagtggtcagytaactgatcgccaatataaaackagaatggttaaagaagtgttagaaggtgctggattagaycaagctattacgtattcgttagtttctaaagargatgctactgcatttkcgatgcaacagcgtcaaacaattgatttattgatgccaatgagtgaagcgcatgcgtcattacgtcaaagtttattaccacatttaatcgaagyrgcatcatataatgtggcacgyaaaaataaagatgtaaaattatttgaaatcggcaatgtcttctttgctaatggwgaaggtgaactaccagatcaagttgaatatttaagtggtattttaactggagattatgtagtcaatcaatggcaaggtaagaaagaaacggttgatttytatttagcaaaaggtgtcgtggatcgagtatctgaaaagttaaaycttgaatttagttatcgycgtgcygatattgatggattacatccaggtcgtacwgctgaaatcttattagaraataaagttrttggttttattggtgaattacayccaayattagcagctgataatgatttaaaacgtacgtatgtttttgagttgaattttgatgcattaatgkctgtgtcggtaggttacattaattaccagccaattccgagattcccaggcatgtctcgtgacattgcattagaagtagatcaaaatattccagcagctgatttattatcaacgattcatgcacayggtggcaatatattaaaagatacacttgtctttgatgtatatcagggcgaacatttagaaaaaggtaaaaaatcaattgcaatacgtttaaattatttagacacagaagaaacattgacagatgarcgcgtttcaaaagtrcaagcggaaattgaagcagcattaattgaacaaggtgctgttattagataa

SEQ ID NO: 2770 - DNA, 636 bp, Staphylococcus aureus
atgagtgaccaagttaaaattcctcgagcaactttaaaacgtttgccgttatattatagatttgtcagttcattaaaatctaaaggtatagatcgtgtaaattcaaaagcgattagcgatgcgttacaaattgactcggcaacaattcgtcgtgacttttcatattttggcgaattaggtaaaaaagggtacggatataatatagatagtttattggatttctttaaatctgaactaagcgagagtgacatgatcaaaatcgcaattgtcggagttgggaacctagggaaagctttgctcacatataacttttcaatacatgacgatatgacgattacagaagcgtttgacgtaaaagaagatgttattggccagaaaatagggaacgttattgtwaaagataacgatgaattaataacaacattgaagaaggaagaaatagatgttgtgattctaactacaccagaaagagttgcacagaaagttgcagatgaactcgtccaagctggtgtgaaaggtattttaaacttcactcctggtagaatwaatacgccttcagatgtgcaagtacatcaaattgacttaggtatagaattacagtcattattattctttatgaaaaattacagtgaataa

SEQ ID NO: 2771 - DNA, 204 bp, Staphylococcus aureus
ttgttaaatgataagggggtgagtattggtaaatttattcaaaagcttaaagggaaaaatcctacctggagatatccaaaaattaaatggactatttccaaaaataaagggcaatcatatggtggttcttattggaagttaataaataacaaaggaaaaagaatagcttctttaactaaagaaggaaaaatcttaagggaataa

SEQ ID NO: 2772 - DNA, 267 bp, Staphylococcus aureus
atgrcacagtttaaaaacaaggtaaatgtatcaattaatgatcagctttttacaattgttggggaagataacccagagcacatacgatatgtagcacatttagttgatgataaaataaaagaattagggtataaagcagcaggtttagatacttcaagaaaagcaatactaactgctgtgaatattatgcatgaaaaagtactactagaagaaraaaatcgacgtttgaaacaacaaattcacaaattgcagcagcgtgagcaataa

SEQ ID NO: 2773 - DNA, 1026 bp, Staphylococcus aureus
atgactaaagatatattaatactagctgttgaaacaagttgtgatgaaacaagcgttagtkttataaaaaatggcagagatattttatcaaatacagttttaagtcagattgaaagtcataaacgatttggcggtgtcgttccygaagtggcaagtagacatcacgttgaaggtataacarcaacaataaacgaggctctagkggatgccgaygtatcaatrgaagatattgatgccatagcggttacagaaggccctggactaattggtgcgttactaataggtgttaatgcagccaaagcattggcatttgcttacgataagccrcttattcctgttcatcatattgcaggacatatatatgctaatcacatagaagagccattaacattcccgctaattgcacttattgtttcaggtggacatactgaattagtttatatgaargatcatttawcatttgaagtcattggtgaaacacgagatgacgcagtaggtgaggcttatgataaagtggcacgaacaattggtttaaattatccaggtggtccacaagttgaycggttggctgctgaaggtgaagatacttattcattccctcgtgtttggttggataaagatagttatgattttagttttagtgggttgaaaagtgccgtratcaatcaacttcacaatcaacgacaaaaaaatattccaatcattgaagctaacgtagcaacgagctttcaaaayagtgttgtagaggtkctyacgtttaaagctattcaagcttgtaaagaatatrgtgttcagcgattaattgttgctggtggcgtggcgagtaataaaggattacgtcaatctttagcggatcaatgcaaagtcaatgacattcaattaactatcccaagtcctaaattatgcacagataatgctgcaatgataggcgttgccggccactmtttgtatcagcaaggtcgatttgctgatttagcattaaatgggcacagcaatatagatttagaagagtattctgcagaataa

SEQ ID NO: 2774 - DNA, 180 bp, Staphylococcus aureus
ttgacagagattgtagaatttctgtcagatggtaagttagcaagtaggctagaaattcaagaaacaatgggacttcaaaaaagttatacatctgagttaattgctgaactaaagaaattagagattatcggatctgaaggtagaggtccgggaactagatattatttaattagagactaa

SEQ ID NO: 2775 - DNA, 1452 bp, Staphylococcus aureus
ttgcgaggtttatatatgactagtagtaagtatattgaatatttgcaaactgaggttgaaggacagcttctagatcgaaagagggcatctataaatcctaaagatgttgctcaacacattagtgcgtttgcaaatgctgaaggtggcaaactggtaattggtattgaagataatggagaaatttcgggatttaatcattcaaaagcaaaaaagaaagaggtttatattgaagcacctttcgaacatttatatagaatacctaaatatacatatgaaataatagaagtgaagaaacgcgatggaactatggatgaaattcttattttcgacattgaacccagttatgatgccataatcaccttaaaagatgattcagtatatttaaggattaacgataaaagtagaaaactgacacacaatcaaattacaaatctagaatacgaccgtggttcacgaagattcgaagaagaattagtagagtattctagtattgaagatgtgaatgaagaactagttgatgaatttaagcaattacttaatacaaacgtagataatgaaaaattattaaaagctagaggatttatgcgtgaaggtaaattgacagttgcaggtttgttattgtttagtaatcacatcaatgtttatttaccaggcgctagaattcgatttatgaggtatgaaggaacaaaagaagaatctgggacaagacttaacattgtaaaagatattacttttgataaagctttgccagtagcaataagagaagcgagagcctttatcaatacacaattacgtgaatatacttttttaggtaaagagggaagatttgtaactttgccagaatatccagaatttgcttggtttgaggggatgataaattctattgtacatcgcagatatgataatcaaggcgatcatataagaataaaaatgtttgacgacagattagaaattagtagcccgggtgcactgcctgcttctgttacgttagagaatattaaagaagaaagatattcaaggaatccaaaattagctgcagcattaactcaatataaatgggtgagagaatcaaatgagggcgtgggacgtatatttgacgaaatgaagcaatattttttagatgatcctgtatactcagagcctaataatagttcagtacaactagctttgaagaataacataatagcaaggaaaaaaagagaaacagggagagtgagtaatataataacacctgaattatttgaaagtttaaatgagcaacaagaattaattgtgagacatttatataatcaaggcgaactaacagcatctaaaattgctaatattattcaaaggtctgttcctactgctagaaaaagattgaaagaattagaggaaatgaatattatatcgacacatggatcaagtaagaatgatccaaagagaacatattatttactcggattcgagtaa

SEQ ID NO: 2776 - DNA, 522 bp, Staphylococcus aureus
atgrtcattgattttatcataatcattttctttgtgtattttgtcatsgttggattcagacgaggtttttggttatctatgatacatttgagtgcaacgattgtatcattgtggattgccagtcaattttacaaatctattgtagaaagattaattgtatttattccatatcctaaaacaacagcatttaatacaacttttgcgtttcattttaatcatctacaaaatcgatttgaagcgattgtagcttttttaatgattrcattgttttgtaagttcattttatatctaattatcgtaacttttgataaaataatagcgtatcaaaacattcatattttcagtcgtgcaatgggaatgatagttggtgtgtttatgacgataattgtcttacactttacgttatatctattggcattatatcctaacgaagcattacaacatcagcttaaaatatctattgtgagtcattcattgatttttcacatcccatatttatcggctttcaccattaatttataa

SEQ ID NO: 2777 - DNA, 426 bp, Staphylococcus aureus
atgacyaaagaagatgtgccacaagtctttgatmttgagcgtcggagtttcaatgayagttcttggacaattgacgcattttatcatgaaatagagcaaaataactttgcgaaatattttgtcttagaatttgaacaacaaattattggttatttaggtttatggattgttatcgatcaagctcaaattacracagttgcaatcgatgataattatagaggmtatggtttaggtcaaatgcttttaaaatacggaataaactatgcaagtcacacttgtgatgtgatgagtttagaagtaagagttaataataaagtggcacaacatgtatatgaaaatttaggatttcaatatggtggtaaacgtaaaaattattatggtgaaggtgaggacgcaatggttatgtgggtgaatttaaatgactaa

SEQ ID NO: 2778 - DNA, 417 bp, Staphylococcus aureus
atgttcaaagtgaattattcgattttaagttattatccagatatttatctccatagtaatttagctgtaggtgtggcatttgaaattataggagaaagttatcataagaatgaaattaaatttataacccaaagaagaaaaattttatcatttgatgatgaaatagacaatttagaacttattaatatgtttttggatgggcttaaatgtgaattcgaacaaactaatcaatcattaaaaagttataagaaaaagtttgttaataatttctactttgagaatattgaatataaaatgtttgactcattaaaagaagttaataattttattgaaaatacatataaatatgtattacatcatggtttagataaaaaagaaagacttaagaaaactgagaaagaacttttgaatagctaa

SEQ ID NO: 2779 - DNA, 252 bp, Staphylococcus aureus
ttgattattatgaggaagttaaaagaagataatcaagttatagtatatgaatatattccacaagataaaatagaaaaagggaaaggcgaaataacagtaaataaattagattcaaaggtaattgactataaattatcaaaagttgaaaatgaaaaaggtattttaatttatagagataaatcatttcatgcaatattaaattttattgatgaaaataaatttccgaatgaatatatatatgcatggtattaa

SEQ ID NO: 2780 - DNA, 198 bp, Staphylococcus aureus
atgttaatcaaagatgtatatcgtaaaaatgttatagttacactaaaaaatgatgaaaaattaaaaggttttgttatagattttgaaaatccgttagaaagtgattctggtaactattgcatggatttagaaacagatttaggtttttattctattgatgaatcagatattaaagacatacaaataattacagaatag

SEQ ID NO: 2781 - DNA, 1713 bp, Staphylococcus aureus
atgacaaaaaaagatgttatcaaactattagaacaaattgctacttatatggaattaaaaggggaaaatacttttaaaatatcagcgtatcgaaaagcagctcaaagtcttgaattagatgaacgaccattagatgaaatatctgatgtaacggagttaaaaggcattggtaaaggtgttgcagaagtaatcaatgattaccgtgagaccggtgaatctcagtatttacagcaattacaggaagaagttccggaaggtcttattccacttttgaaaattcaaggacttggaagcaagaaaattgctaagctatataaagagttgaatattgttgataaagcktcacttcaagttgcttgtgaaaatggaaaagttagtgaattaagcggatttgctaagaaaacggaacaaaacatattagaagctgtgaaacaacttggtgctaagaaagatagatatccaattgatcaaatgagaagacttaatcaagaaatcattgattatatagatacattaaawtatatcgatcaatattcatctgcaggaagcttccgtcgttttaaagaaatgagcaaagatttagatttcataataagtaccgataacccaaaagcagtgcagcagcaattattaaatattcccaataaagtaaaagaagttgcagtggggaacacaaaagtttcattagaattagcgtatgatgatgaaacgattggtgtcgattttcgattaattgaaccaagkgctttttatcatacattgcarcattttactgggtcaaaagaacataatataagaattcgacaacttgctaaagcacgkgatgaaaaagtaagtgaatatggaattgaacaagctgatggtacattaattcaatatgatagtgaagccaaratatatgaacattttaatgtgaattttataccacctgctatgmgagaagatggtagcgaatttgataaagatctaagtaatatcattacawtagatgatattaatggtgatattcatatgcatacaacgtwtagtgatggtgcgttttcyattcgagacatggtagaagcaaatatcgcaaaaggttataaattcatggtaattactgatcattcacaaagtttacgtgttgctaatggcttacaagtrgaaagacttttaagacaaaacgaagaaattaargctttagataaagaatatagtgaaattgatatttattcrggtacagaaatggatatattacctgatggctcgctggattatgatgatgaaattttagcacaacttgattaygtaattggagctattcatcaaagctttaaccaatcagaagaacaaattatggaacgattagctaatgcatgtcgcaatccatacgtgcgacatatagcgcatccaacagggcgtattataggtagaagagatggttataaaccgaatattgaacaattaatggcattagctgaagaaacgaatacagtattagaaattaatgccaatccacatcgactggatytgarcgctgawatcgttcgtaaatatccaaatgtgaaattaactattaacactgatgcgcatcatacaaatcatttagattttatgaattatggcgtagcaactgcgcaaaaaggatttgtaacaaaagatagagtgattaacgcattatcgcgtgaagcttttaaagactttattgaaaataatayaaaacttaagaaatag

SEQ ID NO: 2782 - DNA, 663 bp, Staphylococcus aureus
atgaattcgctgctcattgatacatcgaatcaaccattatcagtagcattgatgcaaaacgatgaagttttagctgaaataactacggattctaaacaaaatcattcagtgcaattaatgcctgcgattagtcagctatttgagcagagcaaaatagctaaacagcaattagatgcgattattgttgctgaaggtcctggttcatatactggcttacgtatcggtgttactgttgctaaaayattagcgtatgcgttagatgttaaattatatggtgtttcatcattaaaggcattggcagcaacaatcgaycatactgataaattattggttcctgtgtttgatgcaagacgacaagcagtttatacaggcatattccartggcaaaatggtcaattagtgactattttagaagatcaatatatgtcgatagakgcattgcgagcttttttagaagatttaaaccaaccatttatttatattgggaaagatacwrtaaaattacaagatgawttacaaggtgawgtgattgcgcagctaccaaatgcatcagtcatgtatcaattgmtagataaacctwcagacgtacatacatttactcctaaataccataaattagctgaggcggaacgaaattggatcaacagtcaaaagaacaattaa

SEQ ID NO: 2783 - DNA, 2349 bp, Staphylococcus aureus
atgagacaaaaaacattagacgtcttagaatttgawaaaataaaatcactcgttgccaatgaaacwattagtgacttaggcttggaaaaggtcaatcaaatgatgccagctactaattttgaaacggttgtttttcaaatggaagaaacggatgagattgctcaaatytataataagcatcgtttaccaagcttgagtggcttatctaaagtatcagcattcattcatcgcgctgatattggcggcgttttaaatgtatcagagcttaacttgataaaaagattaattcaagtacaaaatcaattyaagacattttataatcaattggttgaagaagatgaaggtgttaaatacccaatattagatgacaagatgaatcaattacctgtgttaactgatctttttcawcaaataaatgaaacatgcgatacgtatgatttatatgataatgcgagttatgaattgcaagggattagaagtaaaatttctagcacgaatcaacgtattagacaaaatttggaccgtattgttaaaagccaagcaaatcagaaaaaattatcagatgctattgtaacagttaggaatgaaagaaacgttatacctgtcaaagctgaatatcgacaagattttaatgggattgtacatgatcaatctgcttcaggacaaacattgtatattgagccatcatcagttgttgaaatgaataatcaaattagtcgattacgtcatgaygaagcaattgaaaaagaacgcrttttaacgcaactaactggttatgtkgctgcggacaaagatgcactacttgtggcagaacaagtcatgggkcagttagattttttaatcgcaaaagcgagatrtagtagaagtrttaaaggaacaaagccgatatttaaagaggamcgtactgtatatttacctaaagcataccatccattattaaatcgtgagactgttgtagctaataccatcgaatttatggaagatattgaaacggtaattattacaggaccgaatacaggtggtaaaacwgtaacattaaaaacattaggtttaattattgttatggctcaatcaggattgttgattccmacacttgatggtagtcagttragtgtatttaaaaaygtatattgcgatatcggagatgaacaatcaatagaacaatcattatcaactttttcatctcatatgacgaatatagttgaaattttaaagmatgcagacaaacatagtttagttttatttgatgaattaggtgcaggtacagatccragtgaaggtgctgcattagcaatgagcattttagatcatgttagaaaaattggttctctagtaatggcaacgacgcactatcctgaacttaaagcatatagttataatcgagaaggcgttatgaatgcgagtgtagaatttgatgtagatacwttgagtccaacgtataagttattaatgggtgtgccgggtcgttcaaatgcttttgayatttctaaaaagttaggtcttagtttgaatattattaataaggctaagacgatgattggtactgatgaaaaagaaataaatgaaatgattgaatcattagagcgtaattayaaacgtgtagagacacagaggttagaactggaccgtcttgtaaaagaagcggagcaagtgcatgatgatttatctaagcagtatcaacaattccaaaattatgaaaartctctaatwgargawgckaaagaaaaagcraatcaraarattaargcwgcaacaaaagaagctgacgatattattaaagacytaagacaattgcgtgaacaaaaaggtgcagatgttaaagaacatgaattgattgataagaagaaacgattagatgatcattatgaagcgaaatctataaagcaaaatgtacaaaagcaaaaatacgataaaattgttgctggtgatgaagtaaaagtattatcttacggtcaaaagggtgaagttttagaaattgtcaatgatgaagaagcaattgttcaaatgggaattattaaaatgaagttacctattgaagatttagagaaaaaacaaaaagaaaaagttaarccaacgaaaatggttacacgtcaaaatcgtcaaacaattaaaactgaacttgacttacgaggctatcgttatgaggatgctttaattgaactagatcaatatttagatcaagccgttttaagtaattacgaacaagtttatatcattcatggtaaaggtacaggtgcacttcaaaaaggtgtacaacaacatttgaaraagcataaaagtgttagtgactttagaggtggtatgccaagcgaaggtggatttggcgttaccgttgcaacactaaaataa

SEQ ID NO: 2784 - DNA, 435 bp, Staphylococcus aureus
atgaatcaatttgctatrtttttagttgagcaattgaaaagtggtgatttgattttacttaacggagatttaggagcaggtaaaacaacgttaacrcaatttataggaaaagctcttggtgtaagacgtacgattaattccccgacatttaacatcatyaaatcatataggggwaaaaatttaaaattgcatcatatggattgttatcgcttagaagattctgatgaagatttaggrtttgatgaatttttcgaagatcaggcaattactgttattgaatggagtcaatttataaaagatttactyccagcgacgcatttatctattaayatttcaacaatatctgaaaatwcaagacaaattgagttgttcgcgcaaggagaacattatgaacaaattaaggaggcaattatycatgaattcgctgctcattga

SEQ ID NO: 2785 - DNA, 507 bp, Staphylococcus aureus
atgatttctttaattattgcagaagatcaaaatatgttacgacaggcaatgattcaattaattaaactacatggtgattttgaaattttagccgatgtagataatggtctcgatgcaataaaaattattgaggcacaccatcctgatgtagttattttagatattgaaatgtcaggcatgactggacttgaagttttatcagaaattagaaagaagcctttgaatattaaagtgattattgtaacaacttttaaaaggccggggtattttgaaaaagctgttgcaaatgatgtggatgcatatgttttaaaagaacgttctatagaagaattagtggaaacaatttataaagtgtataacggtaagaaagaatatagtgcttctcttatgacttcatttttcacagatggaacagttagaaattatacatctgttagaattgataaattatttgcagataatcgttttgatgcttggaaaaaggcaaatgaaaaaggctggatctaa

SEQ ID NO: 2786 - DNA, 1353 bp, Staphylococcus aureus
atgaatgttgaatattctaaaataaagaaagcagtacctattttattattcttatttgtattcagtttggttatagacaactcattyaaattgatttctgtagccattgctgatgacttaaacatwtcwgtaacgacagtaagttggcaagcgacattagccggtttagtaattggtattggcgctgtagtatacgcttcattatctgatgccattagtatacgcacactatttatttatggcgtgatattaatcattatcggatcaattattggttacattttccaacatcaattcscattacttttagttggacgtattattcaaactgcmggtttagcygctgcagagacattatatgtgatatatgttgcaaagtatctttctaaagaggaccagaagacttaccttggcttaagtacgagcagttattccttgtcattagttatcggtacattatcaggtggatttatttctacgtatttacactggacaaatatgtttttaattgcattaatcgtagtatttacgttgccattcctatttaaattattaccaaaagaaaataatacraataaagctcatttagattttgttggcttaattctagtggcaactatygctacaacagtyatgctgtttattacgaactttaattggttatatatgattggtgccttaattgcgattatcgtttttgcgctatatattaaaaatgcgcaacgtccattagtaaayaaatcatttttccaaaataaacgttatgcttcatttttatttatagtatttgtaatgtatgcyatccaattgggttatatttttacgttcccattcataatggarcaaatttatcatctkcarctagacacaacatcactgytattagtaccgggttatatwgtagcagtcatygttggtgcaytaagtggtaaaatcggcgaatatctkaattcaaaacaagcgattatcacagcaattattttaatmgcactgagcttgattttacctgcatttgcagtaggtaatcacatttcaatcttcgtcatttctatgatattctttgcaggtagctttgctttaatgtatgcacctttacttaacgaagccattaaaacaatagatcttaatatgacaggtgtggctattggtttttataatttaattattaatgtggcggtatctgtaggtattgcgattgctgcggctytaatcgattttaaagcattaaatttcccaggcaatgatgcattaagttcacatttcggtattattttaattattttaggtttaatgagtattgtcggattagttttattcgtcakcttaaatcgttggacacaatctgaaaaataa

SEQ ID NO: 2787 - DNA, 921 bp, Staphylococcus aureus
atgaagccttatatacaacttgttktgttcaagcaatggttacaatacatcttgctcgtaacaaccattgtcatcgcactcgtacttattggtatsggttaccgtgtagcacatgacaacttcaaaataccgattaccattcaagatttagaccaaaccactgcatcaaaatcattcgtcaataaaattaaacaatctgactatgtaactattaaaaaagtcgatgaagatgaaagctatattgaagatgatgttactaaaaaggaagctattttaagyatgcaaattcctaaaggtttctctcaaaaattaaaagagaaccgtttraaagaaacgatacagttatatggtagagatgactttataggtggtattgctrtagaaattgtyagtagytcattatatgarcagcaaattcctaacattatttatgaacaccttgaggatatgaaacarcatcaatccatcgatgctatcaacaagtcctatcataaacatayacctgaatctaaaatcaaatttgtgtcgcttactaaacaagcacaacamtctatttcaattagcttaatctttgckgtgattttatttgttagcgctgttcaagtartacttcattatcgtttaaaccaacaagcagcattgcaacgattatcacaatatcatttaasccgtttcaaactatatagtacttatgtaatgacacatackatyttgttattgttggtactattggcagttagtctatatttgtctcaaccactcagcttaatattttacttaaaatcaytgytacttatattgatttatgagataggtatcgtctttatcttattccatattcaaacaataagycatcgwttattcatgacatttatatatgcacttgctatgggtatcgtatacttgakyattttcatgtaa

SEQ ID NO: 2788 - DNA, 315 bp, Staphylococcus aureus
atggcaatcgtwaaagtaacagatgcagattttgattcaaaagtagaatctggtgtacaaytagtagatttttgggcaacatggtgtggtccatgtaaaatgatcgctccggtattagaagaattagcagctgactatgaaggtaaagctgacattttaaaattagatgttgatgaaaatccatcaactgcagctaaatatgaagtgatgagtattccaacattaatcgtctttaaagacggtcaaccagttgataaagttgttggtttccaaccaaaagaaaacttagctgaagttttagataaacatttataa

SEQ ID NO: 2789 - DNA, 153 bp, Staphylococcus aureus
gtggatgcgatgagccgcattgagaccgcaaggtctctttttttatgtctaaaacgtcaaaataaaagcaaacacaaagaaagatggcttggcgaagtgaaaacgtttgaatctgacgaaacgagaaatgtaaagtataataaaaagcagtca

SEQ ID NO: 2790 - DNA, 1782 bp, Staphylococcus aureus
ttggaagactataagmaacgaattaaaaataaattaaatgtcgtacctatggaaccaggmtgctatttaatgaaagatcgtaaygatcaagtgatatatgttggcaaagctaaaaagctaagaaatcgattgmgatcatattttacgggygctcatgatgctaaaacaacgagactggttggtgaaatacgtcgytttgagtttattgtcacgtcwagtgaaacagartcacttttactkgaattraatctgatwaaacaatatcaaccmagatataatatattattaaaggatgataaaagttatccatttattaaaattacgaaggaraaatatcctagactactagtgacgagaactgtaaaacaaggtactggyaaatatttcggaccgtatccgaatgcatattctgctcaagaaactaaaaagttattagacagaatatatccatatcgcaaatgtgataagatgccagataaattatgtctttattaccatattggacaatgtttaggaccatgtgtatatgacgttgatttgagtaaatacgcacaaatgacgaaggaaattactgattttctgaatggggaagacaaaacaattttaaaaagtttagaagagmgaatgttaactgcaagtgaatcacttgattttgaacgrgctaaagaatayagagatttaattcaacatattcaaaatctracwaacaaacaaaaaattatgtcatcagataaaacgattcgtgatgtctttggttatwgtgttgataaaggatggatgtgtatccaagttttctttatamgacaaggtaatatgataaagcgagatacaacgatgattccattacagcaaacagaagaagaagaattttatacatttattggacaattttatagcttaaaccaacatattttacctaaggaagttcatgtaccacgtaatttggataaagaaatgattcaatctgttgtggacactaaaatcgttcaacccgcgcgaggtcccaaaaaagatatggttgacytagctgcacataacgctaaagtatccttaaataataaatttgaattaatatcacgtgatgagtcmagaacrattaaagctattgaagaacttggaacacaaatgggaattcaaacaccaattagaattgaagcattcgataattctaatattcaaggtgtggatccagtgtcagcaatggttacatttrtcgacggtaaaccagayaagaaaaattatagaaagtataaaatcaaaacggttaaaggtccagatgattacaaatcaatgagagaagtagtaagacgacgatattctcgcgttttaaacgaaggattaccattacctgatttaataatagtmgatggtggtaaaggacatatgaacggggttattgatgtgctacaaaacgaattaggtcttgatatccctgttgcaggtttgcagaaaaatgataaacaccaaacatctgaattattatatggcgctagtgcagaaattgtaccactgaagaaaaatagccargcattttatttgttgcaycgtatccaagatgaggttcacagattcgcaatcacatttcatagacaaacacgtcaaaagacaggcttgaaatcaatmcttgatgatatagatggtatcggtarcaaacgtaaaacattattattgcgttcattcggttcaatcaagaaaatgaaggaagctacacttgaagattttaaaaatataggtattcctgaaaacgtygcaaagaacctacatgaacaattgcataaataa

SEQ ID NO: 2791 - DNA, 456 bp, Staphylococcus aureus
atgaataaygamawacttcagcgaatggtygagaayctttcggaagaaaaatttggacgtacstttcracatygtgcatattttaataaaaggttacgtacaacaggcggacgttatcttttaaagtcycatgatattgaaattaatccaaaacaatatgagcattatggagaagatgctgttgtaaaaattatactgcaygaaytrtgtcattatcacttgcatattgctggtaaaggttatcaacataaagatcaagattttaaacgattgagccaacaggttggagcgcctagattttgtaacagcattgaaagctatcaacaacgggcraattatgaatattattgyactaaatgtcatgcaaaatatatacgtatccgtaaagttgatacgaatcgtatgcgttgcggacattgcaatggaaaattaagaatgaaaagacaattgaaataa

SEQ ID NO: 2792 - DNA, 615 bp, Staphylococcus aureus
ttggctcaatcaaaaaatgaattttatctaagacgtattcactcgttattaggtattatcccaataggtgcatttttggtcgttcatttattagtgaatcaccaagcaacacaaggtgctgaagcgtttaataargcatctaactttatggaatcattaccatttctaattattgtagaatttttatttatatacattccgttgttatatcacggtttgtttggtatacacattgcatttacagcaaaagaaaatgttggacattactcgatttttagaaactggatgttcttcttccaaagagtgagtggtatcttaacatttatctttattggtatccatttatggcaaacacgtttacaaaaagcattttacggcaaagaagtgaattacgatttaatgcaygaaacattgcaacatcctggatgggcaatattttatattatttgtattattgctgttgtgttccactttgcaaatggcttatggtcattcttagttacttggggtggacttcaatctccaaaatcacaacgagtatttacatgggtttcattaatcgtattyttagttatttcgtatattggtgttactgcaattattgcctttatgtaa

SEQ ID NO: 2793 - DNA, 2151 bp, Staphylococcus aureus
atggacaatcaattgattaattcaatcatagagaaatatcaatttagtaaaaaacaaattgaagcagtrttaacactgctwgaagaaaaaaatacagtaccatttattgcgaggtatcgaaaagagcaaactggtggactagatgaagttcaaataaagcaaattgatgacgaataccaatatatggtcaatttacaaaaacgtaaagaagaagttatcaaaaatatagaacagcaaggattacttactgaggaattaaagaavgatattttaaaacagaacaaattacaacgtgttgaagacctatatagrccttttaaacaaaagaaaaagacwagggcractgaggcgaaacgtaaaggrttagarccattagcgatatggatgaaggcacgtaaacatgaagtmtcaattgaagaaaaagcacaacaatttataaatgaagaagtgcaatcggttgaaratgctatcaraggtgcrcaagatattattgckgaacaaatttcagataatcctaaatatagaacaaaaattttaaaagatatgtatcatcaaggtgtgttaactacatctaaaaagaaaaatgctgaagatgaaaaaggtatttttgaaatgtactatgcatatagtgagccaattaaacgcattgctaatcatagagttttagctgtkaatcgtggygaaaaagagaaagtattatctgyaaagtttgaattcgatacgacakcagtagaggayttcattgcacgtcaagaaatcaatcataataatgtaaatcgcagttatattttagaggcgattaaagatagcttgaaacgcttaattgtcccttcgatagagcgtgaaatccatgctgatttaactgaaaaagctgaaaatcatgcaatagatgtttttagtgaaaacttaagaaatctattactgcaacctccaatgaaaggtaaacaaatattaggcgtagatccwgcatttagaacaggttgtaaattagcagtcattaacccattyggtacttttatagcaaaaggtgtgatttatccgcatccaccagttkctaaaaaagargcagcagagaaggattttgtacaaatggttaaagcgtatgatgtgcaattaattgcaattggcaatggtacwgcaagtcgtgaaacagaacaatttgttgcagatttaattaaaaagcatcagttgccagtacaattcatcattgtcaatgaagcgggcgcytcagtatactcagcatcagaaattgctagagatgaatttcctgattttcaagtggaagaaagaartgccgtatcaattggacgacrcgttcaagatccattaagtgaattagttaaaatcgatcctaaatctattggtgtyggacaataccagcatgatkttwwycaaaaagcactagaaaatgcattaactttcgttgttgaaacagcagttaaccaagtaggtgttgatgtcaatacagcatcatcatcattattacaatatgtgtctggtctaagttcgcaaattgctaaaaatataattgcatatagagaagaaaatggcgcaataaagcataataaagagttaagcaagattaagcgtttgggtgctaaaacttttgagcagagtataggatttttaagaatagtagacggktcagagccattggataatacatcgattcatcccgaaagctataaagtaacgtatcagttattagataaactcggatttggtggyaatgatttaggtagtgatgcattaaaagctaaattaaattcattggatatggatgaactggcgattgaattacaagtcggtgtacctacattagaggatattattaaatccttgaaagcacctaatcgagayccaagggacgagtttgawacaccaatccttaaatccgatgtgctatcaattgaagatttamaagaaggaatgaaattgagtggyacagttagaaatgtagtagattttggagcatttgtagatataggtgttaaacaagatggacttgtccatgtttcgaaactttctaagaarttygtwaaaaayccaatggatattgtcagtgttggtgatatcgtwgacgtttggrttyayagtattgayaaaaataaagacaaagtatcattaacratgattgatccacatgaataa

SEQ ID NO: 2794 - DNA, 1767 bp, Staphylococcus aureus
atggcagagaaacatcttattgttgtcggaggtggcctagcgggcttaatgtcaacaattaaagcggcagaaaaaggtgcacatgtagatttgttctcagttgtaccagtaaagcgttcgcactctgtttgtgcccaaggtggcattaatggtgcggtcaatactaaaggggaaggcgattctccttggattcactttgatgatacagtgtatggtggcgayttccttgcaaaccaaccacctgttaaagcgatgacagaggcagcacctaaaattattcatttattagaccgtatgggygtaatgttcaatagaacaaatgaaggtctattagattttagacgtttcggtggtacattacaycacagaacagcatatgcaggggcaacaactggacaacaattattatatgcattggatgaacaagttcgtgcatatgaagtagatggattagttacgaagtatgaaggatgggaattycttggcatagttaaaggtgacgatgatagtgcaagaggtatcgttgcacaaaatatgacaactgctgagattgaaacatttggttcagatgcagttattatggcaacgggtggccctggtattattttcggtaaaacaacaaactcaatgattaatacaggatcagcggcttccattgtttaccaacaaggcgctatttatgctaatggtgagttcattcaaattcatcctactgcaatmcctggtgatgataaactrcgactaatgagtgaatcagcacgtggtgaaggtggacgaatttggacatataaagatggtaagccttggtacttcttagaagagaaatatcctgattatggtaacttagtacctcgtgatatcgcaacgcgtgaaattttcgatgtatgtattaaccaaaaattaggtatwaatggcgaaaacatggtatatcttgatttgtcacataaagatccacatgagttagatgtaaaactaggtggtatcattgaratttatgaaaaattcactggtgatgacccacgcaaagtaccaatgaagattttcccagctgtycactattcaatgggtggtctatatgtagattatgatcaaatgacaaatattaaagggttatttgcagctggagaatgtgacttctctcaacatggtggtaaccgcttaggtgccaattcattgttatcagcgatttatggtggtacagtagcaggtccaaacgcgattgattatatttcaaatattgatcgatcatatactgatatggacgaaagtatttttgaaaarcgtaaagctgaagagcaagaacgttttgataaattattagctatgcgcggtacagaaaatgcmtataaattacaccgtgaacttggtgaaattatgacagcaaatgtaactgttgttcgtgaaaatgaaaaactgttagaaacagataaaaagattgttgaattgatgaaacgttatgaagatattgatatggaagatactcaaacttggagtaaccaagcggtattctttacycgtcaaytatggaacatgttagtacttgcacgtgtkattacgattggtgcatataaccgtaacgaatcacgcggtgcccattataaaccagaattcccagagcgtaatgatgaagagtggttaaaaacgacaatggcctcattccaaggcgcatttgaaaaaccrcagtttacttatgatgacgtcgatgtgagtttaataccacctcgtaaacgtgattacacaagtaagtctaaagggggtaaaaaataa

SEQ ID NO: 2795 - DNA, 771 bp, Staphylococcus aureus
atggcgaaagagtcgaaatcagctaatgaartttcacctgagcaaattaaccaatggattaaagaacaccaagaaaataagaatacagatgcacargataagttagttaaacattaccaaaaactaattgagtcattggcatataaatattctaaaggacaatcacatcacgaagatttagttcaagttggtatggttggtttaataggtgccataaatagattcgatatgtcctttgaacggaagtttgaagcctttttagtacctactgtaatcggtgaaatcaaaagatatctacgagataaaacttggagtgtacatgttscgagacgtattaaagaaattggrccaagaatcaaaaaagtgagcgatgaactaaccgctgaattagagcgttcaccttctatcagtgaaatagctratcgattagaagtytcagaagaagaagtgttagaagcaatggaaatgggacaaagttataatgcgttaagtgttgaycattccattgaagctgataaagatggttcaactgttacgctattagatattatgggrcaacaagatgaccattatgacttaactgaaaaacgtatgattttagaaaaaatattacctatattatctgatcgcgaacgagaaatcatacaatgtacgtttattgarggwttgagtcaaaaagagacaggtgagcgtatcggtttaagtcaaatgcatgtwtcmmgacttcaragaacggcaattaagaaattacaagaagcagcacatmaatag

SEQ ID NO: 2796 - DNA, 816 bp, Staphylococcus aureus
atgactgaacaatcagtgaaaaacactccacaacatgaaayacaatctaaaccgaaacaaaaaacagtaaaattaattattaaacgacaagatacaagtgattctaagccttatgaagaaacatttgaaattccatatcgtgaaaatttaaacgtcattgcwtgtttaatggaaattagacgtaacccagttaatattaaaggtgaaaaaacaacacctgttgtctgggatatgaactgcttagaagaagtatgtggagcatgttctatggttatcaatggtcgtgcaagacaatcttgttctgcgattgttgatcaattagaacaacctattcgtttagagccaatgaatactttcccagttatccgtgacttacaagttgatcgttctagaatgttcgataacttaaaacgtatgaaagcatggatcccaattgatggaacgtatgatttaggtccgggrccacgtatgccagagaaaaaacgtcaaacagcttatgaattatctaaatgtatgacatgtggtgtatgtttagargtttgtcctaatgttactgaaaataataaattcgttggtgcrcaagcaatctcgcaagttcgtttgtttaatttgcacccaacaggatctatgactaaagatgaacgtttaaatgcattaatgggtacwggtggcttacagcartgtggtaattcacaaaactgtgttaatgcttgccctaaaggtattccattaacaacatccattgcagcaatgaacagagaaacaacattccacatgtttaaatcattctttggttcagaccatgaagtagaataa

SEQ ID NO: 2797 - DNA, 510 bp, Staphylococcus aureus
atgttaatgaaggaacggaggtcgaataacatgcaatctaaagaagattttatcgaaatgcgcgtgccagcatcggcagagtatgtaagtttaattcgtttaacactttctggcgttttttcgagagctggtgctacatatgatgatattgaagatgccaagattgcagttagtgaagctgtgacaaatgcagttaaacatgcatacaaagaaaawaacaatgtrggcattattaacatatattttgaaattttagaagataaaattaaaattgttatttctgataaaggtgacagttttgattatgaaacaactaaatcaaaaataggtccttacgataaaraygaaaatatagactttttacgygaaggtggcctaggtttatttttaatcgaatctttaatggatgaagtsacagtatataaagaatctggtgtgacaatcagtatgactaagtatataaaaaaagagcaggtgcgaaataatggcgaaagagtcgaaatcagctaa

SEQ ID NO: 2798 - DNA, 801 bp, Staphylococcus aureus
atgaataaaccaataggtgtaatagactctggtgtcggaggtttgacagtagctaaagaaattatgcgtcagttgccaaatgagacgatttattacttaggtgatattggrcgatgtccatatgggccaagaccaggagaacaagtaaaacaatatacagttgaaatcgctcgtaaattaatggaatttgatataaaaatgctcgtgattgcttgtaatacwgcaactgctgtagctttagaatatttacaaaagaccttatcaatcccagtgattggygtaattgaaccaggtgctagaacagcaataatgackactagaaatcaaaatgtattagtactaggaackgaaggcacaattaaatctgaagcatatcgwacrcatattaaacgtatmaatccacatgtagaggtacatggcgttgcctgtccaggttttgtgccacttgtagaacaaatgagatatagtgatccaacaattacaagcattgtyattcatcaaacactgaaacgttggcgtaatagtgagtctgatactgtcattttaggatgtacccactatccattgctctataaacctatctatgattattttggtggtaaaaagacagtgatttcgtctggattagaaacggctcgtgaagttagtgcattgctaacatttagtaatgaacatgcaagttatactgaacatccagatcatcgattttttgcaacaggtgatmcyacwcayattactaacattatcaaagartggytaaatttatctgtcaatgtggaacgtatatcagtgaatgactag

SEQ ID NO: 2799 - DNA, 327 bp, Staphylococcus aureus
atgaatcttaatatagaaacaaccactcaagataaattttacgaagttaaagtcggtggagaattagatgtttatactgtgcctgaattagaagaggttttaacacctatgagacaagatggaactcgtgatatttatgttaatttagmaaatgtgagttatatggattcgacaggtttaggtttattcgtaggtacattaaaagcattaaaccaaaatgataaagarctatacattttaggtgtgtcagatcgtatcggtagactatttgaaattactggtcttaaggatttaatgcatgttaatgaaggaacggaggtcgaataa

SEQ ID NO: 2800 - DNA, 186 bp, Staphylococcus aureus
atgtcaaatttatttagagaaatcgatttagatttagtttcaggtgtgcctttaataagaaacagcgcaattaatgaaattataattgatargatgaaaatccaacgccaacctaaaagtgttgcaactgcacctccaaaaaatgaacaaacaccagagccgccccatgagccaattgaccaataa

SEQ ID NO: 2801 - DNA, 588 bp, Staphylococcus aureus
atgaaagagattgttattgcatcgaataatcaagggaaaataaatgactttaaagtratatttccagattaccacgtaataggtatttcagaactaatacyagattttgatgtggaagaaacaggatcaacatttgaagaaaatgctatattaaaatcagaagctgctgcaaaagcattgaataaaacdgtcatagctgatgacagtggactagaagtttttgcattaaatggtgagccaggtatatactctgcacgttatgctggtgaaaataaaagcgatgaagcaaatattgaaaaattattaaataagcttggtaatacaactgatcgtcgtgcrcaatttgtttgtgtcataagtatgagtggccctgatatggaaacaaaagtatttaaaggtactgtttcaggtgaaattgcagatggraaatatggcgaaaatggtttcggatatgatccgatattttatgtaccgaaattagataraaccatggckcaactttcwaaagaacaaaaaggkcaaattagycatagacgaaatgcrattaatttaytwsaagcttwtcttgmrggtgawmaaaatgtctaa

SEQ ID NO: 2802 - DNA, 1002 bp, Staphylococcus aureus
gtggaagaatttaagcaacattataagggtttaattgatgaaagtttaacgtgccaagataaagtagaattgataaaaaagtgtgagaaatacactgacgaagtgattcgtaaggacgtcttgcctgaagacattgtcgatattcacaaaaactatatattgacgttaaacttaacgcgtgaagatgtgttcaagacattagatgtcttacaagawrtsgttaaagrmtttggttatagttatcgagattatcaaagattggtagataaacttcaagttcacgataaagagatagacttagcttctagcttacaacaaacaatgcttaaaacagatattccacaatttgatagtattcaaattggcgttatttcagtggcrgcacaaaaagtaagtggagattattttaatttaattgaccataacgatggcacaatgagctttgctgttgcagatgtcattggraaaggtataccagctgctttagcaatgagtatgataaagtttggcatggattcttatggacactcacaattaccgagtgatggyttaaaacgtttaaatcgtgttgttgaaaagaatattaatcaaaatatgttcgtcacaatgttttatggtttatatgaagaaatgaaccatttattrtatygtagttcagctggtcatgagcctggatatatttatcgcgctgaaaaagaagarttygaagaaatttcagttagaggtagagtgttaggaatcagttcacaaacacgatatcaacaacaagaaattccwatataccttgatgatttaattatcattttaacggatggtgtgactgaagctagaaatagtgaaggtacctttatagataaacaaaaacttttagaatatatwaaaaaacataaacatatgcacccacaagatattgttcaaattatctatgaagcaattttaaarcttcmaaacccaaataaaaaagatgatatgactattttgattataaaaagagtaaattaa

SEQ ID NO: 2803 - DNA, 258 bp, Staphylococcus aureus
ttgttatataatttagttatctcccagtggaaggaggtgaaatttatggatttagagaaaattgctcacgatattacaatctcgctattacctagagctctagatagacataagattcataacgaatggcaagaagtcggtgatgacgtaattgcattcgctaaagatagcgttgctcgtgactatttcagcatttactcttctgtgttattgggattacaagaagaagaaaaaagcagaaaagatttaggattgtaa

SEQ ID NO: 2804 - DNA, 561 bp, Staphylococcus aureus
ctgaataatcaaaacacatcatgtcacctctttctgagttcaatatttttgaactacataaaccttaacacgtttaaaaaatcaatgcaatacaaaagttcaatatttttgaatttttctattgaacttttgttcaacggagcttatactataactatattaatggaggaggaaaattcattgaactctacaactagcaacagaatcaaacaagctatgaagtcatcgaatttaaaacaaatagatatagtaaacaaagctaaaagcatggaagaagaaactggtatcaaattatcaaaaactgatttaagtcaatatgttaatggtaaagtgacgccgggtcagaagaaattatatgttttagctaaaatattgaatgttagcgaagcttggttgttgggatacgacgtagaaagtaaaagaattgatgataaagaaagagataaatttaatcagcatcaagaaactatagctggtcatgcaaataaagatgaatttactcctgaagaatgggaagaaatcgaaaactttatgcaatgggttagagatagaaagaaataa

SEQ ID NO: 2805 - DNA, 459 bp, Staphylococcus aureus
atgggaaaatacgaagaattgcttatgaaatgtgaagttgaagtgaaagaaacacaaagagtacctcgaggattcgatggttggtatcaagaaggagaaatttttattagaccttccctatccgaaaggaacaaattagaagtattatatgaagaacttgcccaccacaagttgacgtatggcaacattttagatcaatcgaaattcaacaatcgcaagtttgaaaattacgcaagacgacacggctttatctcagctgttccattacgcgaaattgtagaagcttataattatggcgtacgtaacttgtatgaattgtctgagtatctacaattaagcgaagaatacatattagaagcaatagaacaatataaaaagatatatggtattggaactcactatggcgagtattcgatcacatttgagccgttgagagtttttaaatataaggaaatataa

SEQ ID NO: 2806 - DNA, 597 bp, Staphylococcus aureus
ttgtttttagtgttcagaaaaaaggtggggcatatggatcaaacagcttttacggatagtcgtgtaacgaaaacgataaatcgcatacatgatggaatggtaaatctattaaaaacgaaggcatataatgatataactgttaaagatatatgtgaaaagagtcaaataagtcggacaaccttttatacacattacaaaactaaagatgattttatatacagctatcttaatacattgttaaaagaagcaaaaaagaaatttcttaaaagtgaaactctgacacaagcaatattttttaaaaagatgatttatttttggctaagcgaaggtcagctcattttgatgttattaggtgatgagagtgcttataaattacatcaagtcataaaaaaatcactacaacaacgtatcgaaattaattttgtaccagtattaaatacaaaaatgttaacgacgaaggaaaagtattttttacttatttttatgtgtaatgcaatcattggtgtgttacaagattgggtcaaacgaggatataaagagagtcctaaagaagtagcagaaattatgaataaaatatttgaaaatgcatttcgatag

SEQ ID NO: 2807 - DNA, 363 bp, Staphylococcus aureus
atgattagacgaggagatgtttatttagcagatttatcaccagtacagggatctgaacaagggggagtcagacctgtagtcataattcaaaatgatactggtaataaatatagtcctacagttattgttgcggcaataactggtaggattaayaaagcgaaaataccgacacatgtagagattgaaaagaaaaagtataarttggataaagactcagttatattattagarcaaattcgtacacttgataaaaaacgattgaaagaaaaactgacrtacttatccgatgataaaatgaaagaagtagataatgcactaatgattagtttagggctgaatgcagtagytcaycagaaaaattag

SEQ ID NO: 2808 - DNA, 330 bp, Staphylococcus aureus
atgaaaaagaattttattgggaaatcaattttaagcatagctgctattagtttaacggtatcaacrtttgccggtgaatctcatgcacaaactaaaaacgttgaagytgctaaaaaatatraysagtatcaaacaaactttaaaaaacaagtaaataaaaaagttgtggaygcacaaaaagctgtaaacttkttcaaacgtacaagaactgttgcaacacaccgtaaagcacaaagagctgttaayttaattcatttccaacacagytatgaaaagaaaaaattacaaagacaaatcgatctagttttaaaatataatactttaaaataa

SEQ ID NO: 2809 - DNA, 171 bp, Staphylococcus aureus
atgttatcttttagtcaaaatagaagtcatagcttagaacaatctttaaaagaaggatattcacaaatggctgatttaaatctctccctagcgaacgaagcttttccgatagagtgtgaagcatgcgattgcaacgaaacatatttatcttctaattcaacgaatgaatga

SEQ ID NO: 2810 - DNA, 105 bp, Staphylococcus aureus
gtgaaaaggaaatcgaatgtattaacaatcataaaaattgtaacggatatagtggcaaccgtgttaatcatacgtgctttattaaacagtcgtaaagatgctaaa

SEQ ID NO: 2811 - DNA, 1149 bp, Staphylococcus aureus
atgtcrgataaatattatagatctgcgtatatgaatgtagatttaaacgctgttgcatcaaatttcaaagtattcagtacattgcatccaaataaaacagtgatggctgtcgttaaagccaatgcctatggactaggtagtgttaaagtagcacgtcatttaatggaaaatggygccacattttttgctgtagcaacgttagatgaagcgatagaacttagaatgcatgggattactgctaaaattttagtcttaggtgtgttaccagctaaagatattgataaagcgatacaacacmgagttgccttaacggttccgtctaaacagtggttgaaagaagcaattaaaaacatttctggtgagcaagagaaaaagttatggttgcayattaaattagatacaggaatgggacgtttaggtattaaagatactaawacgtatcaagaagtgattgaaatcattcaacaatatgagcaacttgtatttgaaggcgtgtttacacactttgcctgtgctgacgaaccaggagatatgacaactgaacaatatcamcgttttaaagatatggtcaatgaagcaattaaacctgaatatatacattgtcagaactcagcaggytctctaytaatggattgccaattctgtaatgcaataagaccaggaatttccctttatggatattatccatcagagtatgtacagcaaaaagttaaagtacaccttaaaccaagtgtgcaattaattgctaatgtagttcaaacaaagacgctacaagcgggtgagtctgtaagttatggtgcaacttatacagctactgayccaacwacaatagcwttgttacctattggatatgcagatggctatttacgcatwatgcaaggtagctttgtaaatgtaaatggtcatcaatgcgaagttattggtcgcgtatgtatggatcagacaattgtwaaagtgccagatcaagttaaagctggagattcggtgattttaatagataatcatagagaaagtccacagtcggtagaggtggyagctgaaaagcaacatactattaattatgaagtgctttgtaacttgtcgagacgtttgccgcgaatctatcatgatggtgatcaacgttttgtaacaaatgaattgttaaaataa

SEQ ID NO: 2812 - DNA, 1167 bp, Staphylococcus aureus
atgaaaacaatacatttgtttcgcatctaccactcttttttattgaaaaagtggtatttgattatctatttactatttatmttagcggcactcsttattacattaacgacratccaacatgtaacagaagatgacaatcattttaatataggtgtcgtagataaagaycaatcaagtgaaacgaaattaatcttaaactctattggtaaagggagtaacctaggwaaaaaygtragcattaargcatatgatgataagcaagcacatactttgytaaaamarcakaaacttcaaggctattttgtttttgataaaggtatgaccaaggcattttataaacaaggygaactaccaatttcagtatatacatatgatcaacaatccatgaaaagtgtcgtgctatctcagctaacagattctgtttaccaacgycttatgcgrtcaatgggtggcatcttagcttttcaagacytagcaccgaaagcatcacattctgacagtatcaatgttatgactgatttgctgattacaggattaaaccgttcaggtgcatttaacttagaaccgattcatttatacgatacgggcagttattatgcaattacaggwtttttarcaacggtattcatctttgcactatctttatttacagttttgaaaatgaatcaagatactgtattgaaagcgcgattgaaaatgtttcatttttctaaagagcgtttattaatcattcgtrygttgatwacatggttttatactatgttatggagtatcgttggtgtagtttggattgtgttcagtattccgaatayctttgaattatataattggccaacgttagccattcatttaagctattatgttacctttttaatactgtggttattamtcatcgaacttttaacaacaggcttgttgaatagtattagtaaagtcatattagctattgtcatcctggtgttatctggtttaacaatacctacgatttttttacaacatatagcaaatggygttttcaatattcaaccgttcgcagttgtaacaaatcaattgttagaaattattttaaacaactacattttagaactgcaccctagtttctatcttagyttcatcgcacttttgataattaatttagctgtattggtttggaggtatcgtcaatga

SEQ ID NO: 2813 - DNA, 507 bp, Staphylococcus aureus
atgataattaaaattttaacaattctattactactttgtatattgagctatttggttacaaataraaagaagccttttctgttcttaaaracactctttatgggtgtggtrtttatctttataggatatatttcactggcaatatctgccgtaattatttatggyattattcaatttatcacaattgattttggtagttttttcttaatgggtattatwttratcttgatttcaagtatattccaattatttatagttagattactttttagaaaaaagaatgtcgatttracagaggttgtcgttttagarcatttaattcaatggttcttagtttaytttgcgatctatcaagcagtaaatgaaaaaatggacattaatgatattaatatcgacaatttycaatcwgtcttttttgacgtgtctaatttgaatttagtaattctaccaackttratyattagctgggtyacaatatttaactatagaatgagaagttacaaataa

SEQ ID NO: 2814 - DNA, 360 bp, Staphylococcus aureus
atgatacatggaattggtgtagatttaatcgaaatmgatcgaatamaagygttatatagtaagcarccaaaattggttgagcggattttaactaaaaatgaacagcacaaattcaacaatttcacacatgagcaacgtaaaattgaatttttagctggcaggtttgctacaaaagaagcgttcagtaaagcattaggcacaggcttaggaaaacatgtmgcwtttaaygatatagaytgttacaacgacgaacttggcaaaccaaagatygattacgaagggttyatcgtacatgttagtatctcacacactgagcattatgcgatgagccaagttgttttagaaaagtcagcattttaa

SEQ ID NO: 2815 - DNA, 2451 bp, Staphylococcus aureus
ttgcacacacgcaaaaaaggagacatgtcaatgacaaataaaatgaagaaatggcaaaaattatccaccattacgttattaatgaccggagtgattgctttaaataatggtgaatttagaaatgttgataaacatcaaatcgctgtggctgatacgaatgttcaaacgccagattatgaaaaattgaagaagacgtggctcgacgttaactacggttatgatcagtatgatgagaataatcaagatatgaagaagaagtttgatgctaaagaaaaagaagccaagaagttacttgatgacatgaaaactgatacgaatagaacatatttgtggtcaggagctgaaaaccttgaaactaattcttctcacatgacaaaaacctatcgtaatatcgagaaaatcgcagaatcaatgcaacataagaatacggtattaaaaacagttgaaaacaagttgaaaataaaagaagccctagattggatgcacaaaaatgtttatggcaagaatccttctcaaaaagtcgaggatttaactaaaaatcgtaaggggcaaactacacccaagaataactcattgaattggtgggattatgaaattggtacgccaagagcattaacaaatacactacttctaatggatgatatgctcactaaagatgaaatgaaaaattattcaaaacctattagtacatatgcaccatccagtgacaaaattttatcttctgttggtgaatcagaagatgctaaaggtggaaatttagtggacatttctaaagtaaaacttttagaaagtgttattgaagaagatgtagatatgttgaaaaagtctatagattcttttaataaagtgttcacttatgttcaagattctgccactggtaaaggtcgcaatggattctataaagatggctcttacattgatcatcaagatgtcccttacactggtgcttatggtgttgtactattagagggtatttctcaaatgatgccgatgataaaagaatctccttttaaaactacacaagataatgctacattaagcaattggattgacgaagggtttatgccattaatctataaaggtgaaatgatggatttatcacgaggtagagctatcagtcgtgaaaatgaaacgagtcatacagcgtcagcgactgtaatgaaatcattgttgagattgaatgataccatggatgattcaacaaaaactagatataagcaaatcgttaaaacttctgttaattctgattcaagttacaaccaaaataattatttaaattcatattcagacatagctaaaatgaaaaagttaatgaatgatagtactatttctaaaaacgatttaacacagcaacttaaaatatataatgacatggatcgtgtcacctatcacaataaagacctggactttgcatttggtttaagtatgacatcgaaaaacatcgcacgatacgaaaatatcaacggagagaacttaaaaggttggcacaccggtgcaggcatgtcttatttatataacagcgatgtcaaacactatcgcgataacttctgggcaacagccgatatgacttgtcttccaggcactactactttaaatgatatgccatctactaatactaagaatgataaatcttttgttggcgggacaaaattaaataataaatacgcaagcatcggtatggattttgaaaatcaggacaaaactttaactgccaaaaaatcatatttcatattaaacgataaaattgtcttcttaggaactggcattaaaagtactgattcatcaaagaatccagttacaagtgttgaaaatcgcaaagcaaatgggtataaattatttaaagatgatattgaaattaccacttcagatgttaatgctcaggaaacccattcagtctttttagagtccaacgatactaaaaagaacattggttatcatttcttagacaagccaaaaataactgtaaaaaaagaaagtcatactggtaagtggagtgaaattaataaaagtcaaaaaaaagatgacaaaaaagatgagtattatgaagtaactcaaacacataatacatctgacagtaaatatgcatatgttttgtatcctggtttatcaaaaagtgattttaaatcgaagaataataatgtaagtattgttaaacaagatgaagattttcatgtgataaaagataatgatggcgtatttgctggggttaattatagtgataatactaaatcttttgatataaacggaattactgttgaattaaaagaaaaaggcatgtttgtaattaaaaagaaagatgataaagcatataaatgtagcttctataatcctgaaactacaaataccgcttcaaatatagaatcaaaaatttttattaaaggttacaccataactaataaaagtgtcataaactctaatgatgctggtgtaaactttgaattaactaaataa

SEQ ID NO: 2816 - DNA, 492 bp, Staphylococcus aureus
atgagkgattataaktttatgtcaccacaygctaaaaaagtgatgaggttaagtgctgtgctgttttggataccmatagcgyttgtacttttaatmgcatttaatattttgaactggctattttgggagatwttagataachatwtatcyattgttagtagtgtgattataatattacttgttgctrttttcacgcttgtyatagcgccagtmtatcgatataagcactgcagatatgcatttgaaaaacaccatttgcgtgtacgaaacggcattttatttttggatgaaaargtaataccatattttcgtattcaaaatattgatatcgatgttggtcctataatgagacgctatcgattagcaactttgacmctttatacagcgggtggtcaagctgaaattgaattaatagatagaagtgaagcacgtagrttgaaacgmtggttaaataacgagagacatwtagaaaacaataaaaatgaggaataa

SEQ ID NO: 2817 - DNA, 1611 bp, Staphylococcus aureus
ttgaatctttcagacgctctttcaagaagtgtttccgatatgtcttatgaaaatttagataaagatcaaacatacgactttcttggccaagattacaaagtcatcgaaaaacgcgacgatacccagaatgggtttagagcatatgttttcgctccagtaatcaaaggtaaagttgataagagtcaacttttaataggttacgctggcactgacccatatagtctaaatgatattcgtactgatttacaacttcccattcatcataacacaaataatctaaaaattaataatcattataaagatttaaaaaactcaactattcacaaaaaatacaatacaataaaagataaaaatgacctttttagtttttcttctaatttaaataataaagcacttttcggtgatctatgggcagctaagtttgcaccgactcaaatggacgaaagtgatgcttttactgaatcagttaaaaagaaatatccagatagtgaaattcacccattaggacatagtttaggtgcgtttttagctcaatataatttaataaaacataatctggataacggtacaacgtttgcagcacctaacgtataccattcatttactggagactttaaaaaagacattgataatggtgtctatgattcaaaaatacgcaatattggccattttgatgatcctattaataatttgaatttttttaatcctcgtattggcaaaaatattacatcaatgccacattatgatggatttataactaaccttcctttgattggtcaacacacgcttaaatcttacaatgatttcgatgcagatggtaatgtgaaggaaatgccagaacttgaacaatttaatgatgaccaatctcttaataatagatttcaattatttgacccatttggtataaaaagcagatttttcgactctattaaaatcgatagttctatattaaatagaacaagtgaaaatgattttgatccttttgctattctcaataaaaaagataaattattcgaatcaaatgaccttgatatagaaggatttaataataaacaaaaagaagatttaagcattgatttaaatccttttgatgatgaattaaatgatgaggacgaaccattaattcccaaaagaggcgatagtaaaaaattaaaagcagaaaagaaaatctctgttaaaaaaaccaaaagtagttccaaaaattcaggcaaaaaagtaataattcagcctgatgaagtgcgtaatatcgctagcacaattcgtgatagactatttttgtatacacaaataattactgcattggatgaatatagagaagaaacaatgtcaggggctaatcgcattttagataaatatcaatcagagcttctaagcggttcacatgaatttataacacctaacgatcttgaacagtatatggagattttatcagttgagggaagttcaggtaatttcaagttttataatagtggtttaatggatgacttaattcaggcattagatcaaaacaaaaaagacttgctacaatttgctgaaaaactagaatttgctgcaaataaattcgaagaaaaagatttagaagaaagcgatgtttttggactatttagttaa

SEQ ID NO: 2818 - DNA, 300 bp, Staphylococcus aureus
atgagctcaaaagatgcaaagaaaagtcaagaagaagctagattacaacaattaaagcaagaaatgcgtaatagtactgataatatggttagcaatgctaaaaataatgtagcattaaaatttcaaacattaaatgaaatcattgaaacaattaataattcttcgcaaagtttagaaggtacatttgaaggaaaagcaagcgaagcagcccaacaaagtataaataaactcaaaaacaataacgaaaatcttaaacaaaaatttgagaccctattaaatacattgaagataaatggatga

SEQ ID NO: 2819 - DNA, 132 bp, Staphylococcus aureus
ttgaactgcaaaaatttggcacaagctaaaacaatgattaaaccgacagggattgccaatgacacaggtaaatcagtagaagaaatgatgtgtagaagttcacaagtaaactggaaaatagcaattaattaa

SEQ ID NO: 2820 - DNA, 1347 bp, Staphylococcus aureus
atgaaaaaagaaattttaaaaaagcaatgggtattatggacaatcttagtaacatctttctttagtataggcacaccaggtatagcaataatcccgttcagtttatcaatatatgcattatctaaattaatacttgttaataaatttgtagaacccgatttagtaacacttcaaaacttgaaagaaaaaaataaaagtatcaacattgaaaatcaaaaaatcaagcgtgaaatacaagaattgaagaatctaaaaaaagatttaatatctagtatagaagaaggtactaaagaacttgaacacattactagttatttaaatgatgaattatttaaatatgatatagaattaacttatcccttcgatttagttgaagtagactcatctcaaattaatacatatattaaaaaattacaaatgaaagaaaaagaattactaaatcttgaagaagtgaaaatatttaatgtttctacagagaataagagacatcaaaatgcacaggccaagcaaataatacgattatttaatgctgaaacttctcaattaataaataaagtaaatagcaaaaatatcgaaagcatgcagaacaaaatatttaaaagttatgaagggataaataaaatatttgaaacggataatgtacgtattcctgaaactttacttgacataaaacttgagatgttagatttaatgcacaagtatcaagttaagatagaagatgaaaagatcataagaagagaagaacgagctagactgaaagaaatagaacaagcagaaaaagaaatggagaaaaaactaaaagagcttgataaagacattagacaccacaataatgaaatcaaaaagctgacaatgtatttaaataacacagatttacaagtcgaaaaagaattatatattgaaaagattagagaattagatcaatcactcaagaatttaaattctgaaagagaaaatgtagaggacagaaaagataatgctcaatcagggtttgtttatataatatcaaatatcggttcatttggagaaaatgtttataagattggtgtaacccgtagattagaaccaatggatagaattaatgaattaagtagcgcatctgttccctttgaattcgatgtgcacgctttaattttctctgaaaatgcttttgagcttaaaaacaaattacacgaatactttaaaaaatataaagttaataaagttaacggaagaaaagaattctttaaggttaatattaatgaaattaaagataaagttttatcagaacacaatagcacagttcaattcattgatgaaccaaaagctatacaatacagagaaactttaagattaacttcactctaa

SEQ ID NO: 2821 - DNA, 267 bp, Staphylococcus aureus
ttgctaagaagtaataattatatttctaatatgattaggttcgatgttaatggtagygatcatgcaaatycaccaaataatgaaagaatacctacgccacatatacacatatatactgaagaatataataatggtggtattgcgatcccattaaaagatattgaagatttagaattaacagatgaaattatagaatcattagacttctttatgaagtatactaatataaaacacgataatgttataawagaaccaagattactgtaa

SEQ ID NO: 2822 - DNA, 777 bp, Staphylococcus aureus
ktgaagactatcgaagaaagaatgaacgaatatttcaactggttaaarcaaaattatatcttcaaagaattagatagttctacagaaattactactccctttaagaaccatttgaatgattttattagaatatatgctgatacactacctaataatgaaatttgtctatcagatracggattgacgattaatgaattagaaatgttgggtattgatataaacacaaaaacgagaactaaacttatacagaatattttaaatcaatttaatttaaaattagttgataaagaaattacagcggatgttaaaaatkagagttttgctcagtctaaacataatttaattcaaggcatattgaaaatttatgaccttactttaactactaaatctaacgttacaaacakattctatgaagaagtatttgaattcttatatgaccraraaataagaggtttagcacaagtttctgtttctggagaatcaggtttaaaatattctattgattatattgtttcwgaaacaaaatcacaaccagaaaaactagttaactttacaaayaacttagatttyaacaaaataactaatgaagcttatatttaccgtgatatcaaaccaaacagaccwtccagaaacaaattagaacctatcatgttrataattgtaaatgatgtakatcatccgataaatgaaagagcacaaactgtagcagaacatgaraaccttgagatattaaaatggtctaataaatcaaaaatcattgaaactttaacctcataa

SEQ ID NO: 2823 - DNA, 351 bp, Staphylococcus aureus
atgaaatttaaaaaatatatattaacaggaacattagcattacttttatcatcaactgggatagcaactatagaagggaataaagcagatgcaagtagtctggacaaatatttaactgaaagtcagtttcatgataaacgcatagcagaagaattaagaactttacttaacaaatcgaatgtatatgcattagctgcaggaagcttaaatccatattataaacgtacgattatgatgaatgaatatagagctaaagcggcacttaagaaaaatgatttcgtatcaatggctgatgctaaagttgcattagaaaaaatatacaaagaaattgatgaaattataaatagataa

SEQ ID NO: 2824 - DNA, 1584 bp, Staphylococcus aureus
atgtctgaacctcaaaaattacatccgatttcatattttaatggcataatcaatgctatcaaacaaaacatagtcgtcttttttattttcrttatctttcaattgaaagattttgattatacgaatcccgaatcatatttatggataggtattgtatttgtattctttttaatatcatacatttctcaaattgtcggaattatgaacacgcgatattggattgaggataattatttcattttaacaacaggtatttttaataaaaagcgtaaagaattaaatataaaacgtattcagtccgttgatatgacwcaaggggtcgtcaatcaaatkatwggtggygtggatttacaaatcaaaacrccaagtgatggtattgtcttaagtgttatttcgaaaaarcaaggtgaatatcttgaacgmtatattgatcaattgcaaacagagttgaagacagaagtggcgcaaaagtctagtrctgagaagaatgacaactgtaatcatgacattgaaggtaatgtggaagacatcgcagaaggtcgcttagatgaagtgcagaacactgatagtatgctwaatcagaaaaataaacgcattcctatatatcagatgaattttaaagaatcactatttatggcaatgaccagtggcgccattggtgtaacgttagcagctttagtaccgatttacggsgctgtaagagarttgatcccatggtcgaagctaaatcatgaaattagtcaatgggttcaaattgtaagtatttcagtattaatyatcattttactagtattaatagyggcatatattattggaacgattataacratgataagattttatggcttttcggtgatgcttgaaaatgagcaacttaaaattgaatatggwctctttaacaagawgaaagtractgtaccaacgaaacgattgcaagctgttgttgaacgtcagtcatatatacgaagattatttggctacacwgcaatacattttatcatcacaagtgattttgaaaataaaaaaatcgaagatgatgacaatgattcaggtagtgtgccgatattgccgtttattaaacgagacaaagcatatcaaattatccagaatytagtaccagatttatcttatcarcaagtyaatgaaggtatgcctttgtcaggtttccacagacactttttaatacctagtattattgtcatagctatggcaggwatwggctgttayttttggaatcaattattattgttatttacgattataacartagtcattattggtttatttgtratcaaaggatatctttatgtcaaacatgcgggttttaaaatgacagawgaacaaattactatccagaatttcgwgctattgaaacgaaatatttattattttaaagcgcawcacattataggatttgacacttggcaacatacattacttaaacgcaacaatttaaataattttagytttattgttgctaaaggtgtgggagcccaatcgattaacytaaaatacgcaagwagyraagatgyrmawawattgaartcrtggtatttragaggtgaaaatgatgagkgattataa

SEQ ID NO: 2825 - DNA, 93 bp, Staphylococcus aureus
gtgattgatccagaaatagcaagatatgcaccaacaccgatgacaattattggtccaatatctgtaactgtattaattgcggcaaargaatag

SEQ ID NO: 2826 - DNA, 684 bp, Staphylococcus aureus
atgatacgaggaggggtaaatatgttgttagagataaaagatttagtgtatgaggcaagtgatagagtcatactaaatcatattaatttaaaagtagataaaggtgaaaccattgcaattattggtccttcaggtagtggtaaaagtacatttcaaaaattaatatgtaatttaattagcccaaccagtggaacgctttactttaaaggtaaaccatatgatgattacgaaccagaaatattacgccgacacattagctatttaatgcaacaaagcgatttgtttggtgaaacgattgaagacaatatgatttttccgtctcttgcgcgtaatgataaatttgataaaaaacgtgctaagcaattaattaaagatgtagggttaggacactatcaattaagttctaaaatagaacatatgtcaggtggcgagcgtcaaaggatcgcgattgcacgccaattaatgtataccccagacatccttctattagatgaatcaacaagtgcgttagatattaataataaagaaaaaatagaaaatatcatttttaaattagcagatcaaggcgtggcaattatgtggattacccacagcgatgaccaaagtatgcgacactttcaaaagcgtataaccattgttgatggtcaaatttctaatacagaggagttgaaccaacatgagtaa

SEQ ID NO: 2827 - DNA, 480 bp, Staphylococcus aureus
atgtcagattatactaagttrwctaagagtcctaagtcagcattgttgtattaytacattacgaatggcttagaatttatattgagtgtagctgtgtatgtcattttttattttatatggttaagatttgaatggccwcaktacttamtttatattttrttkgttttakgtrctytgastrywttaaaattawkyattaagcctttatggcaatatcaytgtcgcttttatmaagttgatcaactmagtgtacaatatcgtacatcatttttwatatataaagaagaaacgagtcgaattgaacgtttacaatacttgtcgattaaatctaatccaattagtaaagtgcttaatttgtataaagttggatttatgactgcaggtcatactatttatttaccgatgatgtctcatgacgatgttaaaataatcgaagmgagaactatgtcgaatttgagaggggttgaaagtgatgtctga

SEQ ID NO: 2828 - DNA, 237 bp, Staphylococcus aureus
gtgcatttcacaagtttaaagacaggacctatgggcgatgcagtaattgaaggatacatcaatgaacacaaaaaagctgattttgttgcatatgggtcacctgaagaaaactatcaattcactggaggattgacaggaagtaatgaagtcttaggaaaattgaagaacgctgaaaatttaaaatctcctgaaaaaattaaagaagaaataaacaaaaagaaaaacactaaacagtga

SEQ ID NO: 2829 - DNA, 330 bp, Staphylococcus aureus
atgactgatgaagctaaatttgtccttttacaactttattcaatttaccttgrtagaattgacgaaggtatgtctaaacrttctgcatcttatttcggtagtgatgaatcctcatttaacgctttctttttaggttttaattttgaagactatatcgatgcagttcttgaattaaagcatagagattttgtaattgcttctgctgaagatggcggttttcttgagatggctctttctcgagaaggtatcgcctactcagaatcagaatccaaaaaagattacaaaacacttatgggtttaattagagatttgaaaaaattaataatctaa

SEQ ID NO: 2830 - DNA, 561 bp, Staphylococcus aureus
atgaatacgataagaaatagtatttgtttaacgataataactatggtattrtgtggatttttattcccgttagctatcacgttaattggtcaaatatttttttatcaacaagcaaayggyagtttaattacgtatgayaatcgtatagtwggatcaaaattgattggacagcactggacagagacacgatattttcacgggagaccgagtgcagttgattataatatgaatcctgaaaaattatataaaaacggcgtatcwtcaggtggaagtaatgaatcgaatggaaacaccgaattaatagcacgcrtgaaacatcatgttaaatttgrkaattcaaatgtaacaatagatgctgcaacaagttctgrgtcgggcttagatccgcatattacggtygaaaatgcattgaagcaagcacctcgtattgctgatgctcgtcatrtatctacttcaagagtggccgacttgattcaacatcgtaagcagcgtggtgtgttaacaaatgattatgtgaatgtgcttgaactaaatatygctcttgataagatgaaagattga

SEQ ID NO: 2831 - DNA, 465 bp, Staphylococcus aureus
atgaaaagattgttaggtttattattagtgagcacgttagtgttaagtgcatgtggaaatgatgagaatcaggaagaatctaaaaaagaagttaaatcaaaagaaaagaaaattgagaaggaaaaggaaaataaatcgaaaaaagayaaggaaaaagaagttgcaacacaacaacaaccagacaatcaaaccgttgaacaaccccaatcacaagagcaatcggttcaacaaccgcaacaacagataccacaaaatagtgttcctcagcaaaatgtccaagttcaacaaaacaaaaagcaaaaagttgatttaaataatatgcctcccactgatttttctacagagggtatgtctgagcaggctcaaaaacaaattgaagagctttcaatgcaaaaagactatcatggtctgtcacaaagagaatacaatgatagagtttctgaaattataaataatgataattga

SEQ ID NO: 2832 - DNA, 1974 bp, Staphylococcus aureus
atgagtttttataagctgaatcytaaacaattaataaaaaatccgataatgtttgtcgtygaggttggaatgvttttaacgttgatattaatatgttttcctgacatatttggaactagytatctatcgcgaggttatttgattacaatttttatcatattattaataactatattgtttgctaatttttcagaagcctttgctgaaggtcgtggaaaagcgcaagctgatagtttaagacaagcacaatcaaatttaactgctcgattgatagaagaaaatggtgcgtatcggatagtgaacgccacagagttaaaagccggacaaaatattcgggtagaaaatggagaaacaatccctgctgatggcgttgtaataaatggattagcaaccgttgatgaatctgcaattactggtgagtctgcacctgtgataaaagaatcaggtggcgattttgatggagtcattggcggtacacttgtaacatctgattggttagaaatacgtgttgagagtgaagcgggtacatcttttttagataaaatgattgccttagttgaaggggcggaaagaaataaaacaccaaatgaaattgcactttttacattattaacaacgttaacaattatatttttagtcgttattgtaacrttatatccaatagcatcttacctgcatttaattttacctattgcgatgctcattgcgttaacagtatgtttaataccaacgacaatcggtggtttgttatcggcgattggtattgcaggcatggatcgtgttactcaattcaatgtattagcgaaaagtgggcgtgctgtagaagtatgtggagatgtcgatgtaatgattttagacaagacaggsacaatcacttatggcaatcgaatcgctagtgaatttttaccagtgaatcaacaaatgmtkgaaaaattgatagtcgctgcttatatgtcatcaatytacgatgatacgccagaaggaaaaagtattgtrcgattagcgaagcasatgtatataaatgagctgcctaaagacattgatggcacatataagmcttttacagctgaaactagaatgagcggaatcattacaaatgaaatatcggtattcaaaggtgcacctaatagtatgataaatcttgtcaaacaacaacaaggcaatattcctcttaayattgagtctmtctgtatggatgtatcgagtaaaggtggcacaccattaatagtcattgaaaacaaygtcatgcttggcgtgatttatttaaaagatgtgattaaagatggtcttgtagaacgatttrctgaattgagaaaaatgggsattgaaacagttatgtgtacrggygataatgctytaacagcagctacaattgcaaaagaagcsggkgttgatagatttgttgcagagtgtaaacccgaagataaaattaaagtcatcaaagatgaacaagcgaaaggccatattgttgcgatgacaggagatggtacaaatgatgcacctgcgctagcacaagcgaatataggattagctatgaactcagggacaattagtgctaaagaggcrgcyaatctaattgatttagattcgaatcctacaaagttaatagaggttgtaaaaataggcaaacaaytattaatgacgagaggtgcattaacgacatttagtttggctaatgacgtagcaaaatactttgcaattttacctgcactaatgatgtcaacrattccwgaaatgacttcactaaatattatgcatttatcgtcacctaaatctgcaattatatcagctttgatattcaatgcattaatcattgttgccttaattccaattgcyatgaaaggtgtaaaagtaaagggttacagcattgatagaatytttataaataatatgttgatttatggattaggtggattaatcgtcccgtttttaggcattaaattaatagatatgattgtacaattttttgtgtra

SEQ ID NO: 2833 - DNA, 657 bp, Staphylococcus aureus
ttgtacaccgaacattgttgggaagggggaggatgcgaattgatacaaccagttttacacggtattttattagcattggggcttattttgcccctaggagcgcaaaacgtgtttgtatttaatcaaggtgctaatcaaaaaaaaatgataaacgcattgccggttgttataacggctggattatgtgacacttttttaataataattgctgtactgggtgtttcactaatattaatgtcattaccagttctacaattatttatttatatagttggtttgttttttctattgtacatggcttggtctttatggaaagaaaagcctaacactctagagaactatgaaccgatgagtacaaaaaagcaaataggttttgctatatctgtttcgttgttaaatccacatgcaattatggatacagttggtgtaattggatcaagcgcatctgtctattctggtttagaaaagatacttttttgtattgccacaattatggtttcttggctatggttttttctgttagcaatattaggtaaggttttaggttctatagatagaacaggtaaatatatattatttttaaataaaatctctagtataataataattgctgttagtattgttattgtaaaaaatatattaaagttaattttataa

SEQ ID NO: 2834 - DNA, 981 bp, Staphylococcus aureus
ttgacactaaaattagaaaaagctgtattttcaatggagataaaaaaagatttgaagttattaatgaaaaaggataattaccacaatattttcgctttgatttttgactggttggtaattctcgggagtgcatgtataagtatctatatgagtaatctcattatttatattataagtattattttaattggaagtcgaatgagggcgtttgataacttaatgcacgaagcatgtcatcgttcattatttacaaataagttttataataaatggattgcttgtcttttagtagcattccctatatttacaagctttactacatattgtaattctcattttaaacatcatagaaatttatgggatgaggaaaaagacccagatactaaacgatatcgcattgtaggtttagataagccgcaaaaagatgtgaaaaaatttataattaatcacattgtaaaggtactatttttattccatgtgcctaaatatgttttaggtacagtttcagctaacttatacagtagggatacacctaaatcagaaatatggactagaaatattttctgggtaacaattattacgttatcaattatgtttaatttttggttatatgttattctttattggtttataccacttttaacaacttttcagattattcgttattgggcagaaatggctgaacactctggattgaataatgatagtgagttaacagcaagtcggaatacttttggtatgccttggacaatatttttatttcatcctcaccatgataattttcacttagttcaccatttattcccagcaattccacattataatttgaaaaaagcacatattatattaatgaaagatcaaaaatatagagaagcacaccattgtactgggttcttcaagacgacactaccgggtttttatagtgtagtaaaagatatttgtacaccgaacattgttgggaagggggaggatgcgaattga

SEQ ID NO: 2835 - DNA, 1002 bp, Staphylococcus aureus
atgaaaaatttacgaaacagaagttttttaactttattagacttttcamgacaagaggtagaattcttattaacactctccgargatttaaaacgtgctaaatatattggcactgaaaagcctatgttaaaaaataaaaatattgcactgttrtttgaaaaagattctacaagaacgcgatgtgcatttgaagttgcagcgcatgatcaaggtgcwaatgtaacttatttaggcccaactggatcacaaatgggtaaaaaagaaacaactaaagatactgcacgtgtgcttggtggaatgtatgatggcattgaataccgtggtttttcacaaagaacagtagaaactttagctgartattcaggcgtaccagtgtggaatggtttaactgatgaagatcatcctactcaagttcttgctgatttcttaacagcaaaagaagtyttraaaaaagattatgcagatattaactttacatatgttggagatggwcgtaataacgttgcaaatgcattaatgcaaggtgctgccattatgggtatgaacttccatttagtttgtccaaaagaattaaatccaacagatgaattattaaatcgctgtaaaaatattgccgctgaaaatggtggcaacatattaatcacagatratattgaccaaggtgtaaarggttcggatgtaatttacactgaygtttgggtatcaatgggtgaacctgatgaagtatggaaagaacgacttgaattattgaarccwtatcaagtaaataaagaaatratggataaaactggtaatccaaatgttatttttgagcattgcttaccatctttccayaatgctgatacsaaaatwggwcaacaaatttttgaaaaatatggwattcgagaaatggaagttacagatgaagtattcgaaagtaaagcttcagttgtattccaagaagctgagaacagaatgcatacaatmaaagcagtsatggttgctacattgggtgaattttaa

SEQ ID NO: 2836 - DNA, 1677 bp, Staphylococcus aureus
atggaaataattttgtttctaacaatgatggttatgattrcrtatgtttttagtggatatctatatcgcgtagcattggtgcaatcgtcaagagtagatttaatatttactagatttgaaaatatgtgttttaaaattatcggcacagatttagaacacatgtcagctaaaacatatgtcaaacattttctggcatttaatggatttatggggkttataacatttgtattgctaatagttcagcaatggctttttttaaatccaaatcatawtttaaaccaatcgatagatttagcgtttaatacagcaatatcttttttaacaaatagtaatttacaacactataacggtgaatcagrtgtgacatatttaacgcaaatgattgtaatgacatatttaatgtttacatctagtgcatcaggttacgccgtttgtatagcgatgttgagacgtttaacyggattractaatatcattggtaatttttatcaagatattgttcggtttattgtccgagtrcttttaccattatcatgtttaattagtattttattgatgactcaaggtgtaccacaaacgttgcatgctaatttaatgattcggactttaagcggacatattcaacatattgcatttggacctattgcatcacttgaatcaataaaacatcttggtacgaatggtggaggatttttagcaggaaattctgcaacaccttttgaaaatccaaatatttggagcaattttatagaaatgggcagtatgatgttacttcctatgtcaatgttgttcttatttggtcgcatgttaagtagacatggtaaacgagtacatcgtcatgcgytgatattatttgtcgcaatgtttttcatttttatagcaattcttacattaactatgtggagtgagtatcgtggtaatccaatactagcraatttaggmattyatggascgaatatggaaggtaaagaggtacggtttggagcaggyttgtcagcactatttacagttattacgacggcatttacaacgggttctgttaataacatgcatgatagcttaacgccthtaggtggattaggaccaatggtattaatgatgctaaatgttgtatttggtggcgaaggcgtaggactcatgaatttattgatatwtgtcttactgacrktgtttatatgcagtttgatggttggtaaaacrccagaatatttaaatatgccaattggcgcccgtgaaatgaaatgtattgtcttagtctttctcatacayccaattttaattttagtattttcagcacttgcttttatgattcctggagcaagtgaaagtataacgaatccgtcttttcatggtatytcrcaagttatgtatgaaatgacatcagctgctgcgaacaatggatcagggtttgaaggactgaaagatgatacaacattctggaatatctctacaggaatcattatgttgctttctcgttatataccaattattttgcaattaatgattkcatcaagtttagtgaataaaaaatcataccaycaagataaayatacaatagcgattgataaaccttattttggygtatcactaatcgtatttatcgttttactaagtggtttgacatttattccagtactattacttggtcctattggtgaatttttaactttaaaataa

SEQ ID NO: 2837 - DNA, 933 bp, Staphylococcus aureus
atggcgaaaatagtagtagcattaggtggkaatgctttaggaaaatcacctcaagaacaactcragcttgttaaaaatactgcgaaatcattagtaggattaataacaaaaggacatgagattgttattagtcatggtaatggrccacaggttggaagcattaatttgggacttaactatgctgcagaacayaaccaaggtccggcatttccatttgctgaatgtggcgcaatgagtcaagcttacatcggctatcaattacaagaaagcttacaaaaygaattgcattctattggaatggataaacaagtggtaacactagtgacacaagttgaagttgaygaaaatgatccggcatttaacaatccttcaaaaccaattgggttattttacaacaaagaagaagctgaacaaattcaaaaagaaaaaggatttayatttgttgaagatgctggaagaggrtatagrcgygttgttccttcaccacaacccatctctattattgaattagagagtattaaaacacttattaaaaatgatacactcgttattgctgctggyggtggaggtataccagtaattagagagcaacatgatggttttaaaggtattgatgcagttatagacaaagataaaacaagtgcrttgttgggtgctaatattcaatgcgatcaattgattattttaacwgcaattgattatgtatatattaattttaacactgaaaaccaacagcctttgaaaacaacaaatgttgatgaattaaaacgatatatagacgaaaatcaatttgcaaaaggaagtatgttaccaaaaattgaagcagccatatcatttattgaaaacaatccaaaaggaagygtgcttataacatcattaaatgaattagatgctgccttagagggtaaagtaggtactgtgattaaaaagtaa

SEQ ID NO: 2838 - DNA, 108 bp, Staphylococcus aureus
atgttgttgtgttgtaaggaggttatggcaatgctcatcgttttattaytggtagttattgcattagttttgtatttattttatgccttaattcgtagtgaaaaattt

SEQ ID NO: 2839 - DNA, 1557 bp, Staphylococcus aureus
gtggaaaatacaattaatgaaagtgaaaagaaaaaacgatttaaattaaaaatgccaggtgcatttatgattttattcattttaacggttgttgcagttatagcaacatgggttattcctgctggtgcatattctaaactttcttacgaaccttcatcccaagaactaaagatagttaaccctcataaccaagtgaaaaaggttccrggtacgcaacaggaactagacaaaatgggrgttaaaattaagattgaacaatttaaatcaggtgcaattaataagccrgtatcaattccgaatacttatgaaagattaaagcaacatccagctggaccagaacaaataacaagtagcatggttgaaggtacgatagaagcggtygatatcatggtattcattcttgtaytagggggacttattggcgtagttcaagccagtggttcttttgaatcgggattgytagctttaacraagaaaacwaaagggcatgaatttatgctaattgtgtttgtatcaatactaatgattatcggcgggacrttatgtggtattgaagaagaagctgtmgcattytatccgattttagtccctatatttatagcgttaggatacgattctatcgtttcwgttggtgccatattccttgccagctctgtcggtagtacmttttcaactattaacccgttctcggttgtaattgcctctaatgcmgctggtacaactttyacggatggyttgtattggagaataggtgcttgtattgtcggtgcgatttttgttattagttatttatattggtactgtaaaamaattaaaaamgatcctaaagcgtcatattcttatgaagacaaagatgcttttgaacagcaatggtctgtrttaaaagatgacgatagtgcccattttactttgcgtaagaagataatccttacattatttgtactaccatttccaattatggtatggggagttatgacgcaaggttggtggttcccagttatggcttcagcatttttaatatttacaattataataatgtttattgctgggacaggtaaatctggattgggagaaaaaggractgtagatgcatttgtcaatggygcatcaagtttagtaggtgtatctttaattattggwttagctcgaggtattaatttagtgttgaatgaaggtatgatttcagatacaatcttacacttttcatcatctttagttcaacatatgagtggaccattatttatcatcgtattactatttattttcttctgtttaggttttatcgtgccatcatcttctggmttagcggtattatcaatgcctatctttgcaccactagctgatacagtaggtataccaagrttcgtcatcgttacgacatatcaatttggtcaatatgckatgttattcttagcgccgactggacttgttatggccacactacaaatgttaaacatgcgatattcacattggttccgatttgtatggccggtagttgcttttgtattgattttcggtggcggastactaattacgcaagtactaatttattcataa

SEQ ID NO: 2840 - DNA, 1521 bp, Staphylococcus aureus
ttgcaaaattttaaagaactagggatttcggataatacggttcagtcacttgaatcaatgggatttaaagagccgacacctatccaaaaagacagtatcccttatgcgttacaaggaattgatatccttgggcaagctcaaaccggtacaggtaaaacaggagcattcggtattcctttaattgagaaagtagtagggaaacaaggggttcaatcgttgattttagcacctacaagagaattggcaatgcaggtagctgaacaattaagagaatttagccgtggacaaggtgtccaagttgttactgtattcggtggtatgcctatcgaacgccaaattaaagccttgaaaaaaggcccacaaatcgtagtcggaacacctgggcgtgttatcgaccatttaaatcgtcgcacattaaaaacggacggaattcatactttgattttagatgaagctgatgaaatgatgaatatgggattcatcgatgatatgagatttattatggataaaattccagcagtacaacgtcaaacaatgttgttctcagctacaatgcctaaagcaatccaagctttagtacaacaatttatgaaatcaccaaaaatcattaagacaatgaataatgaaatgtctgatccacaaatcgaagaattctatacaattgttaaagaattagagaaatttgatacatttacaaatttcctagatgttcatcaacctgaattagcaatcgtattcggacgtacaaaacgtcgtgttgatgaattaacaagtgctttgatttctaaaggatataaagctgaaggyttacatggtgatattacacaagcgaaacgtttagaagtattaaagaaatttaaaaatgaccaaattaatattttagtcgctactgatgtagcagcaagaggactagatatttctggtgtgagtcatgtttataactttgatatacctcaagatactgaaagctayacacaccgtattggtcgtacgggtcgtgctggtaaagaaggtatcgckgtaacrtttgtwaatccaatygaaatggattayatyagacaaattgaagatgcwaayggtagaaaaatgagygcacttcgtccaccwcatcgtaaagaagtacttcaagcacgtgaagatgacatcaaagaaaaagttgaaaactggatgtctaaagagtcagaatcacgcttgaaacgcatttctacagagttgttaaatgaatataacgatgttgatttagttgctgcacttttacaagagttartagaagcraacgatgaagttgaagttcaattaacttttgaaaaaccattatctcgcaaaggccgtaayggtaaaccaagyggttctcgtaacagaaatagtaagcgtggtaatcctaaatttgacagtaagagtaaacgttcaaaaggatactcaagtaaraagaaaagtacaaaaaaattcgaccgtaaagagaagagyagcggtggaagcagacctatgaaaggtcgcacatttgctgaccatcaaaaataa

SEQ ID NO: 2841 - DNA, 165 bp, Staphylococcus aureus
atracaatgagtaaatcaagtgatgccttatttaattcattaacacaatcgtttgagctaatagaaggtgtatataatgaacttgtaacggataacttgaaaatagtcatgtataagccaagaaaagaaagtacaagtggtcgaataaatcgtagatttaaataa

SEQ ID NO: 2842 - DNA, 1179 bp, Staphylococcus aureus
atgacaagaccatttaatcgtgtacatttaatcgtaatggattcagtaggtattggtgaagcgccagacgcagctgattttaaagatgaaggttcacatactttaagacataccttagaaggyttcgatcaaactttaccaaaccttgaaaagttaggtctagggaacatcgataaattaccagtagtaaatgcagttgaacaaccagaagcatactatactaaattgagtgaagcttcagttggtaaagatacaatgactggtcactgggaaattatgggwttaaatattatgcarccttttaaagtataccctaatggattccctgaagagttaattcaacaaattgaagaaatgacaggtcgtaaagttgttgctaacaaaccggcatcgggtacgcaaattatcgatgagtggggcgagcaccaaatgaaaactggygacttaattgtttatacaagtgcagacccagtattgcaaattgctgcacatgaagacattatcccattagaagagttatatgatatttgtgaaaaggttcgtgagttgacaaaagaccctaaatatttaattggtcgtattatcgcacgtccatatgttggtgaaccaggaaactttacacgtacatctaatcgacatgactatgcgttaaaaccwtttggtaaaactgtcttagatcatttgaaagacggtggttatgatgtyattgccatcggtaaaattaatgacatttatgatggtgaaggtgtaacagaagcggttcgtacraagagtaacatggacggtatggatcaattgatgaaaattgttaagaaagatttcacaggtattagcttcttaaacttagtagactttgatgcattatacggtcatcgtcgtgataaaccrggttatgcacaagcaattaaagatttcgatgatcgcttgccagaactgtttagcaacttaaaagaagacgatttagtaattattacagcagaccatggtaatgacccgacagcgccaggtacggaccatacgagagaatayatcccagtaattatgtacagtccgaaatttaaaggtggtcatgcactagaaagtgatactacattcagytctatcggtgcaactatagcagataatttcaacgtaacattaccagagttcggtaaaagttatttaaaggaattraaatag

SEQ ID NO: 2843 - DNA, 1524 bp, Staphylococcus aureus
atgtctaaaaarytaaaaattataattcctattattrttgtcttaytattaataggtggaatcgcatggggagtttatgcattttttgcwaayacaccgaaaaatacatacytaaaaagygaacaacaaacwgcaaaaatgtataaagattattttaatgaccgttttgaaaaygaagtgaagttccaagaaaagatgaaagataattcrtttttatcttcattagaattaagcgcagatgcatcwgatgaaattgttaargggcttggyattcctaaatctgttgttaatgcwtcgaaaattaaaatgtcatatggacatgatcctaaaaaagagaaatcaatgattaatcttgaaccaacaatmgcagactctgcattagggaaattccagttagctgcagataaagataagcattatttcgaatcaccattatttaaagggaaatatagtgttaataattctgatttattatcaacktattcaaaacttacaggtgaagatgaagaaacagcaaaagaaaatggtattacaaaccaacaactaaatttaaatactcttttyartaatgctcaagcacaacaaagtgactacagcaaaattgccgaaaaatattccgaacttattgtcgacaaattagatgacgataattttgataaaggtaaaaaagaagaaattaaggttaatggtgaaaagtacaaagttagacctgtcacgttaacacttagcagagctgacactaaaaaaattacattagctgtattagaagaagctaaaaaggataaagaccttaaaaaattaatggaagaacaaggtrctasaaaagactwtgawaargacatyaaaaaagcaattgacgatgtcaaagaaactaaaaaggatgaatttgctaaaattcaatctaaaatttataccgaaaaacatacgattgtaaaacgagaaattactattacagacaaagaaaataataaaactaaaatcaaaggtactaatactttagaagacgataagttaaaactagattacgcacttgatttcgatcaagataaatacacgtatgctgaagcgaaatatacaattaaaggcgtatcttctaargaaaaagayaataaatayarygataaatacgaatttggtaaaaagacagaatatgatgaatcaaaaatcaaattagataaccaagaaaaagtagatggcacaaaacgtcaagataaaggtaaaatyactgtcgcrttagataaatatagcgacgaaaatgaattcacttttgaaaataatatagattctgacgtmaaaaataacactcagaaatctacgttaaatatcggcatcaaatatgctgaagaaccaattaatttcattttaaaatctagcacaaaattgaaagcagatattgattttgatgatagtggtgcraaagatttcaatagtctatcttcaaaagaccgtgaaaaacttgaaaaagaaatcgaaaaaaatggcggcaaaatgtttgaatcaattttaaaaaaggcatctaaataa

SEQ ID NO: 2844 - DNA, 198 bp, Staphylococcus aureus
atgagaaatcaaattcaaaaactattagacagtgatttgagcagtttacatatatcraaacaaacaggagtkccacaaagcacaatacacagaatgagaaaaaawgaaagatcattagacaatatgtcattgaaaaacgctgaactactttataaatttgccaatrgtatatttagyratgaaaattawgaagaataa

SEQ ID NO: 2845 - DNA, 1359 bp, Staphylococcus aureus
atgattaatgttacattaaagcaaattcaatcatggattccttgtgaaattgaagatcaatttttaaatcaagwgataaatggagtcacaattgattcacgagcaatttctaaaaatatgttatttataccatttraaggtgaaaatgttgacggtcatcgctttgtctctaargcattacaagatggtgctggrgctgctttttatcaaaraggsacacctatagatgaaaatgtaagcgggcctattatatgggttgaagacacattaacggcattacaacaattggcacaagcttacttgagacatgtaaaccctaaagtaattgccgtcacagggtctaatggtaaaacaacgactaaagatatgattgaaagtgtattgcataccgaatttaaagttaagaaaacgcaaggtaattacaataatgaaattggtttacctttaactattttggaattagataatgatactgaaatatcaatattggagatggggatgtcaggtttccatgaaattgaatttctgtcaaacctcgctcaaccagatattgcagtyataactaatattggtgagtcacatatgcaagatttaggttcgcgygaggggattgctaaagctaaatctgaaattacaataggtytaaaagataatggtacgtttatatatgatggcgatgarccattattraaaccrcatgttaaagaagttgaaaatgcaaaatgtattagtatyggtgttgctactgataatgcattagtttgttstgttgatgatagagatactacaggtatttcatttacgattaataataaagaacattaygatctrccaatattaggaaagcataatatgaaaaatgcgacgattgccattgcggttggtcatgaattaggtttgacatataacacaatctatcaaaatttaaaaaatgtcagcttaactggtatgcgtatggarcaacatacattagaaaatgatattactgtgataaatgatgcctataatgcaagtcctacaagtatgagagcagctattgatacactgrgtacyttgacagggcgtcgcattctaattttaggagatgttttagaattaggtgaaaatagcaaagaaatgcatatcggtgtaggtaattatttagaagaaaagcatatagatgtgttgtatacgtttggtaatgaagcgaagtatatttatgattcgggccagcaacatgtcgaaaaagcacaacacttcaattctaaagacgatatgatagragttttaayaarcgatttaaaagcgcatgaccgtgtattagttaaaggmtcacgtggtatgaarttagaagaagtkgtaaatgctttaatttcatag

SEQ ID NO: 2846 - DNA, 135 bp, Staphylococcus aureus
atggaaggtttatttaacgcaattaaagataccgtaactgcagcaattaataatgayggcgcaaaattaggcacaagcattgtgagcatcgttgaaaatggcgtaggtttaytaggtaaattattcggattctaa

SEQ ID NO: 2847 - DNA, 1071 bp, Staphylococcus aureus
atgacaaaagaaaatatttgtatcgtttttggagggaaaagtgcagaacacgaagtatcgattctgacagcacaaaatgtattaaatgcaatagataaagacaaatatcatgttgatatcatttatattaccaatgatggtgattggagaaagcaaaataatattacarctgaaattawatctactgatgagcttcatttagaaaatggagaggcgcttgagatttcacagctaytgaaagaaagtagttcaggacaaccatacgatgcagtattcccattattacatggtcctaatggtgaagatggmacgattcaaggrctttttgaagtwttggatgtaccatatgtaggaaatggtgtattgtcagctgcaagttctatggacaaacttgtaatgaaacaattatttgaacatcgagggttaccacagttaccttatattagtttcttacgttctgaatatgaaaaatatgaacataacattttaaaattagtaaatgataaattaaattacccagtctttgttaaacctgctaacttagggtcaagtrtaggtatcagtaaatgtartaatgaagyggaacttaaagaaggtattaaagaagcattccaatttgaccgtaagcttgttatwgaacaaggcgttaacgcacgtgaaattgaagtagcagttttaggaaatgactatcctgaagcgacatggccaggtgaagtcgtaaaagatgtcgcgttttacgattacaaatcaaaatataaagatggtaaggttcaattacaaattccagctgacttagacgaagatgttcaattaacgcttagaaatatggcattagaggcattcaaagcgacagattgttctggtttagtccgtgcdgatttctttgtaacagaagacaaccaaatatatattaatgaaacaaatgcaatgcctggatttacggctttcagtatgtatccaaarttatgggaaaatatgggcttatcttatccagaaytgattacaaaacttatcgagcttgctaaagaacgtcaccaggataaacagaaaaataaatacaaaattgactaa

SEQ ID NO: 2848 - DNA, 135 bp, Staphylococcus aureus
atgactggactagcagaagcaatcgcaaatactgtgcaagctgcacaacaacatgatagtgtgaaattaggcacaagtatcgtagacatcgttgctaacggtgtgggtttactaggtaaattatttggattctaa

SEQ ID NO: 2849 - DNA, 138 bp, Staphylococcus aureus
atgaaacgtcctgaaaagattcaaaatgtagtcaaactattgtcatcattaggtgtgaatattaaaaaaactaaatctcgtttagacattattaatactttgccagcatctaataaagtaagtcacgaattaaaataa

SEQ ID NO: 2850 - DNA, 696 bp, Staphylococcus aureus
atggggaaattgggatataaaaatattttgatagactttgatgatacaattgttgatttttatgatgcagaagaatgggcrtttyactatatggcgaatgtttttaatcataaagcaacaaaggatgattttttaacatttaaaaaaatcaatcaccaacattgggaagcttttcaacaaaataaattaacgaagtctgaagtattatcagaacgatttgtraattacttcaaacatcatcaaatggaagttgatgggcatcgtgcagatgtgttatttagaaatggattagcagaagctaaagttaaatactttgatcaaacattagaaacaattgtcgarttatcgaaaagacatratytatatattgttactaatggtgtaacmgaaacgcaaaagagaaggttaaatcagacgccrttgcataaatatattaaaaagatatttatatctgargaaacaggatatcaaaaacctaatccggaattttttaattatgtttttaatgatattggtgaggatgaaagacagcactcgattatagttggagattctttaacatctgacattctaggtggaatcaatgcgggtatagctacttgctggtttaattttagaggatttgatcataatccaggaattatacctgattatgaaattaattcatggaaacaactaaatgawattgtacgttaa

SEQ ID NO: 2851 - DNA, 210 bp, Staphylococcus aureus
atgatacatcaaaatacgatttacacagcgggaattgaaacagaagaacaagtaagtcaattgacagaacgcatttcaaatatgataggtgttcatcaagtgawtattaatataatagayggtcargtaactgtakcgtatgagacaccagcaaatttgaatagtattgaaaaagaaatctatgatgaaggatacaaaattgtawtttag

SEQ ID NO: 2852 - DNA, 1614 bp, Staphylococcus aureus
atggactgtaaagtagttagtttaaatgaaaaagatcagtttataccaaaaataaagagcagtgaycctgtaataacaggattatttcaatatgatgcagctcaacaaaytagttttgaaaaaagratgtctaaagaaaataatggaagagaagcggcattagcgaatgttattcgtgaatatatgartgatttaaagctttcwartgaacaagaattaaacatacaacatttagctaatggttcaaaagttgtgattggtggacaacaagcagggcttttcgggggaccattgtatacattccataaaatattttcaatcattacyttatctaaggaattaacggatacacataagcaacaagtagtaccagttttttggattgcaggagaagatcatgatttcgatgaagtgaatcatacatttgtttataacgaaaatcatgggtcrctgcataaggttaaatatcatacaatggagatgccagagacgacwgtctctagatattatcctgataaggctgagttgaaacaaactttaaaaacgatgttcattcatatgaaagaaactgttcatacacaaggtctactkgagatttgtgacagaattattgaccaatatgactcgtggactgatatgtttaaagcactactgcatgaaacatttaaagcatatggcgttctatttatagatgcgcagtttgagccgttaagaaaaatggaagcgcctatgtttaaaaagattttgaaaaaacatcagttgcttgatgatgcttttagagcaacacaamaacgtactcaaaatcaaggcttgaakgcgatgatacaaacagatacaaatgttcatttattcttacatgatgaaaatatgcgycaattagtttcgtatgatggtaagcattttarattaaataaaacagataagamatatataaaggaagaaattatwaatattgcggaaaatcaacctgaattattttctaataatgtagtgacaagaccattaatggaagaatggytatttaacacggtggcatttrttggaggrccgagtgaaattaagtactgggctgaactaaaagatgtatttgaactatttgatgttgaaatgcctatcgtgatgccaaggcttagaattacttatttaaatgaccgtatwgaaaaattactttcgaaatacaatattccattagaaaaagtgttagtcgatggtgttgaaggagaaagaagtaagtttattagagaacaagcatcasatcaatttattgaaaaggtagaaggtatgatwgaacaacagcgtcgtctawacmaagacttattagatgaagtggcggggaatcaaaataatattaaccttgtgaataaaaataatgaaattcatatacaacagtatgattatttgttaaaacgttatcttttaaacattgaaagagaaaacgacatcagtatgaagcaatttagagaaattcaagaaacactccatccaatgggaggattacaagaaagaatatggaatcyacttcaaattttgaatgattttgggacagatgtgttcaagccctccacctatccaccactttcttacacttttgatcatattattataaaaccttaa

SEQ ID NO: 2853 - DNA, 294 bp, Staphylococcus aureus
atgactgaacaagataatgcacatcattctgaacaaataaaaacgaatcttaaatcacgtttaaatcgartkgaaggacaagtgagagcgatkaatcgcatgattgaagaagatgtctattgtgatgatgtccttacgcaaataagagcgacacgttcggcgttaaacagtgttgcgataaagttattagaacaacatatgaaaagttgtattatgaataaagttaatcaaggtgctcaggaagaggcratggaagagttattagtgacttttcaaaaattgattaaagactaa

SEQ ID NO: 2854 - DNA, 756 bp, Staphylococcus aureus
atgtatctcaattttggaggggttatcatggaagcaactatcgcgaagttggataaagttgtaaaaacgtataacaagcatcacgtattaaacgaaattagtatgtcaatcaataaaggtgaactgctagggttaataggtcctagtggttctggtaaaacaacaacaataaagtgtttactaggtatggaaaagatagattctggatctgcagaaattttcgctcataagatgcctaatcgcaaagctttaaatcgattaggctatatggggcaaactgatgcattatacgaaaacttaactgctcatgaaaacctagagttttacggtcgtttgtcaggtctgaaaggaaatatattaaaagataatattgaaaaacatatcgttctagtgaatttagagcaagcgttaaataaaaaagttgcacagttttcaggaggcatgaaacgccgattatctttagcaataacattgttggccgaaccggaattaatcatattagatgaaccaactgtaggcattgaccctaaattgcgccaacaaatatggcaacagttcaagcaaatgaccaaagacggaaagagtgtcgtcatcacaacacatgttatggatgaggcggaacgttgtgataaagttggacttattgtcgacggaagaatatttgctatagatacgccaaccaatttaaaacaaagatttaatgtagatacaattgaagcggtatttattaaagctgaggaggtttgtcaatcatga

SEQ ID NO: 2855 - DNA, 1092 bp, Staphylococcus aureus
ttgtcaatcatgaaaattttagctattgttagacgagtattaaaagaaatgttacgtgataaacgtacactcgcgctaatgtttctagcaccaattttaatattgacgcttatgtattttatttttaacggtgatgaaaacgatttaaaaatcggtatcgatacatctgtttcatcaaatataacaaaacaattgccatcgtccgacataaaaactcaaacgttccattctcatgaaaatatcaaatctaaaatcgagaataatcatcttgatggttatatttaccaagaaaatcaaacattatatgtcatttatacaaatgaagaccctaacaaatctaatatgatcaaacaaatgattggcaaagctatacaacaagataaaataagcagtataaagcatctaattgaaaaagcacctccgaccatgaaagaaccaaacaaacaagatattaagatttcacattcctatttatacggtaattctgatagtacttatttcgataaaatgtttccaatactaatgggcttctttgtatttttatttgtatttctaatatcaggtatagctttattacgtgaacgtacaacaggtacgttagaacgtgtattatcaacttcaattcgtcgaagtgaaatcgttcttggttatctgattggctatggtatattcgcaatcattcaaacattaatcatagtcctattttcaatatatttattgaacattaatttagcaggtagcttatggtatgtaattttgattaatatttgtttagctattacagcattatctatgggaattttcatttcaacgtttgctaattctgagtttcaaatgattcaatttattccactagttgctgtacctcaggtattcttttcaggaatttttccacttgaaaatatgcctgattggctaggaaacattggctatatcttccctctcagatatgctggtgatgctttaaccaatgttatgattaaggggcaaggttggagtaatatatggttcgatttactaattctaatgatctttatcatagtctttattatcttaaatattgttggtttaaaacgatacagacaggtataa

SEQ ID NO: 2856 - DNA, 432 bp, Staphylococcus aureus
atgttcatgggagaatacgatcatcaattagatacaaaaggacgtatgattataccgtccaagtttcgttatgacttaaatgagcgttttattatcacaagaggccttgataaatgtttattcggttacactctagacgaatggcaacagattgaagagaaaatgaaaaccttacctatgacaaaaaaagacgcacgtaagtttatgcgtatgttcttctctggtgctgttgaagtagaacttgataagcaagggcgtattaacatccctcaaaacttgaggaaatacgctaatttaactaaagaatgtacagtaatcggtgtytcaaatcgtattgagatttgggatagagaaacttggaatgatttctatgaagaatctgaagaaagtttcgaagatattgctgaagatttaatagattttgatttttaa

SEQ ID NO: 2857 - DNA, 90 bp, Staphylococcus aureus
atgccacatcatagcactacatcaagtcgcatcgtggtaccagcacatcaaagtaacatggcatcaacgccaaacctgtctataacacca

SEQ ID NO: 2858 - DNA, 936 bp, Staphylococcus aureus
gtgtttcatcatatcagcgttatgttaracgaaaccattgattatttaaatgtaaaagaaaatggtgtgtacattgactgtacgctaggtggagcgggacatgccctttatttactaaatcaattaaatgacgacggaagattaatagcaatcgatcaagaccaaactgcwattgataatgctaaagaggtattaaaggatcatttgcatarggtgacttttgttcatagcaacttccgtgaattaactcaaatattaaaagacttaaacattgaaaaagtagatggaatytattacgacttgggtgtttcaagcccacaactcgacattccagaacgaggattcagttatcaccatgacgcaacattagacatgcgtatggaccaaacacaagaactaacagcatatgaaattgttaacaattggtcatatgaagcgttagtgaagattttttatcgytatggcgaggagaaattttcaaaacagatagctcgaagaatcgaagcacatcgygaacaacaaccaataacaacaacattagaattagttgacattataaaagaaggtattcctgcaaaagcaagaagaaaaggcggacatcctgcaaaacgagtatttcaagcactacgaattgcagtaaacgatgaattgtcagcttttgaagattcaatagaacaagcgattgaattagtgaaagtagayggcaggatttcggtaatcactttccattctttagaagatcgtttatgtaaacaggtgttccaagaatatgaaaaaggtccagaggtaccaagaggattrccagttataccagaagcatatacacctaagttaaagcgtgttaatcgtaaaccgattaccgctacagaagaagatttagatgacaataacagagcacgaagcgcgaaattacgtgtagctgaaatacttaaataa

SEQ ID NO: 2859 - DNA, 873 bp, Staphylococcus aureus
atgaagaaaaaarcgttactaccattatttttaggtattatggtctttttggctggttgtgactattctaaacctgaaaaacgtagtgggtttttctacaatacattcgtagatccaatgaaaaatgtattggattggttgggaaataacttattaaacgacaattatggtttagctattattatycttgtattggtaattcgtattattttattaccattcatgttgtcaaactataaaaatagtcatatgatgcgtcaaaaaatgaaagttgcaaagccagaagttgaraaaattcaagaaaaagtgaarcgtgcgcgtacacaagaagaaaaaatggctgcaaaccaagaattaatgcaagtatataaaaagtatgacatgaacccgattaagagtatgttgggttgtttaccaatgctaatccaattrccaatcatcatgggattatactttgtacttaaagaccaacttgtagatggtttgtttaaatatccacacttcttatggttcgatttaggacgtcctgatatttggattacaattattgccggtgttttatactttatccaagcatatgtatcaagtaaaacgatgccagacgaacaacgkcaaatgggttacatgatgatggtcatttcaccaattatgattatctggatttcattaagctcagcatcagcacttggtttgtactggtcwgtcagygcggcgttccttgtagttcaaacacactttgcgaacatttattatgaaaaagtcgctaaaaaagaagtacarcctttcattgaagcgtatgaaagagagcacaacggcggcagcaataaaaaaggcaaaaacacacaagtwgtgtctaaaaagaaaaagaaataa

SEQ ID NO: 2860 - DNA, 402 bp, Staphylococcus aureus
atggctgtagaaaaagtgtaccaaccatatgacgaacaagtttataatagtataccgaagcaacaaccacaaactaagcccgaaaagaagactgtttcgagaaaagtggttgtacaattaactaaatttgaaaaagttttatacataactttgattactgtaattgctatgttaagtatttatatgctatctttaaaaatggatgcgtatgatacgcgaggaaagattgcagatttagattataaaatagataaacaatcaagtgaaaacagtgctttacaatctgaaatcaaaaagaattcttcttatgaacgcatatacgaaaaggctaagaaacaggggatgagccttgagaacgataatgtaaaggtagtgcgtagtaatggcgaagcaaaaaattaa

SEQ ID NO: 2861 - DNA, 642 bp, Staphylococcus aureus
atgtttaaccaatcgtatctaaatgtgtattttatttgtggracctccgatgttccgagtcatcgaactattcatgaagtattagaagcagcattaaaggcagggattacacttttccaatttcgagaaaagggtgaatcagctttaaaaggaaacgataaacttgtattagctaaagaattacagcatctctgtcatcaatatgatgtgccttttatcgttaatgatgatgtatccttggcaaaagaaattaacgcggatggtatacatgtcggtcaagatgatgcgaaagtcaaagagatagcacaatatttcactgataaaattattggayttagtattagtgatttagatgagtatgcaaaatctgatttaactcatgttgattatataggtgttggaccaatctatcctacgccgtcgaagcatgacgcgcatayaccagtaggtccagaaatgattgcaacrtttaaagaaatgaatccgcaactaccgattgtagcyattggcggtatmaatactartaaygtggcgccgattgtagaagcaggtgccaatggaatttcagtcatttcagccatttctaaaagtgaaaatattgaaaakactgttaatcgattcaaagatttttttaataattag

SEQ ID NO: 2862 - DNA, 2235 bp, Staphylococcus aureus
atggcgaagcaaaaaattaaaattaaaaaaaataaaataggggcagtcctacttgttggtttattcggactgctcttttttatattggttttaagaatttcatatatcatgattactggacattctaatggtcaagatttagtcatgaaggcaaatgaraagtatttagttaagaatgcacaacaaccagaacgaggaaagatatatgatcgtaatggtaaagtgctagcagaagatgtagaaagatataaacttgttgcagtaatagataaaaaggcgagtgccaattctaaaaaacctaggcatgtagttgataaaaaagagactgcaaagaaattatctacagtcattratatgaagccagaggaaattgaaaagagacttagtcaaaagaaagcyttccaaattgaatttggacgcaaaggaacaaatttaacgtatcaggacaaattgaaaatagagaaaatgaatttgcctggtatttctttattgcctgaaacagaacgmttttatccaaatggcaattttgcatcacacttaattggtagagctcagaaaaatccggatactggtgaacttaaaggtgcrcttggagttgaaaagatttttgatagttatttaagtggatctaaaggatcwttgagatatattcatgatatttggggatatatygcaccaaatactaaaaaagagaagcagcctaaacgtggtgatgatgtccatttaacaatcgattcaaatattcaagtatttgttgaagargctttagatggcatggttgaaagataccagccgaaagatttatttgcggttgtcatggatgccaaaactggagaaattttagcatacagtcagcgaccaacatttaatcctgaaactggtaaagaytttggtaaaaagtgggcaaatgayctwtatcaaaacacataygagcctggatcaacatttaaatcatatgggttagcagctgctattcaagaaggtgcttttgatcctgataagaaatataaatctggacatagagatattatgggttcacgtatttcagactggaatagagtcggttggggtgaaatcccaatgtcactcggatttacttattcatctaatacattgatgatgcatttacaagatttagttggtgcagacaaaatgaaatcttggtatgaacgatttggatttggaaaatcaactaaaggtatgtttgatggagaagcacctggtcaaattggatggagtaatgagttrcaacaaaaaacgtcatcatttggtcaatcgacaacwgtaacacctgttcaaatgttacargcgcaatcagcgttctttaatgatggtaatatgttaaaaccatggtttgtgaatagcgttgaaaatcctgttagtaaaagacaattttataaaggkcaaaaacaaatcgcaggcaaaccaataacaaaagatactgctgaaaaagttgaaaagcaattggatttagttgtgaatagtaagaagagtcacgctgcaaactatcgtattgatggttatgaggtcgaaggtaagactggtacagcacaagtcgctgcacctaatggtggtggatacgttaaaggtccaaacccatatttygtaagttttatgggtgacgcrccgaagaaaaatcctaaagttattgtatacgctggtatgagcttggcacaaaaaaatgaccaagaagcttatgaattaggtgttagtaaagcgtttaaaccaataatggaaaatactttgaaatatttaaatgtaggtaaatcaaaagatgacacatctaatgcagagtatagtaaagtgccagatgttgaaggtcaagacaaacaaaaagctattgataatrtgagtgcaaaatcattagaaccagttactatyggttctggcacacaaataaaagcrcaatctataaaagcagggaataaagtcttacctcatagtaaagtactgttattaacagayggagacttaactatgcctgacatgtcaggatggacgaaagaagatgtcattgcttttgaaaacctaacaaatattaaagtraatttaaaaggtagcggttttgtgtcccaccaatcaattagtaagggacaaaaacttactgaaaaagataaaatagacgtagaattttcatcagagaatgtagacagcaattcgacgaataattctgattcaaattcagatgataagaagaaatctgacagtaaaactgacaargataagtcggactaa

SEQ ID NO: 2863 - DNA, 801 bp, Staphylococcus aureus
atgaattatctaaataamatacgtattgaaaacccattaacaatttgttatacaaacgatgtagttaaaaattttacagcgaatggtttattaagtattggtgckagccctgcmatgagtgaagctcccgaagaagctgaagaattttacaaagttgcacaagsgctattaatcaatatcggtactttaacagcmsaaaatgaacaagatattattgcgattgctcaaacggcaaatgaggcaggcttacctattgtatttgaccctgtagctgttggtgcttctacatatcgaaagcaattttgtaaattattattgaaatcagcgaaagtatcagtaattaaaggcaatgcatctgaaatattagcgttgattgatgatacagcaactatgaaaggtacagatagtgatgctaatcttgatgcggttrcaatagcgaaaaaggcttacgcaayatataaaactgcaatagtaatcacaggtaaagaggacgttattgttcaagrtrataaagcmwtcgtattagctaatggatctccattattagcacgagtaactggagctggttgtttattaggaggcrttattgctggatttttatttagagaaacagaaccagacatagaagcgttaattgaagcggtaagcgtatttaatattgctgctgaggtagctgctgaaaatgaaaattgtggtggtcctggtacgttttcaccattgttgcttgatacgttatatcatttaaatgaaacaacctatcaacaacggattcgyattcaagaggtggaawaatatgtttaa

SEQ ID NO: 2864 - DNA, 1428 bp, Staphylococcus aureus
ttgaggatgacatttatgactaaatttcaatataaaaaaattattgatgatattattaataaaattaacaacggtattttatctcctggagataaattgtactcgcaaagaaaattagctaagtactataatgtaaataaatccacagttatacaagctttagatattctaaaaagctatggcatcttagatacaattgaaaaaaaaggtatttatgtatcccagtataaatggaattcttatattaccaataatattcattggcaagattatataggcaacagcttttctaaaaataaccagtattatattcaaaaaattaatgaaatagaatttaatactgatatcgtccgattaggtactggagaactatcaccaaaactaattccaaaccatatatttaaaaaaatattaactaatgatattgaagaatctttacaaactaactatgaagaacctaaaggaaatctaaagttaaggatagaaatagtaaagtatatgaagcgaagaggagttgattgtaatatcaataatatatgtattacatccggtgctgtacaaggtttaaaactaattgcagacggactgttaattccacaatctaaaattataattgaaacaccatcatacattaattccatacgtacttggcataatatcagagcgaaaattattcctttgtccatcaattacatcaaacagaatattaacaatatctttaaattaaatagtgattataggcacagtattttttactgtatacctacgctgcataaccctactcaaaatacttatagtaaagaagagaagcaaaaaattatagatcaatgtcataaagaaggtattccaattgtggaagatagtatatactctgatttatggttcagccctaaccaacaaatttctatgaaagctttaaaaaatagtgataatgttttatatttaggtagtttatctaaaactgtaagtcccggtttacgtattggttggattatagcagatgaaaaagtaattcatcatttagccgatttaaaaatgcaaaatgattatggtgcaagttctatatcacagtatattgccacaacgtggttaagtaattatcatgaagatcatttatataaattaaaaatcgaactaaaattacgaaaatctatttttataaagtcattaaagaaacatctatctaagtttggatattggaatgaaccccaaggctcattttatatctggtttaagctatctgttccagtaaatataaagctcttatttaacgaagcaataaaagaaaatatactaatacacccaggagaaatatatgacattaactctaaaagctatatccgcttttcatactcatatatcgacaaggaagaaattgaccaaagcttaaaaaaattaagtgaaattataaatagaatacgaacttag

SEQ ID NO: 2865 - DNA, 750 bp, Staphylococcus aureus
atgaaaaacaagataattatcctatttctagcaattattataacttttacttacggaaactttgcagaagcttctgtggttataaaagaagctaatattaacaattcgaatagtaaaataaacacaaataaaattaacgagaatatttacagtaaaaataatcgtaattacattgacaataactttaaatctaaagatttaaacattgaaagcagtttagaacacgacctaaatacagataaaattactgtagatgcttcattaaaagataattataataataaacttgataaaacttatgatgttaaatttttaaggattgttaatgaaaatgactttaaggcagaatttaccgaccaagatacgggagaaaaaataatatatgatacgaatgaggttaaagcttcaattgcacctgtagtggctgtattagtaggattcatcgccaaacaaggacttaagaaagctattcaaaaatatggtaagacagttgtaacatcaatgattcgtacaagccctcaagttgccgcgcaggcagctaaaaaattgggttattctgctacaaagcatgtatcccatggcaaaaaagtgttcaagaaaaatagtaaagggcgtcctcaatatatatctgtcgataaagatggacaccgaggaggagcatggaaaggtgcaagcagtattaagaatttaggtagcaagaaaacaagaagtggtacatacgatgctaacctaaaaagaattggagattaa

SEQ ID NO: 2866 - DNA, 989 bp, Staphylococcus aureus
atgatttttgtatatgcgttattagcgctagtgattacatttgttttggtacctgttttaatacctacattaaaaaggatgaaatttggtcaaagtattcgagaagaaggyccacaaagccatatgaagaagactggtacaccaacgatgggtggactaacatttctattaagtattgtgataacgtctttggtggytattatatttgtrgatcaagctaatccaatcatactgttattatttgtgacgattggttttgggttaattggttttatagatgattatattattgttgttaaaaagaataaccmaggtttaacaagtaaacagaagtttttggcgcaaattggtattgcgattatwttctttgttttaagtaatgtrtttcatttggtgaatttttctacgagcatacatattccatttacgaatgtagcaatcccactatcatttgcatatgttattttcattgttttttggcaagtaggtttttctaatgcrgtaaatttaacagatggtttagatggattagcaactggactgtcaattatcggatttacaatgtatgccatcatgagctttgtgttaggagaaacggcrattggtattttctgtatcattatgttgtttgcacttttaggatttttaccatataacattaaccctgctaaagtgtttatgggagatacaggtagcttagctttaggtggtatatttgctacsatttcaatcatgcttaatcaggaattatcattaattwttataggtttagtattcgtaattgaaacmttatctgttatgttacaagtcgctagctttaaattgactggaaagcgtatatttaaaatgagtccgattcatcatcattttgaattgataggwtggagygaatggaaagtasttacagtattttgggctgttggtctgatttcaggtttaatcggtttatggattggagtgcattaagatgcttaattatacagggttag

SEQ ID NO: 2867 - DNA, 831 bp, Staphylococcus aureus
atgattaaacctaaaatagcattaaccattgcaggtactgatccaacaggtggtgccggcgtaatggctgatttaaaatcatttcattcatgtggtgtatatggtatgggcgtcgttacaagtattgttgctcaaaatacattgggcgtacaacatattcataatttaaatcatcaatgggtagatgaacaacttgatagtgtcttcaatgataccttacckcatgctattaaaacggggatgattgctacagcagatactatggaaacgattcgtcattatttaatgcaacatgaatctattccrtatgtaattgatcctgttatgttggcgaaaagcggtgattcattaatggataatracacaaagcaaaacttgcarcatacgttattgccattagctgaygtagtaacaccgaatttaccagaagctgaagaaataacgggactaaccattgatagtgaagaaaaaattatgcaggctggccgcatctttattaatgagattggtagtaaaggtrtcatcattaaaggcggtcattcaaatgatrctgatatagcaaaagattatttatttactaamgaaggtgttcaaacatttgaaaatgaacgatttaaaacaaaacatacgcatggaacagggtgtacattttcagcagttataacggcagaacttgcaaaaggtagacsattatttgaggctgtacacaaggctaaaaagtttatttcaatgagtatacaatatacrcctgaaatcggccgtggtagaggwccagtgaatcattttgcatatttaaagaaagagggattagacgatgaattatctaaataa

SEQ ID NO: 2868 - DNA, 840 bp, Staphylococcus aureus
ttgcagaaagagttaactaaaaattataggtgtcatatgagtcgtaatttaatacatttatccataggggtcgctatatttataatttctttctcgttttatttattaaatcaaccaaataattgggcatggagcagtctaaatatatgtataaatgattcaaagccatccaatgtaaaagttgctattttagatacgggtattaataatacaagaataaacaataattttgttacaaaaagatacaatgctataaacaatcataatcaaataactacagatagtaatcacgccactcaagtagcaagtattatcacatatggagaacataaagaaaagttgattggtatcagtaaatcagtaagtatttatgacgttaaagtattagatgataaccttaaaggcgatatagacaacataataaaaggcataacttggagtatcaaaaatgacgtaaatattattcatatgagttttggctttcagcgttacaataaagaattacatgatgctataaagaacgctaaaaataaaggtattatcttagtagccgcagcagggaataacatggatgattatagtgactatccagcacgttttaacgaagtatattctatcacagcaatagacaaaaacaataagccatttatatatgcacctactaaaaaaatcgattttaaagctcctggcgtagacgtatatacaaaaggatcaaaagatgagttacttactgtaaatggaacatcttttgcagccgcctatttcactgcttatctgacaaataatcttgaattccgaaatgacttaccacatattttaaaagaatatccaataaaataa

SEQ ID NO: 2869 - DNA, 1545 bp, Staphylococcus aureus
atgaaaaawatatataagtcattaactgtctctgcaattgttgcaacggtatcattaagtgctttaccgcaatctttagctataacgcatgaatcgcaacctacaaagcaacagcraacrgtattattcgatcgttctcatggtcaaacagctggtgctgcagattgggttagtgatggtgcattttcagattatgcggattcaatacaaaaacaaggttatgacgttaaagctattgatggtcattcgaacataacagaagcaagtttgaaaagttcyaaaatatttgtaattcctgaggctaayattcctttcaaagaatcagaacaggcagcaattgttaamtatgtgaaacaaggkggmaatgttgtctttatttcagaycattacaatgctgaccgaaatttaaatcgtattgattcatcrgaggcaatgaatggttatcgacgtggagcrtatgaagatatgtcgaaaggtatgaatgcagaagaaaaaagytctactgcaatgcaaggtgtgaaaagttcagattggttatctacaaactttggcgtacgttttcgatataatgcactaggtgatttaaatacgagcaatattgtttcttcaaaagaragtttyggtattactgaaggtgtgaaatctgtmtctatgcatgccggwtcracattagcaattactaatccagagaaagcaaaaggtattgtgtatacaccagaacaattgccagcgaaaagtaaatggtcacatgctgtagatcaaggtatttataatggkggcggtaaagcagaaggyccctatgtagcaatttctaaagttggaaaaggtaaagcagcatttatcggtgattcatcacttgtggaagatagttcgcccaaatatgtragagaagataatggagaaaagaagaaaacatatgatggttttaaagaacaagacaacggtaagctattaaataatataacrgmttggatgtctaaagatartgatgggaaatcacttaaggcgagtrgmctaacattagatacaaagactaagttgcttgattttgaacgaccagagcgttcaactgagcctgaaaaagagccatggtcacaaccgccgagtggttataaatggtatgayccaacaacatttaaagcaggtagttatggcagygaaaaaggcgcrgatcctcagccaaacacaccagatgatcatacrccaccaaatcagamcgwaaaartawcatttgatatcccgcaaaatgtttctgtaaatgagccatttgaartgacaatacatttaaaaggatttgaagcaaatcaaacacttgaaaatcttagagttggtatttacaaagaaggmggacgtcaaatcggacaattttcaagtaaagataacgattataacccrccaggttacagtactttgccaacagttaaagcagatgaaaacggaaatgyyacaattaagrtcaatgcyaaagtactygaaagtatggaaggttcaaagattcgtttaaaactcggtgacaaaaccttgattacaacagacttcaaataa

SEQ ID NO: 2870 - DNA, 894 bp, Staphylococcus aureus
atgaagaaaacaattttactgacgatgacaactcttactttatttagtatgtcgcctaactcggctcaagcatayacgaatgatagcaaaacattagaagaagcaaagaragcacacccaaacgcacagttcaaagtgaataaagacaccggcgcgtatacttatacwtatgacaaaarcaacrcgccaaacaacaatcatcaaaaycagtcacgtacaaacgacaatcatcaacacgcaaatcaacrtgatyttaacaacaatcagtaccattcttcattaagtggtcagtatacgcacattaatgacgcaattgattcacacacaccgcctcaaacgtcaccaagcaatcctttgacaccagcaataccgaatgtygaagacaatgacgatgaattaaataacgctttttcaaaagataacaaagggcttattacaggcatcgatttagacgaattgtatgacgaattacaaatcgccgaatttaatgacaaagcaaagacygctgacggtaaacctttagcwttaggtaacggtaaaatcattgatcagcctcttatcacaagtaagaacaacttatatactgctggacaatgtacatggtatgtctttgataaacgtgccaaagatggacacacgattagtacattttggggagatgctaaaaactgggmaggccaagcttcaagcaatggcttcaaagtagatagacacccaacacgaggatcaattttacaaacagtaaayggtccatttggycatgtagcctacgttgaraaagttaatattgatggaagtattctaatttcagaaatgaactggattggtgaatatatcgtttcatcaagaaccatctctgcttcagaagtttcatcatataattacatccattaa

SEQ ID NO: 2871 - DNA, 1350 bp, Staphylococcus aureus
atgcttaattayacagggttagaaaataaaaatgtattagtygtcggtttggcaaaaagtggttatgaagcagctaaattattaagtaaattaggtgcgaatgtractgtcaatgatggraaagacttatcrcaagatgctcatgcaaaagatttagaatctatgggyatttctgttgtaagtggaagtcatccattaacrttrcttgataawaatccaataattgttaaaaatcctggaataccwtatacagtatctattattgatgaagcagtgaaacgaggtttgaaaattttaacagaagttgagttaagttatctaatctctgaagcaccaatcatagctgtaacrggtacaaatggtaaaacgacagttacttctctaattggagatatgtttaaaaaaagtcgcttaactggaagattatccggcaatattggttatgttgcatctaaagtagcacaagaagtaaagcctacagattatttagttacagagttgtcgtcattccagttacttggaatygaaaagtataaaccacacattgctataattactaacatttattcrgcgcatctagattaccatgaaaatttagaaaactatcaaaatgctaaaaagcaaatatataaaaatcaaacggaagargattatttgatttgtaattatcatcaaagacaagtgatagagtcggaagaattaaaagctaagacattgtatttctcaacwcaacaagaagttgatggtatttatattaaagatggttttatcrtttataaaggtgttcgtattattaacactgaagatytagtattgcctggtgaacataatttagaaaatatattagcagctgtgcttgcttgtattttagctggtgtacctattaaagcaattattgatagtttaactacattttcaggaatagagcatagattgcaatatgttggtactaatagaactaataaatattataatgattccaaagcaacaaacacgctagcaacacagtttgccttaaattcatttaatcaaccaatcatttggttatgtggtggtttggatcgagggaatgaatttgacgaactcattccttatatggaaaatgttcgcgcgatggttgtattcggacarmcgaaagctaagtttgctaaactaggtaatagtcaagggaaatcggtcattgaagcgaacaatgtcgaagacgctgttgataaagtacaagatattatagaaccmaatgatgttgtattattgtcacctgcttgtgcragttgggatcaatatagtacttttgaagagcgtggagagaaatttattgaaagattccgtgcccatttaccatcttattaa

SEQ ID NO: 2872 - DNA, 690 bp, Staphylococcus aureus
atggaattttcacaaaaattgtaccaagctgcaaagccaatcattaatgatatttatgaggatgactttattcaraaratgttatymggmratatasragctgaygcattacgycattayttamaagctgatgcwgcktatttaaaagaatttacaaacttatatgctttgttaattccaaaaatgaatagcatgaatgacgtaaaatttttagtagagcaaatagaatttatggttgaaggtgaagtacttgcgcatgatattttagcgcaaattgttggtgaatcatacgaagaaatcattaaaacaaaagtttggcctccaagtggcgaccattacataaaacatatgtatttccaagcgcatagtcgtgaaaatgctatttatacaattgctgcaatggcaccttgtccatatatttatgcagaattagctaagcgctctcaaagtgatcataagcttaatagagaaaaagatacggcaaaatggtttgatttttatagtactgaaatggatgacataattaacgtatttgagkcawtaatgaataaattagccgaatcaatgtctgacaaggaattggaacaagtaaagcaagtatttttagaaagttgcatacatgagcgtcgatttttcaatatggctatgacactagaacaatgggaatttggaggaaaagtaaatgattaa

SEQ ID NO: 2873 - DNA, 207 bp, Staphylococcus aureus
ttgtctgatttggaggaaggtttacaccgtaaaaggttaatctcctatggtggtttgttaaaagaaatacataaaaaattaaaccttgatgacacagaagaaggcgatttgattcatacagatgatgacgaaaaagccgatgaagatggattttctattattgcaatgtggaattgggaacggaaaaattattttattaaagagtag

SEQ ID NO: 2874 - DNA, 1320 bp, Staphylococcus aureus
atggatgataaaacgaagaacgatcaacaagaatcaaatgaagataaagatgaattagaattatttacgaggaatacatctaagaaaagacggcaaagaaaaagrtcaaaggctacacatttttctaatcaaaataaagatgatacatctcaacaagctgattttgatgaagaaatttacttgataaataaagacttcaaaaaagaasaargcaatgawraaaataatgrttctgcttctagtcrtgcraatrataataatatcgatgattctacagactctaatattgaaaatgaggattatagatataatcaagaaaytgacgaccaaaatgaatcgaatgkaattkcaktcgrcaacgaacaacmtcaatcagctccwaawgaacaaaatrgcgactcgawtgatgaggaaacagtaacgaaaaaagaacgaaaaagtaaagtaacacaattaaarccattaacacttgaagaaaagcggaagktaagacgtaarcgacaaaarcgaatccaatacagtgttattacaatattrgtattgttgattgctgttatattaatttacatgttttcaccacttagtaaaattgcgcatgtaaatataaatggaaataatcacgttagtacttcaaagataaacaaagttttaggtgttaaaaatgattcraggatgtatacgtttagtaaaaaaaatgctattaatgatctcgaagagratccattaatcaaaagtgttgagatacacaagcaattaccaaacacattaaacgtagatatcacagaaaatgaaattattgctttagtgaaatataaaggtaaatatttacctttattagaaaatggtaaattgcttaaaggttcaaatgatgtcaaaattaatgatgcacctgtcatggatggtttcaaaggtacaaaagaagatgatatgattaaggcgttatctgaaatgacacctgaagttagacgatatattgccgaagtgacatacgccccaagtaaaaacaaacaaagcagaattgaattgtttacgacrgatggacttcaagtaatcggtgatatttcgacgatatctaagaaaatgaaatattatccgcagatgtcacaatcattakcaagrgatagttcgggtaaactaaaaacamgaggctatattgatttatcagtcggtgcttcatttatcccataccgtggaaacacgtctastcaatcagaaagcgataaaaatgtgactaaatcatctcaagaggaaaatcaagcaaaagaagaattacaaagcgttttaaacaarattaacaaacaatcaagtaagaataattaa

SEQ ID NO: 2875 - DNA, 129 bp, Staphylococcus aureus
ttgaaaatgttgaaaccgtttgctaagattaatttgcaattgaatactaaggaactactaggggagcctaatgatatggctgagatgaaytgttcagacccttatgacctgatttggttagtaccaacg

SEQ ID NO: 2876 - DNA, 99 bp, Staphylococcus aureus
gtgcttacttttaaaactactgatttattgataaatattgaacaatttttgggaagaataaagcgtcctcttgtgaaattagagaacgctttattactt

SEQ ID NO: 2877 - DNA, 1413 bp, Staphylococcus aureus
atggaagaacattactacgtaagtattgatattggatcatcaagcgtaaaaacaatagtaggcgagaaatttcacaatggtataaatgtgataggtacaggacaaacctacacgagcggtataaaaaatggtttaattgatgattttgatattgcgcgacaagcaatcaaagacacaattaaaaaggcatcaatcgcttcgggtgttgatattaaagaagttttcctgaaattacctatcattggaacggaagtttatgatgaatcaaatgaaatcgacttttatgaggatacagaaatcaacggttcacatatcgaaaaagtattagaaggtattagagaaaaaaatgatgtgcaagaaacagaagtaattaatgtrttcccrattcgttttatagtcgataaagaaaatgaggtttcagaccctaaagaattaattgccagacattcattaaaggttgaagcaggcgtaattgctattcaaaaatcgattttaattaatatgattaaatgcgtwgaagcatgtggtgttgatgtattagatgtttaytctgatgcrtataactatggttcaatcctaacagctactgaaaaagagttaggtgcatgtgtcattgatattggtgaagacgttacgcaagttgctttttatgaacgcggtgaattagtagatgctgattctatcgaaatggcagggcgtgatattacagacgatattgcacaaggattaaacacttcttatgaaactgctgaaaaagttaaacaccaatayggtcatgcattctatgattctgcttcagatcaagatatcttcactgttgaacaggttgatagtgatgaaacagtacagtatactcaaaaagatttgagtgactttattgaagcgcgtgtagaagaaatattcttcgaagtatttgatgttttacaagatttaggattaacaaaagtaaatggtgggtttattgtaactggtggatckgcaaasttacttggcgtaaaagaattattatcagatatggtaagtgaaaaagttagaattcacacgccatcacaaatgggaattagaaaacctgaattttcttcagcaatttctacaatttctagtagtatcgcttttgatgagttattagattatgttacaattaattatcatgatartgaagaaactgaagaagatgttattgatgtgaaagacaaagataacgaatctaaattaggcggatttgattggtttaaacgtaaaacaaacaaaaaagatactcatgaaaatgaagtagagtcawcagatgaagaaatttatcaatcagaagataatcatcaggaacataaacagaatcatgaacatgttcaagacaaagataaagataaagaagaaagtaaattcaaaaaactaatgaaatctctatttgaatga

SEQ ID NO: 2878 - DNA, 696 bp, Staphylococcus aureus
atgaagaaaacattactcgcatcatcattagcagtaggtttaggaatcgtagcaggaaatgcaggtcacgaagcccawgcaagtgaagcggacttaaataaagcatctttagcgcaaatggcgcaatcaaatgatcaaacattaaatcaaaaaccaattgaagctggsgcttataattatacatttgactatgaagggtttacttatcactttgaatcagatggtacacactttgcttggaattaccatgcaacaggtrctaatggagcaracatgagtgcacaagcacctrcaactaataatgttgmaccatcagctgwtcaakctaatcaagtacaatcacaagaagttgaagcaccacaaaatgctcaaactcaacaaccacaagcatcaacatcaaacaattcacaagttactgcaacaccaactgaatcaaaakcatcagaaggttcatcagtaaatgtgaatgmtcatctaaaacaaattgctcaacgtgaatcaggtggcaatattcatgctgtaaatccaacatcaggtgcagctggtaagtatcaattcttacaatcaacttgggattcagtagcacctgctaaatataaaggtgtatcaccagcaaatgctcctgaaagtgttcaagatgccgcagcagtaaaaytatataacactggtggcgctggacattgggttactgcataa

SEQ ID NO: 2879 - DNA, 90 bp, Staphylococcus aureus
atgaataactggatcaaagtggcacaaatatctgttacgattattagccaagcgattatcattatgaaagaaattcaagacgaggtaaaa

SEQ ID NO: 2880 - DNA, 291 bp, Staphylococcus aureus
atgagaaaaattatgcgaatcttattatgcacatcaatcataataagcggttgctctttcatatcaaagaaccaaacaaaagatattccaaagacggttagcgtcaaaaattatgatggtaaatatattggtgaacataaaaaaagaaatgaagtatttctgaaaaaacataaaggtgaagcgataaaaaaatataaagactatgtgaaagatacatttggttatgattgtaaaattaatttagttgaggcctatactaataaatctggatttagcgaaaaagtaaggtag

SEQ ID NO: 2881 - DNA, 600 bp, Staphylococcus aureus
ctgatatttgttgagtctggaaatggcatagctatcacaacatttacacctggtcatataaatgaaacatcagcggcagttgcagccatgatgtataagcgttatgaacctgaaattgaacaagctcgattaaaattcaaatcagaagttgagaaaaacggttattatgccatgaatgaaaaacttcaaaagaaacaagaattcaatggtgttactaaacaatttttgaatttcaacacagacagtatcgatgatttggataagttcaaaaaagaattcaaacctgttatgcacttaaaaggagatgcattaaatcaacaattacaatctttgattaataaatatcctcaaatacaaaaaaatatgaagtccgagtttattgcctattacgataaaggtgagaacagagagactgttgctaactatgtttggaacctacaaaaatctataaatgacgttatgcaatcatatcctagcacaaaatttgtacagttttataaagatgatgtttccccgtcaatggtagatggaaatggccgtttaaaatcggatactaatgtaatttccatcgagggaggaaagtataatgagaacaaataa

SEQ ID NO: 2882 - DNA, 111 bp, Staphylococcus aureus
ctgaataatcgacgtattgaagatagaacaaataacggagtgaaaaacatggatgaacttatcgagatattagccgatttggtaattgaagaaatcaatcaaaygaatgac

SEQ ID NO: 2883 - DNA, 1195 bp, Staphylococcus aureus
atgttagaatttgaacaaggatttaatcatttagcgactttaaaggtcattggtgtaggtggtggcggtaacaacgccgtaaaccgaatgattgaccayggaatgaataatgttgaatttatcgctatcaacacagacggtcaagctttaaacttatctaaagctgaatctaaaatccaaatcggtgaaaaattaacacgwggtttaggagcaggagctaaycctgaaatcggtaaaaaagctgcagaggaatctcgtgaacaaattgaagatgcaatccaaggtgcagacatggtatttgttacttctggtatgggtggcggaactggtactggwgcagcwccagtcgttgctaaaattgcaaaagaaatgggcgcattaactgttggtgttgtaactcgtccatttagttttgaaggacgtaaacgtcaaactcaagctgctgctggagtagaagctatgaaagctgcagtagatacattaatcgttataccaaatgaccgtttattagatatcgttgacaaatctacgccaatgatggaagcatttaaagaagctgayaacgtgttacgccaaggtgtacaaggtatctcagacttaatcgctgtttctggtgaagtaaacttagactttgcagacgttaagacaattatgtctaaccaaggttctgcattaatgggtattggtgtttcttctggtgaaaatagagcggtagaagctgctaaaaaagcaatctcttctccattacttgaaacatctatcgttggtgcacaaggtgtgcttatgaatattactggtggcgagtcattgtcattatttgaagcacaagaggctgctgatattgtccaagatgctgcagatgaagacgttaatatgattttcggtacagttattaatcctgaattacaagatgagattgttgtaacagttattgcaactggttttgatgacaaaccaacatcacatggtcgtaaatctggtagcactggattcggaacaagcgtaaatacttctagcaatgcaacttctaaagatgaatcattcacttcaaattcatcaaatgcacaagcaactgatagtgtaagtgaaagaacrcatacaactaaagaagatgatattccwagcttcattagaaatagagaagaaagacgttcaagaagaacaagacgttaatcggttaatatatatacacaaa

SEQ ID NO: 2884 - DNA, 396 bp, Staphylococcus aureus
atgctaaataaaatcgtaattgtcgrgagactgacgaaagacgcacaaatatttgaaaaggaggatagaaaaattgcaacgttttgtgttgcaacgcaccgaaattataaagatgaaaatggagaaatcgtctgtgattacttattctgtaaagcatttggcaagttagcttctaatatagaaaratayactaatcaaggtacattggttggtataactggtcaaatgagatcaagaaagtatgataaagacggacaaacacactttgtcactgaattatatgttgaaacaataaaatttatgtcccctaaatcccaaaataatgaaattctctcagatagtattttagatattgactctcaaaatatagataatcatgacttattagaaatttaa

SEQ ID NO: 2885 - DNA, 441 bp, Staphylococcus aureus
atggaaacaatttttgattataaccaaattaaacaaattatacctcacagacagccatttttattaattgataaagtwgttgaatatgaagaaggtcaacgttgygtggctattaaacaagtatcaggaaacgaaccattctttcaagggcattttcctgagtatgcggtaatgccaggcgtattaatwactgaagcgttagctcaaacaggtgcggtagctattttaaatagtgaagaaaataaaggtaaaatcgctttatttgctggtattgataaatgtcgttttaaacgtcaagtagtacctggtgatactttaacgttggaagtagaaatcactaaaattaaaggaccaatmggtaaaggtaatgctaaagctactgtcgatggtcaacttgcttgtagttgtgaacttacatttgcaattcaagatgtaaaataa

SEQ ID NO: 2886 - DNA, 666 bp, Staphylococcus aureus
atggcgagatatattgatgatygcccatataatattactcaacatcaattgcaattagctgaagaaattgcgtttgatagaaaaaattgggtgtttcccatycaaacacatgaaaataaagtcgcttgtattacmaaggatgatataggcacaaatatagacactttaactgatgcgcttcatggtattgatgcgatgtacacatatgatagtaatgtcttattaacgatgtgttatgcagactgtgtaccagtatatttttatagtacaaaacatcattttattgcattggcscatgcaggktggcgtggtacctatactgaaattgtaaaagaagtgctaaaacatgtgaactttgatttgaaagacttacatgtcgttattggaccatctacatcatcaagttatgaaattaatgatgatattaaaaataaatttgaaacattgccaattgatagtgccaactatattgaaactagaggacgagatcgtcatggtattgatttgaaaaaagccaatgctgmattattaawtwattatggtgttcctaaagaaaatatttatacgacagcgtatgctacatctgaacatttagarttatttttctcttatcgattagaaaaaggtcaaacaggacgcatgttagcattcattggtcaacagtaa

SEQ ID NO: 2887 - DNA, 675 bp, Staphylococcus aureus
ttgcgtgtgaaagataatttacaacaaatctcaacacaaattaatgacaaaagtgaaaaaaataatttttcaacaaaaccaaacgtgattgcagttacaaaatatgttacaatagagcgagctaaagaagcgtatgaggctggaataagacattttggtgagaatagattggaaggctttttwcaaaagaaagaagcattaccatcagatgcggtgatycattttataggatcattacaatctcgaaaagttaaggrcgttataaacgacgtagattatttccatgctttagatcgattgagcttagccaaagaaattaacaaacgtgcagaacataaaattaaatgtttcttgcaagtgaacgtttcgggagaagcttctaarcatggtattgctttagaagatgttgatcagtttatagatgatcttaaaaaatatgacaaaatcgaaattgtaggtttaatgacgatggcaccattgacagatgatgaagcatatattagatcgttatttaaacagttacgtttgaaaaaagaagaaatacaacgactcaatttagaatatgcgccttgtgatgaattatcaatgggaatgagtaatgactatcttattgcagttgaagaaggtgcracgtttgttagaattgggactaaacttgtaggagaagaggagtga

SEQ ID NO: 2888 - DNA, 1266 bp, Staphylococcus aureus
atggataaaatagtaatcaaaggtggaaataaattaacgggtgaagttaaagtagaaggtgctaaaaatgcagtattaccwatattracagcatctttattagcttctgataaaccgagyaaattagttaatgttccagctttaagtgatgtagaaacaataaataatgtattaacaacyttaaatgctgacgttacatacaaaaaggacgaaaatgctgttgtcgttgatgcaacaaagactctaaatgaagaggcaccatatgaatatgttagtaaaatgcgtgcaagtattttagttatgggacctcttttagcaagactaggacatgctattgttgcattgcctggkggttgtgcaattggaagtasaccgattgagcaacacattaaaggttttgaagctttaggcgcagaaattcatcttgaaaatggtaatatttatgctaatgctaaagatggattaaaaggtacatcaattcatttagattttccaagtgtaggagcaacacaaaatattattatggcagcatcattagctaagggtaagactttaattgaaaatgcagctaaagaacctgaaattgtygatttagcaaactacattaatgaaatgggyggtagaattactggtgctggtacagacacaattacaatcaatggtgtagaatcattacatggtgtagaacatgctatcattccagatagaattgaagcaggcacattactratcgctggtgcyatwackcgtggygatatttttgtacgtggtgcaatcaaagaacatatggckagtttagtstataaaytagaagaaatgggcgttgaattggamtatcaagaagatggtattcgtgtacgtgctgaaggrgawttacarcctgtwgacatcaaaacwytaccrcatcctggwttyccracygatatgcartcacaaatgatggcattrttattaacrgcaaayggwcataaagtmgtaacygaaacwgtwtttgaaaaycgttttatgcatgtygcagagttcaaacgtatgaatgctaatatcaatgtagaaggtcgtagtgctaaacttgaaggtaaaagtcaattgcaaggtgcacaagttaaagcgactgatttaagagcagcagcmgccttaattttagctggattagttgctgatggtaaaacaagcgttactgaattaacgcacctagatagaggctatgttgacttacacggtaaattgaagcaattaggtgcagacattgaacgtattaacgattaa

SEQ ID NO: 2889 - DNA, 564 bp, Staphylococcus aureus
gtgagccacttggctttaaaagatttatttagtggattttttgtaatagatgatgaagaggaagtagaagtacctgacaaacaacaacaggtmaatgaagcgccagcaaaagagcagtcacaacaaacaacaaaacaaaacgcaatcaaatcagtccctcaaaaatctgcatcaagatatacaacaacgtcagaagaaaggaataaccgtatgtctaattattcaaaaaataattcacgtaatgttgtaactatgaacaatgctacaccaaacaatgcatcacaagaaagttcaaaaatgtgtttattcgaaccacgtgttttttcagatacacaagatattgctgatgagcttaaaaaccgccgtgcgacacttgtcaatttacaacgtattgataaagtatcagcgaaaagaattattgattttttaagcggtactgtttatgcaatcggtggagatatccaacgtgtaggtactgatattttcttatgtacgcctgataatgtggaagtagctggaagcattacagaccatattgaaaatrtggaacattcattcgactaa

SEQ ID NO: 2890 - DNA, 234 bp, Staphylococcus aureus
atggattatatcggacaatatgcagttatccatttagtgttacatgttgtatgtatttgtattgcctattgggctttacaatcaattagattagatcaattttttaaaaaaggataygccactcaattacaagtgtgtatgatatttgttgctattttattaggcactgcagtaagcaattttattgtagatttgttacaatactcgacgcaggtaaaatatttaataaaataa

SEQ ID NO: 2891 - DNA, 291 bp, Staphylococcus aureus
atggatataaatgtgctagctacaatwtttaaattyatcctttttgttgttgaaatttattatttcggcatgattatatatttctttacatcttgggtaccaagtattagagaaactaaggtaggttattttttagcgaaaatatatgaacctttcttacaaccatttagaaaagtaattccacctattggaattatcgacatatcatcaatcgctgcaattatcgttttagtattattccaaaaagggttactccaaatctttaattggattttaattcaattacaataa

SEQ ID NO: 2892 - DNA, 405 bp, Staphylococcus aureus
atgaatacattaaacctagatattgtcactcctaatggttctgtttacaatcgtgataatgttgaactcgttgttatgcaaacaacagctggtgagataggtgtcatgagtggacatattccaactgtagctgctttaaaaacaggctttgtaaaagtgaaatttcacgatggaactgaatatattgctgtaagcgatggctttgttgaagttagaaaagataaagtttcaatcattgttcagactgcagaaactgcaagagaaattgatgttgaaagagctaaattagcyaaagcaagagcagagtctcacttggaaaatgatgacgacaatactgatattcatagagccgaaagagctttagagagagcaaataaccgtttgcgtgtggctgaattaaaatag

SEQ ID NO: 2893 - DNA, 117 bp, Staphylococcus aureus
ttgacaaacaaaaattatgtgctatcacaacatttgcaacgtcttaacaagtcatctwtaaacatttctaaatatttaacattacttatgcgtcatttattgctaaaattattgtat

SEQ ID NO: 2894 - DNA, 99 bp, Staphylococcus aureus
gtggcattccaatttctaaagagagtttcattacctttggtagggttaccagcgactgatacagctaaagaagctgcagttgacttaccggttgaggat

SEQ ID NO: 2895 - DNA, 132 bp, Staphylococcus aureus
gtggataaagatattagaaaaacgagaagcaggacagttattaaatcggtagatattaatcataagtatttaactgaatttttaccttttgtcgaatatataactaaagttgaaggtagtaaaatatttatc

SEQ ID NO: 2896 - DNA, 807 bp, Staphylococcus aureus
atggtattttataatttttttaaggtagtgattaacatagatatttatcaacactttagacaggaagaatacgaattaattgatcagctaacggataaatgtgatcaagcggaacarcattatgcaccagtattaacgcattttttagatccaagagggcaatatatattggaagtgatttgtggcagttatgaagatttaaacgtmtctttttatggyggrcctaatgctgaaagaaaaagagcaatcatttcgccgaactattaygaacctaaagaaagygactttgawttaactttaatggaaatagaktatcctgaaaaattcgtcactttaaaacatcaacatattttagggacattaatgtctttaggtatcgaacgcgaacaagttggagatataattgtgaatgaacgaattcaatttgttttgacaagtagattggaatcatttattatgttagaattacaacgtattaaaggcgcatcagttaaactttatactattccagtaacagatatgatacaatctaatgagaattggaaaawtgaaagtgcaacagttagttctttaaggttagatgttgttattaaagaaatgatacgtaaatcacgtacgattgcgaaacaactaatygaaaaaaaacgtgttaaagtgaatcacactattgttgattcagcagattttcaattacaagcaaatgatttaatatccatccaaggttttggtagagcacacattactgacttaggtggtaaaactaaaaaagataaaacgcacattacctatagaacattattcaaatag

SEQ ID NO: 2897 - DNA, 1413 bp, Staphylococcus aureus
atgggaattggccgtgtaactcaagttatgggtcctgtaattgatgttcgatttgaacataacgaagttcctaaaattaataacgccttggttattgatgtgcctaaagaagaaggtacaatacaactaacattagaagttgcgctgcaattaggtgacgacgttgttcgtacaattgcgatggattcaactgatggtgtccaaagaggcatggatgtaaaagatacaggcaaagaaattagtgtacctgttggtgaygaaacattaggtcgtgtatttaatgtactaggtgaaacaattgaccttaaagaagaaattagtgattctgttcgccgcgatcctatccatcgtcaagcaccagcattcgatgaactttcaacagaagttcaaattttagaaacaggtattaaagtagtagatttactagcaccttatattaaaggtggtaaaatcggattgttcggtggtgccggtgtaggtaaaacagtattaatccaagaattaattaacaacatcgctcaagagcacggtggtatttctgtattcgccggtgtaggtgaacgtactcgtgaaggtaacgatttatacttcgaaatgagtgayagtggtgtaattaagaaaacagccatggtattcgggcaaatgaatgagccacctggtgcacgtatgcgtgttgcattatctggtttaacaatggctgaatatttccgtgacgaacaaggtcaagacgtattattattcatcgataacattttcagatttacacaagctggttctgaggtatctgcattattaggtcgtatgccttctgcagtaggttaccaaccaacacttgctactgaaatgggacaattacaagaacgtattacgtctacaacaaaaggatcagtwacttctattcaagcggtattcgtacctgccgatgactatactgacccagcgccwgcgacagcgtttgcccatttagatgcaactacwaacttagaacgtaaattaactgaaatgggtatttatccagccgtggatccattagcgtctacatcaagagcattggaaccatcaattgtaggtcaagaacattatgaagtagctcgtgatgtacaatcaacacttcaaaaataccgtgaattrcaagatatcattgctatcttaggtatggacgaattatctgatgaagataaacaaacagttgaacgcgcacgtagaattcaattcttcttatctcaaaacttccacgtagcggaacaatttactggtcaaaaaggttcttatgtacctgttaagacaacagttgcaaactttaaagatatcttagatggtaaatatgaccatattccagaagatgcwttccgtttagttggtagcatggatgatgttattgcaaaagctaaagatatgggtgttgaagtataa

SEQ ID NO: 2898 - DNA, 618 bp, Staphylococcus aureus
atgccttttacaccaaatgaaattaagaataaagagttttcacgtgtaaagaatggtttagaacctactgaagttgctaattttttggagcaactaagcactgaaattgaacgtcttaaagaagataaaaaacaacttgaaaaagtaatcgaagagagagatactaatattaagtcttatcaagacgtgcatcaatctgtaagtgatgctttgatacaagctcaaaaagctggtgaagaaactaagcaagctgcagaraaacaagctgaagcgattatagctaaggcagaagcrcaagctaatcaaatggttggtgacgcggtagaaaaagcacgccgtttagcattccagactgaagatatgaaacgtcaatcaaaagtatttagatcgcgtttccgtatgttagttgaagcgcaattagacttattaaaaaacgaagattgggattacttgttgaattatgatttagacgctgaacaagtgacgcttgaaaatattcatcatttgcatgaaaatgatttaaagccagatgaagttgcagcaaatgcacaaaataatgcatcaaatacaycagacaataatcaacaatccaatgattcagaaacaactaagaagtaa

SEQ ID NO: 2899 - DNA, 867 bp, Staphylococcus aureus
gtggcttctcttaaagaaatagatactcgaataaaatcaaccaaaaaaatgaagcagattacgaaagcgatgaacatggtatcaagttcaaaacttcgtagagctgaaaaaaatacaaaacaattcacaccatatatggataaaatgcaagatgcaattactgcagttgcaggggcaagtagcaatacaaaccatccaatgctaagacctcgtaaaattactagaagtggatatttagttatcacgagtgataaaggtttagcaggtgcatatagtgcaaacgtgcttaaaaaattgattactgatattgaagcgaaacatcaagatagtagcgaatacagtattgtagttttagggcaacaaggtgttgatttcctaaaaaatagaggttatgacattgagtattctcaagtagacgtacctgatcaaccttctttcaaatctgttcaagcactagctaaccatgctatagacttatacagtgaagaagaaattgatgaattaaatatatactatagtcattatgtcagcgttcttgaaaacaagcctacatctagacaagtattaccattatctcaagaggattctagtaagggrcatggtcatttgtcttcttatgaatttgagccagataaagaatctatcttaagtgtaatcttgcctcaatatgttgagagtttgatttacggaacaatattagacgcaaaagcaagtgagcatgcaacacgtatgactgcgatgaaaaatgccactgataatgcaactgaacttattgatgacttatcattagaatataacagagcgagacaagcagaaattacgcaacaaattactgaaattgttggtggttccgcagcgcttgaataa

SEQ ID NO: 2900 - DNA, 597 bp, Staphylococcus aureus
atgccttttacaccaaatgaaattaagaataaagagttttcacgtgtaaagaatggtttagaacctactgaagttgctaattttttggagcaactaagcactgaaattgaacgtcttaaagaagataaaaaacaacttgaaaaagtaatcgaagagagagatactaatattaagtcttatcaagacgtgcatcaatctgtaagtgatgctttgatacaagctcaaaaagctggtgaagaaactaagcaagctgcagagaaacaagctgaagcgattatagctaaggcagaagcacaagctaatcaaatggttggtgacgcggtagaaaaagcacgccgtttagcattccagactgaagatatgaaacgtcaatcaaaagtatttagatcgcgtttccgtatgttagttgaagcgcaattagacttattaaaaaacgaagattgggattacttgttgaattatgatttagacgctgaacaagtgacgcttgaaaatattcatcatttgcatgaaaatgatttaaagccagatgaagttgcatcaaatacatcagacaataatcaacaatccaatgattcagaaacaactaagaagtaa

SEQ ID NO: 2901 - DNA, 1536 bp, Staphylococcus aureus
atgtcaaacatagcattttatgtcgtgagygacgtacatggttatattttccyaacagattttacgagtagaaatcaatatcarcctatgggattgttactagcgaatcatgttatagaacaagacagaaggcagtatgaccaaagttttaaaatagataatggtgattttttgcaagggtcaccattttgtaattacttaatcgcgcatagcggcagtagccagcctttagttgatttttataatcraatggcattcgactttggtacgcttggtaatcatgaatttaattatggattrccatacttaaaagacactttacgcagactcaattatccagttttgtgcgctaatatwtatgaaaatgatagtacattgactgataacggtgtgmagtattttcaggttggagatcaaackgttggtgtgataggtttaacgacacaatttattccccattgggaacaaccagagcatattcagtcacttacgtttcatagtgcttttgmaayacttcaacaayacttacctgaaatgaagcgayatgcagatatcattgtggtttgttaccatggtggatttgaaaaggatwtagaaartggtacgccgaccgaagtrttaacgggtgaaaatgarggatatgscatgttagaagcgttttctaaagatatagatatctttattacgggtcaccaacatcgacaaattgctgaaagrtttaagcaaacggctgtgattcaacctggtacgagaggtacaactgtaggcaragtwgtcttgagtactgatgaatatgaaaatstatccgttgaatcatgtgaattacttcctgttatagatgatyccacatttactattgatgaagatgaccamcatwtacgaaagcagytagaggactggttagattacgaaattacwacattgccatatgatatgaygattaatcatgcatttgaggcacgtgtrgcwccgcatccttttacwaattttatgaattacgctttattagaaaaaagtgrmgcagatgttgcctgtacagctttgtttgattctgctagtggtttcaagcaagtcgtgacgatgcgagatgttattaacaattacccatttccaaatacatttaaagttttagctgtaagtggtkycaaacttaaasaagccattgaacgatcagcagaatattttgacgtgmaaaatgatgaagtwagtgtgagcgcagacttccttgracccaaaccmcaacactttaattatgatatatatggtggcgtaagttataccattcatgttggaagaccaaagggacaacgtgtgagcaatatgatgattcaaggtcacgcagttgatttaaagcagacatatacaatttgtgtaaataattatcgtgcagtwggcggtggtcagtatgatatgtwtatcgacgcgccagttgtraaagatattcaagttgaaggcgcacaattacttattgattttttatcaaataataawttgatgcgyatcccgcaagttgttgattttaaagttgaaaagtga

SEQ ID NO: 2902 - DNA, 846 bp, Staphylococcus aureus
atgaaaagygaggatgtcattgtgaaggagaaacatattaaatgggataaratwttttatggggaygactgggtaaataacgtagtcgaaacrataagaacraaagatatattacaaagcgtttatttaaaacgttatytattacgcgcgatgatggcaggatttattatcggkattattacggtcttcgtrytatcagttaaagcaacacacgaaccagatttaccrccaggyatwgtgaatatggcyagygccattacattcagytttgcgttagtactcattttatttacaaactccgaactactaaccagtaacttcatgtactttactgtaggcctgtattataaagtaattaaaccractagagtattgaaaatatttttattrtgctttgcaggaaatattttaggtgctgcyattttatttagtttcatgcgtttttcaaatgtaatgacgccagatatgttaaatcarttatcagcagttatwgarcayaaaacgttgtctactggktttgtaagtatattaatgaaagcgatmttcgccaayttytttatyaatatttcattagttatygccatgcaaattgacgatgtactygcaaaaatgtttgtcatgatgttcggtgttaccatattcgcctttatgggttatgaacaygtcgtttacaacagttgcttrtttatgggwggyttaatttatcaagttgatacattgcacttcatwccwgctatttcraatatygctgcsgcttttatcggtaactatatyggaggmggwctcattataggtttattctatgcttacttgaatgatcatcatcaattttataaaaataattaa

SEQ ID NO: 2903 - DNA, 2754 bp, Staphylococcus aureus
atggattacaaagaaacgttattaatgcctaaaacagatttcccaatgcgaggtggtttaccaaacaaggaaccgcaaattcaagaaaaatgggatgcagaagatcaataccataaagcgttagaaaaaaataaaggtaacgaaacattcattttacatgatggcccaccatacgcgaatggtaacttacatatgggacatgccttgaacaaaattttaaaagactttattgtacgttataaaactatgcaagggttctatgcaccatacgtaccaggttgggatacacatggtttrccaattgaacaagcattaacgaaaaaaggtgttgaccgwaagaaaatgtcaacagctgaattccgtgagaaatgtaaagaatttgctttagaacaaattgaattacagaaaaaagattttagacgtttaggtgttcgtggtgactttaatgatccatatattacattaaaacctgaatacgaagctgcacaaattcgtatttttggagaaatggcagataaaggtttaatttataaaggtaaaaagccagtttattggtctccttcaagtgagtcttcattagcagaagcagaaattgaatatcacgataaacgttcagcatcaatttacgttgcatttracgttaaagatgacaaaggtgtcgtwgatgcagatgctaaatttattatctggacaacaacgccatggacaattccatcaaatgttgcgattaccgttcatccwgaattaaaatayggtcaatacaatgtaratggcgaaaaatatattattgcagaagccttrtctgacgcygtagcagaagcactggattgggataaagcatcaatcaaattagaaaaagaatacacaggtaargaattrgagtatgttgtagcacaacatccattcttagayagagaatcgttagtgattaatggtgatcatgttactacagatgctggtacaggttgtgtacatacagcaccaggtcacggggaagatgactatattgttggtcaaaaatatgaattgccagtaattagtccaatcgatgataaaggtgtatttactgaagaaggcggccaatttgaaggratgttctatgataaagctaataaagccgttactgatttattaacagaaaaaggtgcactattaaaattagactttattacacatagctatccacacgactggagaacaaaaaaacctgtaatyttccgtgctacaccacaatggtttgcytcaatcagtaaagtaagacaagatattttagatgcaatcgaaaatacaaacttcaaagtaaattggggtaaaacacgtatttacaatatggttcgtgaccgtggcgaatgggttatttctcgtcaacgtgtktggggtgtaccgttaccagtattttatgctgaaaatggcgaaattatcatgacgaaagaaacagtgaatcatgttgctgatttatttgcagaacacggttcaaatatttggtttgaaagagaagcgaaagacttactaccagaaggatttacacatccaggcagccctaacggtacatttactaaagaaacagacattatggacgtttggtttgattctggttcatcacaccgtggcgtgttggaaacaagaccggaattaagtttcccagcrgatatgtatttagaaggtagtgaccaatatcgtggttggttcaactcttctatyacaacttcagttgctacaagaggagtatcaccttataaattcttactttctcatggttttgttatggacggtgaaggtaagaaaatgagtaaatctttaggtaatgtgattgtacctgaccaagtggttaaacaaaaaggtgctgatattgcgagactttgggtaagtagtacggactatttagctgatgttagaatttctgatgaaattttaaaacaaacatctgatgtttatcgtaaaatcagaaatacattaagatttatgttaggtaayattaaygatttcaatcctgayacagatagcattmctgaatcagagttattagaagtkgatcgttacttgctaaatcgtttacgtgaatttactgcaagtacgattaacaactatgaaaactttgactacttaaatatttatcaagaagttcaaaactttatcaatgttgagttaagtaatttctatttggattacggtaaagatattttatatattgaacaacgwgattctcatatccgtcgtagtatgcaaacagtgttatatcaaattttagttgatatgacgaagttgttagcaccaatcttagtgcatacagctgaagaagtttggtctcatacaccacatgttaaagaagaaagtgttcacttagcagacatgcctaaagttgtagaagtagatcaagctttattggataaatggcgtacatttatgaatttacgtgatgatgtgaaccgtgcattagaaactgctcgtaatgaaaaagttattggtaaatcattagaagctaaagttacgattgctagtaacgataaatttaatgcatctgaattcttaacttcatttgatgcattacatcaattatttatcgtgtcacaagttaaagttgtagataagttagaygatcaggcaacagcttatgaacatggtgatattgtcatcgaacatgcagatggtgaaaaatgtgaaagatgttggaactattcagaggatcttggtgctgttgatgaattgacgcatytatgyccacgatgccaacaagttgtaaaatcactkgtataa

SEQ ID NO: 2904 - DNA, 1509 bp, Staphylococcus aureus
atggccataaaagctgaagaaatcagtgcattacttcgctcacaaattgaaaattatgagtcagaaatgtccgtaactgatgtaggtactgtattacaaattggtgatggtattgcattaattcacggattaaatgacgttatggctggtgagctagtagaattccataacggcgtacttggtttagcccaaaaccttgaagagtcaaacgtgggtgtggttattttaggaccatayacaggtattactgaaggtgacgaagttaaacgtactggtcgtatcatggaagtaccagtaggtgaagaactaatcggaagagttgttaatccattaggacaacctattgatggacaaggaccgattaacacaactaaaacacgtccagtagagaaaaaagctactggtgtaatggatcgtaaatcagtagatgagccattacaaacaggtatcaaagcaattgatgctttagtaccaattggtagaggtcaacgtgagttaatcatyggtgaccgtcaaacaggtaaaacaacaattgcaattgacacaattttgaaccaaaaagatcaaggtacgatttgtatctatgttgctattggtcaaaaagattcaacagtaagagcaaatgttgaaaagttaagacaagcaggcgctttagactacactattgttgtagcagcatcagcttctgaaccttctccattattatatattgcaccatattcaggtgtaacaatgggtgaagaattcatgtttaacggtaaacatgttttaatcgtwtatgatgatttaactaaacaagcagcagcttatcgtgagttatcattattattacgtagacctccaggtcgtgaagcatacccaggtgacgtattctacttacatagtagattattagaaagagcagcaaaattaaacgatgacttaggtggcggttcaattactgcattaccaattatcgaaacacaagctggtgatatttcagcttatgtaccaacaaacgttatttcaattacagatggacaaatcttcttacaatctgatttattcttctcaggtgtaagaccagcgattaatgcyggacaatctgtatctcgtgttggtggatctgcacaaattaawgcaatgaagaaagttgctggtacgttacgtcttgacttagcgtcatayagagaacttgaatcatttgcacaattcggttcagaccttgatgaatttactgcaagtaaattagaacgtggtaaacgtacygttgaagtcttaaaacaagatcaaaacaaaccattaccagtygaacaccaagtgttgattatttatgcattaacaaaaggatatttagatgatattccagttgtagatatcacacgttttgaagaygagttaaaccactgggcagaatcaaatgctactgaactgttaaatgaaatcagagaaactggtggcttaccagatgctgagaagtttgacacagcaattaacgaattcaaaaaaagctttagcaaatctgaataa

SEQ ID NO: 2905 - DNA, 798 bp, Staphylococcus aureus
atgtatcataacagtaacgcaaactttgtmaatggtatcactttaaatgtgagagataagaatgaattaaagccattttatgaggacrtattaggattaaatattataaatgagacattaacatcgatmcaatatgaagtaggtcaaaataatcatgtcattacacttgttgaattacaaaatggrcgtgaacctttaatgtcmgaagcgggactgtttcatatcgcaattaaactacctcaaattagtgatttagctaatttactaattcatttaagcgaatatgatattccagttaacggaggtatacagcctgcttcgttatcattattttttgaagacccrgaaggaaacggttttaaattttatgttgataaagacgaagcgcaatggacgaggcaaaatratttagtaaaaattgatattagaccattaaatgtaccgagattagtgagtcatgcaacaaaattgttatggttaggtattccagatgacgctattataggtgcattgcatattaagacaattcatttatcagaggtaaaagastactacctcgattattttggattagagcaatcggcatatatggatgattattcaatatttttagcatcgaatggctattatcaacatttggccatgaatgattgggtatcagcaacgaaacgtgtagaaaattttgatacgtatggattagcaattgttgactttcattatcctgaaacaacacatttaaatttacaaggtccggatggtatctattatcgctttaatcatatcgaagttgaagattag

SEQ ID NO: 2906 - DNA, 540 bp, Staphylococcus aureus
atggtaaaagtagctaacaagtatgctaaagcattatttgacgtgtcattagatacaaataatttagaractattaatgaagaattaacagttataaaygaagcagtaaaagataaaattgagcaattgaraatggttgacagtaatccaactcaaacagcagaacaacgtcgtgagttgattaatggtgtatttactgacattaatccatacattaaaaatatgatgtacgtgttagcagataatagacatatctcattaatagctgacgtattcaaggcgttccaaagcttatataacggacactacaatcaagattttgcaacaattgagtcaacatatgaattgagtcaagaagagttagwtaagattgtcaaactagtaactcaacaaacgaagttatctaaagttattgtagatacaaaaattaatccagatttaattggtggatttagagttaaagtcggcacaactgtattagatggtagtgttagaaatgatcttgtccaattacaaagaaaatttagaagagttaattaa

SEQ ID NO: 2907 - DNA, 492 bp, Staphylococcus aureus
atgcacaaaaaatattttattggcacttccattttaatagcagtatttgtcgttatatttgaccaagttactaaatatattatagctactacaatgaaaattggagattcatttgaagtgataccgcactttttaaacataacatcacatcgaaataatggtgctgcatggggaatattgagtggaaaaatgacatttttctttattattaccattattatattaatagccttagtatatttctttattaaagatgctcaatataatttgtttatgcaagttgctattagtttactttttgcaggtgcacttggaaactttattgatagarttttaacaggagaagttgttgactttattgatacaaatatttttggttatgattttccaatatttaatatmgcagattcaagtttaacaattggtgtaatattaattattattgccttattaaaggatacttccaataaaaaggakaaggaggttaagtaa

SEQ ID NO: 2908 - DNA, 522 bp, Staphylococcus aureus
gtgactgaaacagctaacttattckttcttggtgcagctggaggcgttgagtggggtactgtgattgtacaggtcctaactttcatcgtrttacttgcgttacttaaaaagttcgcatggggtccattgaaagatgtaatggataaacgtgaaagagatattaacagagatatcgatgacgcagaacaagctaagttaaatgcacagaaacttgaagaagaaaataaacaaaaacttaaagaaacacaagaagaagttcaaaagattttagaagatgctaaggttcaagcacgtcaacagcaagaacaaattattcatgaagcaaacgtacgtgcaaacggtatgattgaaacagcacaaagtgaaatcaatagccaaaaagaacgtgccattgcagatattaataatcaagtatctgaactatcagtgttaattgcttctaaagttcttagaaaagaaatttctgaacaagaccaaaaagcattggttgacaagtatctaaaagaggcaggcgataaataa

SEQ ID NO: 2909 - DNA, 918 bp, Staphylococcus aureus
atggagacttatgaatttaacattacagataaagaacaaacaggtatgcgtgtagataagttgctgcctgaattaaatartgattggtctcgtaaccagatacaagattggattaaagcaggtttagtcgttgcaaacgataaagttgttaaatctaattataaagtgaaacttaatgatcatatagttgtcactgaaaaagaagtggttgaagctgayattctacctgaaaatttaaatttagatatttattatgaagatgaygaygttgcagttgtwtataaamcgaaaggcatggtagttcatccatcaccaggkcattataccaatacattagttaatggtttaatgtatcaaattaaaratttrtcrggtattaatggagaaattcgtccaggtattgttcaccgtatagatatggatacttctggtttattaatggttgctaaaaatgatattgctcatcgtgggcttgtagaacaattaatggataaatctgttaaaagaaaatatatcgctttagttcacgggaatattcctcatgattacggwacaatcgatgcgccaattggtagaaacaaaaatgatcgtcaatctatggctgttgttgatgatggtaaggaagcagtgacacattttaacgtactagaacattttaaagattatacgcttgttgaatgtcaacttgaaacaggacgtacgcatcaaatccgtgtkcacatgaaatatattggcttcccattagttggtgatccaaagtatggaccgaaaaagacattggatattggtggtcaagctytacatgctggacttattggattcgaacatccagtaacaggtgaatatattgaaagacatgctgaattascacaagactttgaagatttattagatacaattcgaaaaagagatgcataa

SEQ ID NO: 2910 - DNA, 213 bp, Staphylococcus aureus
atgaatttaatcgcagcagcaatcgcaattggtttatcagcattaggagcaggtatcggtaacggtttaatcgtttcaagaacagttgaaggtgtagcacgtcaaccagaagcacgtggtcaattaatgggtatcatgttcattggtgtaggtttagttgaggcattacctatcatcggtgtagtaattgcattcatgacatttgctggataa

SEQ ID NO: 2911 - DNA, 528 bp, Staphylococcus aureus
atgtctgaacgtatyataatggatgatgccgcaatacaacgtacagtracgagaatcgctcaygaaattttggagtataacaaaggtactgataatttaattcttttaggtatcaaaacaagaggtgaatatttagcgaatcgtatacaagataaaattcatcaaattgagcaacaacgtatacctactggaacaattgatattacatactttagagatgatatagagcacatgtcatcacttacgacaaaagacgcaatagacatcgacacagatattacagataaagtagtcatcattattgaygatgtgctgtatactggtcgaacggttcgtgcttcacttgatgctattttgctaaatgctagacctattaaaattggtttrgctgctttggttgatcgaggacatcgtgagttaccaattcgagcagattttgttggtaaaaatatacctacttctaaagaggaaacggtaagtgtctatttagaagaaatggatcaaagaaatgcagttataattaaataa

SEQ ID NO: 2912 - DNA, 729 bp, Staphylococcus aureus
atggatcacaaatccccgctcgtgagttggaatttattcggttttgatatcgttttcaatttatcaagtatattgatgatacttgttacggcgtttcttgtttttctacttgctatcatttgtacgcgtaatttgaaaaaaagaccaactggcaaacaaaatttcgttgaatggatttttgatttcgtgaggggaatcattgaaggtaacatggcttggaaaaaaggtggtcaattccacttcttagcagtaacgctgattctgtacatttttatagctaatatgttaggtcttccgttttcwatagtaacgaaagatcacacattgtggtggaaatcaccracagctgatgcaacagtgactttaacgttgtctacaacgataatactgttaactcacttttatggaattaaaatgcgtggtacgaaacaatatcttaaaggttatgtacagccgttttggccattggcaattattaatgttttygaagagttcacttcaacattaacgcttggtctgcgtttgtacggtaacatatttgcaggtgagatactattaacattacttgctggcttattctttaacgaaccagcatggggttggattattagtatcccaggattaattgtttggcaagcattttcaatatttgtaggaacaatccaagcatatatctttattatgctttcgatggtttatatgtcacataaagtggcagatgaacactaa

SEQ ID NO: 2913 - DNA, 1308 bp, Staphylococcus aureus
atgcaaaatgatgaaatgtttgaacgaacagtaaaacchgtactagatgtaaatgaaaaaccacaaccagcgcaatgggcatttttaagcttacaacatttatttgcgatgtttggcgcaacagtactagtaccattcttaacaggaytaccaatatcmgcagcgttactagcttcgggaatcggtacattactttatatcttaataacgaaggcgcaaataccagcatacttgggatctagctttgcatttatcacrccaattatcacgggattaagtacgcatagcttaggagacatgcttgtagcattattcatgagtggtgttatgtacgtcatcatcggrattctaatcaaattaagtgggacagcatggttaatgaaattattaccaccagttgttgtwggaccagtcatcatggtaattggtttaagcttagcgcctactgcagtcaatatggcaatgtatgaaaatcctggagatatgaaaggttacaatatcagtttcttaattgttgcaatgataaccttgcttgtaacaataktcgttcaaggattttttaaaggattcctatctttaattccagtwcttgtaggtattatcgtaggttatgtggtagcgatttttatggggattgtgaaatttgatgcaattatgtcagcaaaatggatagatttccctcatatttatctgccatttaaagattatgtaccttcatttcacttaggacttgtactkgtaatgattccgattgtgttygtaacagtaagtgaacatattgggcaccaaatggtaytgaataaaatcgtaggtagaaacttctttgaaaagccaggacttgataaatcaatcattggtgatggtgtttctacaatgtttgccagtattattggtggaccaccaagtacaacatayggtgaaaatatcggtgtattagcgattacmagaatatacagtatttacgtcattggtggtgcrgcagttatagcaattgttttagcattcattggtaagttcactgcattaatttcttctatacctacaccagttatgggaggagtatctatattacttttcggtattattgcagcaagtggcttaagaatgytagttgaaagcaaagtagattttgcgaacaatcgaaatttagttatagcttcwgtaattttagttgtaggtatcggtaatttagtatttaacttaaaagaaattggtatcaaccttcaaattgarggratggcattagctgcactttcaggaattattttgaacttaatcttacctaaagagaaaaaacaaaacaattaa

SEQ ID NO: 2914 - DNA, 882 bp, Staphylococcus aureus
atgaatcatttattatcaatggaacatttatctacagatcaaatatacaaacttatccaaaaggcaagtcaatttaaatctggtgaacgtcaactaccaaactttgaagggaaatatgtcgcaaatttattctttgaaaattctactcgaacaaaatgtagttttgaaatggcagaacttaagctagggttaaaaacgattagctttgaaacatcaacatcatctgtttcaaaaggtgaatctttatatgacacatgtaaaactttagaaagtattggctgtgatttattagtcattagacatccgtttaataactactatgaaaaattagcgaatattaacatcccaattgcgaatgctggtgatggtagtggacaacatccaacacaaagtttrcttgatttaatgacgatatatgaagaatatggatattttgaaggcttgaatgtattgatttgtggmgacattaaaaattcacgtgtcgcacgtagtaattaccatagtttaaaagcattaggtgcaaacgtaatgtttaatagcccaaatgcttggattgatgattctttagaagcrccttatgtaaatatagatgatgttatagaaacagtagatatagttatgttattaagaattcaacatgaaagrcatgggcttgcagaagaaactagatttgcagcagatgattatcatcaaaagcatggcttaaatgaagtrcgytataacaaattacaagaacatgctattgtyatgcatccggcacctgtgaatagaggagtagaaatacaaagcgatttagtagaagcttcaaaatcaagaatttttaagcaaatggaaaatggcgtttacttaagratggcagtcattgatgaattattaaaatag

SEQ ID NO: 2915 - DNA, 1135 bp, Staphylococcus aureus
ttgatgaaaaagattatgaccatatttggaacaagacccgaagccataaagatggctcctttagttaaagctttggaacaagaaaaaatgctcgagccaattgttgttgttacagcacagcatagagaaatgcttgattcagtattaagtacctttgaaatcaaaccaaaatacgatttgaatattatgaaatcaggacagacactttctgagataacttctaaatcaatcactcaattagaacaagtgattcaattagaaaaaccagacatggtacttgtacatggtgatacgatgacgacatttgcaggtggtttagcggcattttataaccaagtgccgattggacacgttgaagcagggcttagaagttatgataaatattcaccttttccrgaagaggtgaatagacaattagttggtgtattagctgacttacattttgcacctactaaaaatgctgcatcgcatttgttaartgaagggaaatattcagaaagtgttgttgtcactggtaatacwgcgattgatgctatgaaatatacagttgatgacaattataaatctaacatcatggataaataccatgacaaaaarttcattcttatgacagcacaccgwcgwgaaaatwtmggkmaaccyatggaaaatatatttaaagcrgttagacgcttratagatgagtayacygatttagcrytrgtatatccaatgcataaaaayccraaagtycgagakgtggctcawaagattttaggkrgkcatgacagaattgaattgattgaaccyttrgaygtartagayttccataattttgctaaamaatcytattttattttgacrgattcrggwggmatwcaggaagargcgccatcwtttaataagccwgtyytagtwttgcgaagygttacagaacgwcctgaaggtgttgawgctggyacrttraaagtyrttggwacrmatrarcaaraygtrtatcaagctgcaaaagaattaatcgatgatgagagattatatcatcaaatgtctgaagcatctaatccttacggtgatggatttgcttcagaaagaatagttaatcatattaagtattatttgaatttaatcactgaaaaacyaagcgatttcwgattaa

SEQ ID NO: 2916 - DNA, 1275 bp, Staphylococcus aureus
atgaaattaattaaaaacggtaaagtattacaaaatgghgaattacaacaagcagatattttaattgatggtaaggtaattaaacaaattgcacctgcaattgaaccaagcaatggtrttgacatcatagatgcgaaaggtcactttgtgtcacctggatttgtcgatgttcatgttcatttacgygaacctggtggtgaatataaagagacaattgaaactggtactaaagctgctgctagaggcggatttacaactgtatgtccaatgcctaacacaagaccggtaccagattctgtagaacattttgaagctttacaaaaattaatcgatgacaatgctcaagtacgtgtattaccttatgcttcaattacaacacgtcaattaggtaaagaattggttgatttcccagcactagtaaaagaaggtgcctttgcgtttacagatgacggtgtaggagtacaaactgcaagcatgatgtatgaaggyatgattgaagctgcaaaagtaaacaaagccatcgtagcacactgtgaagataattcattaatctatggtggtgcaatgcatgaagggaaacgcagtaaagagttaggtataccaggtattccaaacatttgtgaatctgttcaaatcgcaagagatgtactattagctgaagcagcaggttgtcattatcatgtatgtcatgtttctactaaagaaagtgttagagtcattcgtgaygctaaacgcgcaggcattcatgttacagctgaagttacaccacaycatttattgttaacagaagatgatattcctggtaataatgccatttataaaatgaatccaccattgagaagtactgaagatagagaggctttgttagaagggttactagacggtacaattgaytgtatcgcaacagaccatgcaccacatgcacgtgatgaaaaagcrcaaccaatggaaaaagcaccattcggaattgttggyagtgaaacagcattcccattattatatacgcattttgtaaaaaatggtgattggacattacaacaattagtagattacttaacaattaaaccatgtgaracatttaatttagaatacggcacattaaaagaaaatggttatgcagatttaacaatcattgatttagatagtgaacaagaaattaaaggagaagatttcttatcaaaagcagataatacaccatttatcggctataaagtttatggaaatccgatcttaacaatggttgaaggcgaagttaaatttgagggggataaataa

SEQ ID NO: 2917 - DNA, 630 bp, Staphylococcus aureus
atgagtaaagtacacgttttcgatcatccattaattcaacacaaactaagctatattagagaygtaaatacaggtactaaagaatttagagaacttgtagacgaagttggtatgttgatggcatatgaagtaactagagacttagagcttcaggatgttgatattgaaacgcctgtaactaaaatgacggctaaacgattagctggtaaaaaattagctatcgttccaattttaagagctggtttaggtatgactgatggtattttaagtttagtrcctgcagcsagagttggacatatcggtttrtatcgagatcccgaaacattaaaggctgtagagtattttgctaagttacctcaagatattactgaaagacaaatcattgttgttgatcctatgttagcaacaggcgcatcagcaattgaagctattacttcattgaagaaacgtggcgctaaaaatattcgcttcatgtgtttaattgcagcaccagaaggcgtagaaaagatgcatgaagcacatccrgatgtagatatttatattgctgcacttgatgaaaagctaaatgayaaagcatatatcacaccagggttaggygacgctggagatagattgtttggtactaaatag

SEQ ID NO: 2918 - DNA, 1101 bp, Staphylococcus aureus
atgcaaagcaaacgttatctagtgttagaagacggttctttttacgaaggctaccgtttaggatctgataacttaactgtaggagaaattgtatttaatacagckatgacaggttatcaagaaactatttcagatccatcatatacaggtcagatcattacttttacgtatccattaatcggtaattatggtatcaatagagacgattttgaatcattagtacctacattaaacggtattgtagtgaaagaagcgagtgcgcatccaagtaattttagacarcaaaagacacttcatgacgttttagaattgcatcaaattccagggattgcaggtgttgatacaagaagtattacgcgtaaaattcgacaacacggtgtgttaaaagctggttttactgatcgaaaagaagatattgatcaacttgtcaaacatttacaacaagtagaattacctaaaaacgaagtagaaatcgtttcgactaaaacaccgtatgtttcgacaggtaaggatctaagtgtcgtacttgtagactttggtaagaagcaaaatattgttcgagaattaaacgtcagaggttgtaacgtcacagttgtaccatatacaactactgccgaagaaattttagcaatggctccagatggcgttatgctatcaaacggaccaggtaatcctgaagttgtagaatgtgcgattcyaatgattcaaggaattttagggaaaattccgttctttggtatctgtctaggacatcaactttttgcattatctcaaggagcaagctcatttaaaatgaagtttggtcatcgtggtgcgaaccatccagttaaaaatttagagactggaaaagttgatattacgagtcaaaaccatggatatgcaatagatatagattcgttaaaaagtactgatttagaagttactcatcttgcattaaatgatggtactgtagaaggtttaaaacataaaacattaccagcattttctgttcaataccatcctgaagcaaatccaggaccgtcagattcaaactatctatttgatgattttgtagcaatgatgactaattttaaggaaaaggagcgtcatatcaatgcctaa

SEQ ID NO: 2919 - DNA, 1239 bp, Staphylococcus aureus
atgtcttatatcaccaagcaagataaagttatcgcagaagcaatcgagagagaatttcagagacaaaatagcaacatagagttaatcgcatcggaaaattttgtatcggaagcggttatggaagcacaaggttcagtgttgactaataagtatgctgaaggctatccaggacgccgatattatggtggmtgtgagtttgtagatgttactgaaagcatcgcaattgatcgtgctaaagcrttgtttggagctgaacatgtcaatgttcaaccacattcaggttcacaagcgaacatggctgtttacttagttgcattagaaatgggcgacacagttttaggtatgaatttgagtcatggtggtcacttgacacatggagcgcctgttaattttagtggtaaattctacaatttcgttgaatatggagtagataaagacacagaacgaatcaattatgatgaagttcgtaaattagcgttagagcataagcctaagcttattgtggcaggagcatcagcatattcaagaacaattgayttcaaaaagtttaaagaaatcgcagatgaagtaaacgctaagttaatggtagacatggcacatattgcaggattagtagcggcaggtttacatccaaatccagtagaatatgctgattttgtaacaactacaacacacaaaacattacgcggaccacgtggtggtatgattttatgtaaggaagaatataaaaaagacatagataaaacaattttccctggtattcaaggtggacctcttgagcatgttattgcagcaaaagcagttgcttttggagaagcgttagaaaataatttcaaaacgtatcaacaacaagtggttaaaaacgcaaaagttcttgcagaagcattaattaatgaaggatttagaattgtttctggyggtacagataatcacttagtagctgttgatgtaaaagggtctataggacttactggtaaagaagctgaagagactttagattcagttggtatcacatgtaacaaaaataccattccgttcgatcaagaaaaaccttttgtaacgagtggtatacgtttaggtacacctgctgcaacaacgcgtggatttgatgaaaargcttttgaggaagttgcaaaaatcatcagtttagcattgaaaaatagtaaagatgaagaaaaattacaacaagctaaagaacgcgttgcgaaattaacagctgaatatcctctatatcaataa

SEQ ID NO: 2920 - DNA, 3174 bp, Staphylococcus aureus
atgcctaaacgtaatgatatcaaaacaattttagtaatagggtctgggccaattatcataggtcaagcagctgaatttgattatgctggaacacaagcatgtctagctttaaaagaagagggataycgagttattcttgtaaattcaaatccagcgacaatcatgactgataaggaaattgcggataaagtatatatcgaaccgttaactcatrattttatagcgcgaattatacgtaaagagcaacctgacgctttacttccaactttaggtggtcaaacaggtttaaacatggcgattcaactacacgaaagtggtgtgcttcaagataataacgtccaattattaggaactgagctaacatcaattcaacaagcagaagaccgtgaaatgtttagaacattaatgaatgatttaaacgttcctgtrccagagagtgacattgtaaatacagtagagcaagcctttaaattcaaagagcaagtgggatacccgctaattgttagaccrgcatttacgatgggtggtaccggaggcggtatttgtcataatgatgaagaattacatgaaatcgtytcaaatggtcttcattatagtccagcaacgcaatgtttattagaaaaatctatcgcaggttttaaagaaatcgaatacgaagtaatgcgtgataaaaacgataatgccatcgttgtatgtaacatggaaaatattgatccagttggtattcatacwggcgattcaattgttgtrgctcctagycaaacattatcrgatgttgagtatcaaatgttacgtgatgtttcattaaaagttattcgagcwttaggtatcgaaggtggttgtaatgttcaattagcattagayccccattcattcgattattatattatagaagtaaatccgcgtgtatcacgttcatcagcgttagcttcaaaagcaacaggatatcctattgcaaaattagctgctaaaatcgcggttggtctaacattagatgaaatgttaaatccaattacaggaacatcttatgcagcgtttgaaccaactttagactatgtgatttcaaaaataccaagatttccttttgataaatttgaaaaaggagaacgagagcttggcacacaaatgaaagcaacaggtgaagttatggccattggtcgaacttacgaagaatcattgttaaaagcaattcgatcacttgagtatggtgtgcatcacttaggattaccaaatggtgaaagcttcgatcttgattatattaaagaacgtatttcacaccaagatgatgaacgattatttttcatcggcgaagcaattagaagaggsacaacattagaagaaattcataatatgactcagatwgattacttcttcttacacaagttccaaaacattattgatattgagcatcaaytaaaagagcatcaaggtgatttagaatatcttaaatatgcaaaagattatggatttagtgataaaacaatagcgcatcgctttaatatgacggaagaagaagtatatcaattgcgtatggaaaatgatattaaacctgtttacaagatggttgatacttgcgcagctgaatttgaatcttcaacaccatattattatggtacatacgaaactgaaaatgaatccatagttactgacaaagaaaaaatcttagtattaggctctggaccaattcgaatcggccaaggtgtagaatttgactatgcgacagttcaygccgtttgggcaattcaaaaagcagggtacgaagcgataattgtgaataacaatccagaaacagtttcaacagacttctcaatttctgacaaattatactttgaacctttaactgaagaagatgtgatgaatatcattaatttagaaaaacctaaaggtgtcgttgtacaatttggaggacaaacagcgattaatttagcagacaaattggctaaacatggtgttaaaatacttggtacttcactagaaaatctaaatcgtgctgaagatagaaaagaatttgaagcactattaagaaaaattaacgtgccacagccacaagggaaawcagctacatcacctgaggaagcattagcgaatgctgcagaaatcggatatccggttgtagtaagaccttcttatgtattaggtggtcgcgcaatggaaattgtagacaatgacaaagagttagaaaactatatgacccaggctgtaaaagcgagtccggaacatccggtaytagtcgatagatatttaactggtaaagaaattgaagttgatgcgatttgtgatggagaaacggtcattattccaggaathatggaacatattgaacgtgctggtgtrcatagtggtgactcaatcgctgtatatccrccacaaactttgacagaagacgagttagcaacrcttgaggactatactataaaattagctaaaggtttaaacatcattggcttaatcaacattcaattcgttatagctcacgatggtgtrtatgttttagaagtaaayccacgttctagtagaacggtaccattcttaagtaaaattactgatattccaatggcacaattagctatgcgagcaatcattggggaaaaactaacagatatgggttatcaagaaggggttcaaccatatgctgagggtgtmtttgtgaaagcaccrgtatttagtttyaataaattgaaaaatgttgatattactttaggacctgaaatgaagtcwacaggtgaagtratggggaaagatacwacattagaaaaggcgttattcaaagggttaacaggtagtggygttgaagttaaagatcacggtacagtattaatgacygtcagtgacaaagataaagaggaagttgttaaattggcacaaygcttaaatgaagttggctataaaattttagcaacgtctggaacagctaataaattagctgagtatgacatacctgcagaagtagtaggcaaaatyggtggcgaaaatgatttattaacacgtattcaaaatggtgatgttcaaatcgttataaatacaatgactaaaggtaaagaagtagaaagrgatggcttccaaattagacgtactacagttgaaaatggtattccatgtttgacatctttagatacagctaatgccttaacgaatgtaattgaaagtatgacatttacaatgcgtcaaatgtaa

SEQ ID NO: 2921 - DNA, 525 bp, Staphylococcus aureus
atgaaagatttgacaatgttattasacgaattaaaagatatgtccttttttaataaaggagatatatgtttaattggatgttcaacatcggaagtcattggcgaaaaaatagggactgtcggttcgatggaagttgcagaaactatttttaatgcattagatgttgtgagtaaagagacaggcgttacttttgcttttcaaggatgtgaacatatcaacagagcgataacaatagaaaaatctcagtwtaatccattaacaatggaagaagtttccgtcgttccagatgtacatgctggagggagtttggcaacatacgcttttcagcatatgaaggatccratcgtggtcgaacatattactgttccttgtggaattgatattggtcaaacrttaataggcatgcatattaaacatgtatgtgtacctgtaaggacytcagtaaagcaagtaggacaggcaattgtaactattgccacatctaggccgaaaaagattggtggcgaacgtgctaaatacmaataa

SEQ ID NO: 2922 - DNA, 744 bp, Staphylococcus aureus
atgaaaagtgtraaaargttgagtgaagaattaggggttagtaagcaaacgatttttaataatattaagmgattgaatatagagacaataaaacaggaaaacacttcgtttattaaagaagataccgatatagaaaaaatcattcaaagagtaaatgaaaataaaaagaaatatggttttgaaagtrctactgaagacaaacaaaaaaargagtcggataatattaattttgaatckaaaagcgatgctcaaatagtagaaatacttaaaaatcagattaatactttaaataatcaaattgaaaaacaagaaagtcgtcatgaaacaacaattgaattttacagaaaagagttgcaagaaagatcaaaattgcttgaraatcagcaagttctggcattagagagtaataaaaagattcaaaaattagaaaatcaattagaaaaagaaaaacaccttaattatccctttgatacatctactaacrctagacaaaacgttgatgcacaagaaaaaacatatactactartcctgtaaatattaacmgagatcaggaagaaacyaaagaaacagagattcaatataaggatatatctggaagtcaaagcgacgaaagtacacaaggtgaagaagcamaaagagaagacgttycagctaatcyaaatgacaatgatagtgatatagaagaaaagagtgaagaaacggaasctaaaaaggggttttggagtcgtytrtttggtarctaa

SEQ ID NO: 2923 - DNA, 1308 bp, Staphylococcus aureus
ttgaaaaaacaagttattatttcgggcctcatgttattttcactattttttggagccggaaatttaatattcccgcccatkctyggccatacagcgggtcaaaatatgtggattggtatgctaggctttgcycttacaggcatattactcccctttattactgttattgttgttgcattttatgatgaaggtgttgaaagtgtaggcaatcgtatacatccatggttcgggtttatttttgctgtcgtgatttacatgtctatcggagcattttacggtattccacgtgctgcaaatgtcgcgtacgaaattggtacaagacacattttacctgtgcayaaccaatggactttaattatattcgcagcaatcttttttgcyatcgtttactggattagtttaaatccatcgaaaatcgttgataatttaggtaaattattaacaccrttattactattaatggtckctctattaagtattgctgtcattttcaaccctgaatctgyactaagtgcacctaaggataaatatataacacatcctttcatttcaggaagtttggaaggctattttacaatggatcttgttgctgcgttagctttttccgtwgtcattgtcaatggytataagtttaaaggcctcacagatcgcatgaaaattttaaaatatgtctgcttttcaggtcttattgcagccatattacttggaatgatttactttgcacttgcatacgttggggcatcaacagctccaggaaactttaaagatggtacagatatattgacgtacaactcattacgaktatttggttcrttyggyaacmtmgtatttggwatgacrgtkathcttgcatgyytaacaacatgtataggactcgtcaaygcttgygcmacatttactaagaaacaygtacctaagttttcttataaaatattcgcacttrttttctcyatcataggrttyttatttacaacacttggtttagaaatgattttaaaaattgctgtmccattrttgacwttaatatatcccgtgtckattgcacttgtactsatatcatttgctaacatgtttagcacattcagattcagttgggcctatcgactcgcaactgttattacattgattatttcaattttacaaatactaaatagtttyaacttattacacggtgttattttgaaatsgtttatgatgttacctttagcagatatcgatttagcttggcttgtaccattcatgctctttgctattatcggtttcatmatcgatgtakttatacgycgtccgaaacaagckacaacttaa

SEQ ID NO: 2924 - DNA, 204 bp, Staphylococcus aureus
gtgattgaaatgtcacgtcctgtcaaaatgaatagtttattaaagttgtattttgatagaaatwtactgacaccacaaaaattattgaattatttaaaagtygatgaaacatttttgaatcatctagcaggtattaatttaaaactctttaaggattatgttaatgaaaatagagaatataatataacgaatctatataaataa

SEQ ID NO: 2925 - DNA, 693 bp, Staphylococcus aureus
atgaaagatttaccaattattgcattagattttgaatcaaaagaaaaagtaaatcaatttttagatttatttgatgaatcattattcgtaaaagtaggtatggaacttttttatcaagaaggtcctcaattaattaatgagataaaagaaagaggccatgatgtatttttagatttaaaaytgcatgatattccyaatacagtwggtaargcgatggaaggactagctaaattgaatgttgatctggtaaatgttcatgctgctggtggcgtaaaaatgatgtctgaggccattaaaggattaagaaaacataatcaasatacaaaaattattgcagtaacacagcttacgtcaacaacagaagacatgttacgacacgaacaaaatatacaaacatcgattgaagaggccgttttaaattatgccaagttagcaaatgcagctggtttagatggcgttgtttgttcacctcttgaaagtcgtatgttgactgaaaagttaggtacatcatttttaaaagtaacaccaggyattagacctaaaggtgcatctcaaratgaccaacaccgtattacgacaccggaagaagcaagacagcttggttcgacgcatattgtagtcggtagaccgattacacaaagtgacaatccagtcgaaagttatcataaaattaaagaaagttggttagtataa

SEQ ID NO: 2926 - DNA, 420 bp, Staphylococcus aureus
atgaagattttattcgtttgtacaggtaacacatgtcgtagcccattagcggaaagtattgcaaaagaggttatgccaaatcatcaatttgaatcaagaggtatattcgctgtgaacaatcaaggtgtttcgaattatgttgaagacttagttgaagaacatcatttagctgaaacgaccttatcgcaacaatttactgaagcagatttgaaagcagatattattttgackatgtcgtattcgcacaaagaattaatagaggcacactttggtttgcaaaatcatgttttcacattgcatgaatatgtaaaagaagcaggagaagttatagatccatacggyggwacaaaagaaatgtatgtacatacctatgaagaacttgtaagtttaattttaaaattaaaagatattatttgctag

SEQ ID NO: 2927 - DNA, 612 bp, Staphylococcus aureus
atggctaaagaaattgcaaaatcattattagatattgaagctgtaacattatcaccaaatgatttatatacatggagttcaggtattaaatcaccgatttactgtgataaccgtgttacgttaggttatcctttagttcgaggcgcaatccgcgatggtttaattaacttaattaaagaacactttcctgaagtagaagttatttctggtactgcaacagctggtattccacatgcagcttttattgctgaaaaattaaaattaccaatgaattatgttcgttcatcaaataagagtcatggtaagcaaaatcaaatygaaggtgctaaaagtgaaggtaaaaaagtagttgtgatagaagatttaatttcgacagggggatcttcagtcacagcagttgaagccttaaaacwagcaggtgcagaagtattaggtgttgtwgctatctttacttacggtttgaaaaaagcagatgatacatttagcaatattcaactacctttttacactttaagtgattacartgaattaattgaagtagctgaaaatgaaggtaaaatttctagtgaagatatccaaacattagttgaatggagagacaacttagcataa

SEQ ID NO: 2928 - DNA, 1098 bp, Staphylococcus aureus
gtgcatagctttttgctttrtattatgataaataagaaaggcgtgattaagttggatactaaaatttgggatgttagagaatataatgaagatttacagcaatatcctaaaattaatgaaataaaagacattgttttaaacggtggtttaataggtttaccaactgaaacagtttatggacttgcagcaaatgcgacagatgaagaagctgtagctaaaatatatgaagctaaaggccgtccatctgacaatccgcttattgttcatatacacagtaaagktcaattaaaagattttacatatactttggatccacgcgtagaaaagttaatgcaggcattctggccgggccctatttcgtttatattgccgytaaagcyaggctatctatgtcgaaaagtttctggaggtttatcatcagttgctgttagaatgccaagccattctgtaggtagacaattattacaaatcataaatgaacctctagctgctccaagtgctaatttaagtggtagaccttcaccaacaactttcaatcatgtatatcaagatttgaatgsmcgtatmgatggtattgttcaagctgaacaaagtgaagaaggattagaaagtacggttttagattgcacatcttttccttataaaattgcaagacctggttctataacagcagcaatgatwacagaaatacttccgaatagtatcgcccatgctgattataatgatactgaacagccaattgcaccaggtatgaagtataagcattactcacccaatacaccacttacaattattacagatatygagagcaaaattggaaatgacggtaaagattggtcttctatagcttttattgtgccgagtaataaggtggcgtttataccaagtgaagcgcaattcattcaattatgtcaggatgacaatgatgttaaacaagcaagtcataatctttatgatgtgttacattcacttgatgaaaatgaaaatatttcagcggcgtatatatacggctttgagctgaatgataatacagaagcaattatgaatcgcatgttaaaagctgcargtaatcacattattaaaggatgtgaactatga

SEQ ID NO: 2929 - DNA, 213 bp, Staphylococcus aureus
atgaatgacaaaacatctaatgatttatatgggaagataaaacattgtaacgaatttatcaatcattcaaatgattccaatctatctagtagtcacgatgtcgacgaaagttcaacgaagcaaaaacatataaaaaataaaacaactataraycataatgatgatttatttaaacatgtaaaggatatattacgtaaacaagracaaatttaa

SEQ ID NO: 2930 - DNA, 837 bp, Staphylococcus aureus
atggtgaattataaagaaaagttagatgaagcaattcatttaacacaacaaaaagggtttgaacaaacacgagctgaatggttaatgttagatgtatttcaatggacgcgtacggactttgtagtycacatgcatgatgatatgccgaaagcgatgattatgaagttcgacttagcmttacaacgtatgttattaggagagcctatacagtatatagttggctttgcctcattttatggtagaacgtttgatgtaaactcaaattgtttgataccaagrcctgaaactgaagaagtaatgttgcatttcttacaacagttagaagatgatgcaacaatcgtagatatcggaacgggtagtggtgtacttgcaattactttgaaatgtgaaaagccggatttaaatgttattgctactgatatttcacttgaagcaatgaatatggctcgtaataatgctgagaagcatcaatcacaaatacartttttaacaggggatgcattaaagcccttaattaawgaagrtatcaagttgaacggcttgatatctaatccaccwtatatagatgaaaaagatatggttacgatgtctccaacggttacgagattcgaaccacatcaggcattgtttgcagataaccatggatatgctatttatgaatcaatcattgragatttacctcacgttatggaaaaaggcagcccagttgtttttgaaattggttacaatcaaggtgaggcacttaaatcaataattttaaataaatttcctgacaaaaaaatcgacattattaaagatataaatggccacgatcgaatcgtctcatttaaatggtaa

SEQ ID NO: 2931 - DNA, 402 bp, Staphylococcus aureus
atggatattccaaaaatyacgacatttttaatgtttaataacmaagctgaagaagctgttaaactatacacaagcttatttgaagatagtgagattataacaatggctaagtatggtgaaaatggacctggtgatcmygggactgtacaacactcaatatttacattaaatggacaagtattcatggcgattgatgctaatagtggcacagaattaccaatgaatcctgcgatttcattatttgttacagtaaaagatactattgaaatggaacgactatttaatggattaaaagatgaaggtgccattttaatgccaaaaacgaatatgccaccatacagagagtttgcttgggttcaagataagtttggagtaagttttcaattagcattacctgagtaa

SEQ ID NO: 2932 - DNA, 1077 bp, Staphylococcus aureus
gtgtttgatcaattagatattgtagaagaaagatacgaacagttaaatgaactgttaagtgacccagatgttgtaaatgattcagataaattacgtaaatattctaaagagcaagctgatttacaaaaaactgtagatgtttatcgtaactataaagctaaaaaagaagaattagctgatattgaagaaatgttaagtgaractgatgataaagaagaagtagaaatgttaaaagaggaragtartggtattaaagctgaacttccaaatcttgaagaagagcttaaaatattattgattcctaaagatcctaatgatgacaaagacgttattgtagaaataagagcagcagcwggtggtgatgaggctgcgatttttgctggtgatttaatgcgyatgtattcaaagtatgcwgaatcacaaggattcaaaactgaaatagtagaagcgtctgaaagtgaccatggtggttacaaagaaattagtttctcagtttctggtaatggcgcgtatagtaaattgaaatttgaaaatggtgcgcaccgcgttcaacgtgtgcctgaaacagaatcaggtggacgtattcatacttcaacagctacagtggcagttttaccagaagttgaagatgtagaaattgaaattagaaatgaagatttaaaaatcgayacgtatcgttcaagtggtgcaggtggtcagcacgtaaacacaactgactctgcagtacgtattacccatttaccaactggtgtcattgcaacatcttctgagaagtctcaaattcaaaaccgtgaaaaagcaatgaaagtgttaaaagcacgtttatacgatatgaaagttcaagaagaacaacaaaagtatgcgtcacaacgtaaatcagcagtcggtactggtgatcgttcagaacgtattcgaacttataattatccacaaagccgtgtaacagaccaycgtataggtctaacgcttcaaaaattagggcaaattatggaaggccatttagaagaaattatagatgcactgactttatcagagcagacagataaattgaaagaacttaataatggtgaattataa

SEQ ID NO: 2933 - DNA, 624 bp, Staphylococcus aureus
atggataatgaaaaaggattgttaatcgttttatcaggaccatctggagtaggtaaaggtactgttagaaaacgaatatttgaagatccaartacatcrtataagtattctatttcaatgacaacacgtcaaatgcgtgaaggtgaagttgatggcgtagattacttttttaaaactagggatgcgtttgaagctttaatyraagatgaccaatttatagaatatgctgaatatgtaggcaactattatggtacaccagttcaatatgttaaagatacaatggacgaaggtcatgatgtatttttagaaattgaagtagaaggtgcaaagcaagttagaaagaaatttccagatgcrytatttattttcttagcacctccaagtttagawcacttgagagagmgattagtaggtagaggaacagaatcyratgagaaaatacaamgtcgtattaacgaagcrcgtaaagaagtygaaatgatgaatttatacgattacgttgtagttaatgatgaagtagaacttgcgaagaatagaattcaatgtattgtagaagctgagcacttaaaaagagagcgcgtagaagctaagtatagaaaaatgattttggaggctaaaaaataa

SEQ ID NO: 2934 - DNA, 600 bp, Staphylococcus aureus
atgtatgaaacttaccattccggttggatagaatgtattacaggtagtatgtttagcggtaaatccgaagaactwataagacgtytaagaaggggyatatacgctaaacaaaaagtcgttgtatttaaaccggcgattgatgatcgatatcataaagaaaaagtggtctctcataatggtaatgccattgaagcgattaatatttctaaagcaagtgaaattatgacgcacracttaactaatgttgatgttataggaatagacgaagtrcaattttttgacgatgaaattgtaagtatagtagaaaaactatcagcagatggacaccgtgttattgttgctggattagatatggattttaggggcgaaccgttcgaaccaatgcctaaattgatggctgtcagtgaacaagtaacgaaacttcaagcagtttgtgctgtttgtggttcttcatctagtagaacgcaacgattaataaatggtaaaccagctaaaatcgatgatccgattatcttagtaggtgccaatgaaagttatgagccacgttgtcgcgcgcaccatatcgtagcacctagtgataataataaggaggaattataa

SEQ ID NO: 2935 - DNA, 189 bp, Staphylococcus aureus
atgtctttacattttgcaattctgttttggctagcattaattttcttagttgccgctacgtttatactcgtattaatgaaaaaaactggcaaagaatctaaaaaagagtcctatttaagtttcactgtcattctctatattttyggattcgctatwttaatatacacatttatatttggtgtgctataa

SEQ ID NO: 2936 - DNA, 219 bp, Staphylococcus aureus
atgttaaatccaccwttaaaccaattaacgtcacaaattaaatcaaagtatttaattgcaacaactgcagcgaaaagagcgcgtgaaattgatgaacaacctgaaactgaattattaagtgaatatcattcatttaaaccagttggtagagcgttagaagaaattgctgacggtaaaattcgccctgttatttcaagygattattatggtaaagaatag

SEQ ID NO: 2937 - DNA, 255 bp, Staphylococcus aureus
atgaaacaaggaattcatcctgagtatcaccaagtaatctttttagatactactacaaacttcaaattcttaagcggttctacaaaaacatcttcagaaatgatggagtgggaagatggaaaagaatacccagttattcgtttagatatttcatctgattcacatccattctacactggacgtcaaaaattcgctgctgcggatggacgtgtggaacgtttcaacaaaaagtttggtcttaaatcaaacaactaa

SEQ ID NO: 2938 - DNA, 1200 bp, Staphylococcus aureus
atgaagaaaatattrttagccgttacaggtggcattgcggcatataaagcrattgatttgacaagtaagttaacacaatctgggtatgaagttcgcgttatgttaacgaatcacgcacaaaaatttgtgacaccattagcatttcaagcaataagtcgaaatgctgtttatacagatacttttatagaagaaaatccttcagaaatacagcatatwgcattaggtgattgggcagatgcaatcattgttgcacctgcaacggcaaatacaattgcaaaattgagtgtaggtattgctgatgatttggtgacatcaacgttgctagcaacagagacaccgaaatttattgcgcctgctatgaatgtgcatatgtatgaaaataaacgtacgcagcaaaatattaatattttaaaagaagatgggtatcattttatcgaaccaggaagcggatttytagcatgtggttatgttgctaaaggacgtatggaagaaccgcttcaaatcgtttctgtwattgatgctcattttcaaaatagtaatcgtttagctaatagttcatttcaagataaacgcgcattggttacagcmggaccaactattgaagttatcgatccagtcagatttgtatccaatcgttcttctggaaaaatgggytatgcaatagctgaagcattgcgaaatcgaggagctatcgtgacrttagttgckggkcctacaacactagaggatccaaaagatattgaagttattcatgttcaaagtgctgaagaaatgtttgaacaagtgacaagccgatttgacgaacaagatattgttgtaaaagcagcagccgtatctgactatacaccgrttgatgtattagaacataagatgaaaaagcaggayggtgatttgtcagtatcttttaaacgtactaaagacattcttaaatatttaggtgaacataaaacatcacagtatttaataggctttgcagcagagactgaagatattgaaaattatgcacaacaaaaattacgcaagaaaaatgcagatgtgattatttcaaataatgttggrgatatgtctatcggatttagttctgatgataatgaattgacaatgcattttaaaaataatgaaaargtaaatatcaagaaaggaaaaaaagtagtattagctgcacaaattttagatgaactagaaactaggtggcaataa

SEQ ID NO: 2939 - DNA, 1317 bp, Staphylococcus aureus
atgcctgaaagagaacgtacatctcctcagtatgaatcattccacgaattgtacaagaactatactaccaaggaactcactcaaaaagctaaaactcttaagttgacgaactatagtaaattaaataaaaaagaacttgttmtagctattatggaagcacaaatggaaaaagatggtaactattatatggaaggtatcttagatgatatacaaccrgatggttatggttttttaagaacagtgaactattctaaaggggaaaaagatatttatatatctgctagccaaattcgtcgttttgaaattaaacgtggggataaagtaactgggaaagttagaaaacctaaagataacgaaaaatattatggcttattacaagttgactttgtcaatgaccataacgcagaagaagtgaagaaacgwccgcatttccaagctttgacaccactttatccagatgagcgtattaaattagagacagaaayacaaaattattcaacgcgcatcatggatttagtaacaccgattggtttaggtcaacgtggtttaatagtggcgccacctaaagcaggtaaaacatcgttattaaaagaaatagcgaatgcaatcagtacgaacaaaccagatgcaaagctatttattttgttagttggcgagcgtcctgaagaggtracrgatttagaacgctcagtagaagctgctgaagtcgttcattcaacgtttgacgaaccaccagaacaccatgttaaagtagctgaattattacttgarcgtgcaaagcgtttagtagaaattggggaagatgtcattattttaatggattctataacgagattagcacgcgcttataacttagttattccaccaagtggtcgtacattatcaggtggtttagatcctgcatctttacacaaaccaaaagcattcttcggtgcagcgagaaatattgaagcgggtggaagtttaacaatacttgcaactgcattagttgatacgggttcacgtatggacgatatgatttacgaagaatttaaaggaacaggtaacatggagttacatttagatcgtaaattgtctgaacgtcgtatcttccctgcaattgawattggcagaagttcaacgcgtaaagaagaattgttrataagtaaatctgaattagacacattatggcaattaagaaatctattcactgactcaacwgactttactgaaagatttattcgcaaacttaaaaggtctaagaataatgaagatttcttcaagcagctacaaaagtctgcagaagaaagtactaaaacgggtcgacctataatttaa

SEQ ID NO: 2940 - DNA, 2409 bp, Staphylococcus aureus
atgatagcgaaagtcatagtcgatgtcgcgtcgaagagcgttgactataaatttgattatataattcccgaacaactcgaatctgtcatccaacctggtgtgcgtgtrattgtaccttttggaccaagaacgattcaaggttatgtaatggaagtaacagcagaacctgatgcacaacttgacgtttcgaagttaaaaaaaatcatagaagtgaaagatatacaaccagaattaacatcagaattaatagctttaagtgagtggatgggttcaactcatgtcattaaacgtatttctatgctagaagtgatgcttccragtgctattaaagcgaagtataaaaaagcatttaagatgaaagatgacatagagstaccttcarctttattacaaaaatttgataagcatggttactattattataaagatgcgcaaaaaaataatgatattcaattgcttatgaagttgttaaaagatgatatcgttgaagaaaraacgattctcacacaaaatataactaaaaaaaccaagcgtgctgttcgtgtcattgaagggtatcatcctgatgaagtattagctaagttggagaaagttattaaacaataygatttgtatgcttacttgtctgaagaacaacataaaacaatatttttaactgatattgaggatatgggcttttcaaaatcyagtttagatggacttatcaaaaaaggttatgttgaaaaatatgacgcggttgttgaaagagacccatttaaagatcgtgttttcgaacaagaatcaaaacagcaattaacagaagaccaatataaagcatatgaagcgattaaagctaaaattgtaagccaagagcaagaaacatttttacttcatggtgtgacgggatcaggtaaaacagaagtatatttacaaacgatagaagatgttttaagycaaggaaaacaggcgatgatgttagttcctgaaatcgctctaacaccgcaaatggttttacgcttcaaacgtcgatttggtgatgacgttgctgtattacattctggcttatctaatggggaacgttatgatgartggcaaaaaattagggatgrtcgtgcgagagtaagtgttggtgcaaggtcaagtgtgttcgcacctttcaaaaatttagggttaatcatcattgatgaagaacatgaatctacatataarcaagaagattatccgagatatcacgctagagaaattgcccaatggcgaagtgaatatcatcactgyccagtcattttaggaagtgcaacaccatgtcttgaaagttatgcacgagctgaaaaagrygtttatcatttgctatcattaccaaacagagtgaaccaacaagctttacctgaaattgatatmgtagacatgcgtgaagaattgagtgaaggtaatcggtcaatgttttcaaaagatttacgtgaagccatacaattaagattagatcgacaggaacaagttgttttatttttaaatcgacgtggttatgcatcrtttatgttatgtcgggattgtggatatgtaccgcaatgyccaaactgtgatatttcattaacgtatcataaaacgacagacttattaaaatgtcactattgtggttaccaagagacrccaccgaatcaatgtccaaattgtgagagtgaacacattcgacaagtaggtactggtactcagaaagttgaagaactattgcaacaagaatttgaagatgcgcgcataattaggatggatgtagatacaacctcaaagaaaggtgcacatgaaaagttattgactgaattcgaaaaaggtaacggtgacattttactaggtactcagatgattgcgaaaggattagattatccaaayattactttagttggtgtgctgaatgcagatacaatgttaaatttacctgattttcgggcgagcgaacgtacttatcaactattaacgcaagtggctggtagagctggtcgtcatgaaaaggcaggtcaagtcatcattcaaacgtataatccagatcattattcaatattggatgttcaaaaaaatgattatttaacattttatcgtcaggaaatggaatatcgtaaattaggaaagtatccaccgtattattatttgattaatttcacaatctcacataaagaaatgaagaaggttatggwagcatcgcarcatgttcataaaattttattacagcatttaacagaaaaagcgcttgtactaggtccatctccggcagcacttgcgagaatcaacaatgaatttagattccaaattttagtgaaatataaaagtgaacctggattattacaagccattcagtttttagatgactattaccatgaaaaatttataaaagaaaaattagcrttgaagattgatattgatccacagatgatgatgtaa

SEQ ID NO: 2941 - DNA, 1428 bp, Staphylococcus aureus
atgagagactacacaaagcaatacattaatggcgaatgggtagaaagtaatagtaatgaaacgatagaagttataaatccagcaaccgaagaagtaatcgggaaagttgctaaaggyaataaagctgatgttgataaagcygtcgaggcggcagacratgtttatttagagttccgtcatacatctgtgaaagaaagacaagcgttattagataaaattgtaaaagaatatgaaaacagaaaagacgatattgtacaagctattacggatgarttaggtgctcctttatcattatctgagcgtgtccattatcaaatgggactaaaccattttgttgcagcgagagacgcattagataaytacgaatttgaagaacgccgcggagatgatttagttgttaaagaagcaatcggtgtatctggmttaattacaccgtggaacttccctacaaaccaaacatcattaaaattagcagcagcatttgcggctggtagtccagttgtacttaaaccatctgaagaaacaccatttgcagctgttattttagctgagatttttgataaagtcggtgttcctaaaggtgtatttaaccttgttaatggtgatggtgcwggygttgggaatcctttatctgarcatcctaaagtacgcatgatgtcattyacaggatcaggccctactggttctaaaattatggaaaaagcygctaaagattttaaaaaggtatcattagagcttggtggcaaatcaccatayatcgtcctagatgacgtagatattaaagaagcggctaaagcaacaacaggcaaagttgttaataatactggtcaagtatgtacagctggtacacghgttttagtgcctaamaaaattaaagatgcattcttagctgaattaaaagaacaatttagccaagtgcgtgtcggtaatccaagagaagatggtacacaagtaggccctatcattagtaaaaaacaatttgatcaagtacaaaattatattaataaaggtattgaagaaggtgctgaattattttatggtggtcctggtaaaccagaaggacttgaaaaaggatactttgcacgtccgacaatttttattaatgtrgataatcaaatgacgatagcacaagaagaaatttttgggccagtaatgtcagttatcacttataacgatttagatgaagcgattcaaattgcaaatgatacaaaatatggtttrgcaggatatgttattggtaaggacaaagaaacattgcataaagtagctcgttctattgaagcaggtacagtagaaataaacgaagcaggtagaaagccagayttaccatttggtggctataaacaatctggtttaggtcgtgaatggggcgattatggtattgaagagttcttagaagtgaaatctatagctggmtattttaaataa

SEQ ID NO: 2942 - DNA, 954 bp, Staphylococcus aureus
atgaaaaagacactgggatgtttacttttaattatgcttttagtcgtagcaggttgttcttttggtgggaatcataaattatcatcaaagaaatcagaagaatcaaaacaagaaactgtaaaaaaagaatcggaagaagagaaagatccagatttagagaaatwtgaagaaatagagaagaaaatgaaaggaattaaagatgcgccatctctwgataagttggatccattaatgacagaaaagtcgtttacgaatagtaaagggattcaaggatggaaagattacaaagaattaatgggtaaagtggaacttgcagattatagatttacwaaagattcaaaaggatcttcwataaaagatgttgatgcattctttaaaggtaagaaaggtataaaaaggaaagtgattgaaacacacgatgatgtaaaacaagttgattattggtatgtagatccagatggaaagaaaattggcaattcaaacacacctgttttttacgcagaaattatgacaaaatataaagatggaaagttagtttatgcatcagtcgaaccaggwtcttacgtaatacataaagatgatgcaattaaatatgacgattattctaagttaaaaaaattaagtcarctaactaaacttgatcatccaaarccagttccatatagcgtagctcaaatcaaatctttcggagtacctttaacaagcgtttcatttatgacrcatggatcaaaggatactaaagatgaagtgwtgccggcattggcmtatttcactttttcaccaaaaaattatgaagacaagtctaatccagatccaaaagttttaaatttagtasrkatggatttcttaaatgcatctagtgattttggtaacgcacattttgttgttytaagtaaatatattaaagagtaygaatcaaactatgaaacagcgtcagatgattctttaaaatag

SEQ ID NO: 2943 - DNA, 336 bp, Staphylococcus aureus
atggaagtatgtccgtatctcgaagaaacttttaaaatacttggtagaagttggaatggattaatcattaattatctctcaagatgtaatgactgttcagcacacttttccgatatgaaaagagatttgaaaacaataacaccacgtgctttaagtcttaagttgtcagagcttgcacaatgggagttagttgagaagcaaatcatttctacgagtccagtacaaattatttatgtgctaactgaaaaaggtaaagcgttagcagaggctttacatccaattgaagcatgggcgcaatcatatgtcgatttaacagatcaacgtactgctaaatra

SEQ ID NO: 2944 - DNA, 102 bp, Staphylococcus aureus
atggctgacattccacttgatgtagcgaatgatgcaataccatgytcragtttggcaaaacaggtttcaaatgttgagcgtgtaggatttttagtacgtgta

SEQ ID NO: 2945 - DNA, 489 bp, Staphylococcus aureus
atggcgattaaaaagttagtaccagcatcgcatcctattttaacgaaaaaagcgcaagcagttawaamatttgatgattcgttaaaaagattattacaagatttagaagatacaatgtatgcacaagaagcwgctggcttatgtgcacctcaaattaatcagtcattgcaagtggcaatyattgatatggaaatggaaggattattacaacttgttaatccgaaaattattagtcaatcaaatgaaacrataacagacttagaaggttcaattacattgccagatgtttacggcgaagtgacaagaagtaaaatgatmgttgtygaaagttatgacgtcaatgggaacaaagttgaactaactgcacatgaagatgtagcaagaatgattttgcatattatagatcaaatgaacggtatcccttttacagaacgtgcggaccgtattttaacagataaagaagtggaggcatattttataaatgactaa

SEQ ID NO: 2946 - DNA, 1260 bp, Staphylococcus aureus
atggctcaagaggtaataaaaataagaggtggacgcacactaaatggggaagttaatatcagtggcgcgaaaaacagtgctgtagctatcattcctgcaacattattagctcaaggacatgtgaaattagaagggttaccgcaaatctctgatgttaaaactttagtgagtttattagaagatttaaatattaaggcatcactaaatggtayggaattagaagttgatacaactgaaatacaaaatgctgcattaccaaataataaagttgaatcattacgtgcttcatactatatgatgggtgccatgttaggtagatttaaaaaatgtgtgattggtttaccgggaggatgtccacttgggccacgtccaattgatcaacatattaaaggatttaaagctttaggtgctgaaattgatgaatcaagyacgacatcaatgaaaatygaagctaaagarttaaaaggtgcrcatatttttctagatatggttagcgtaggtgcaacaattaacattatgctagctgcagtttatgcaacaggacaaactgtaattgaaaatgctgctaaagaaccggaagtagttgatgttgctaacttcttaacaagtatgggagctaatattaagggagcgggyacatcaacaattaaaatcaatggygtcaaagaattacatggttctgagtatcaagttatacctgatagaattgaagcaggcacatatatgtgtatcgctgcagcatgtggagaaaatgttatattaaataatattgttccgaaacatgtagaaacattaactgctaaatttagtgaattaggtgtgaatgttgatgtaagagacgaaagaattcgcatcaataataatgcgccatatcratttgttgatattaaaacactagtatatccaggttttgctactgatttgcaacagcctattacaccattattatttatggcaaatggtccttcatttgtaactgatacgatttatccggagcgttttaaacatgttgaagaattaaagcgcatgggtgcaaatattgaagttgacgaaggcacagcaacgataaarccatcaacattacatggtgctgaagtttatgctagcgatttaagagcaggagcttgtttaattattgctggtttaattgctgagggtgtaactacaatttacaatgtwaaacatatttatagaggttatacagatattgtagaacayttaaaagctttaggtgcagatatttggacggaaactgtatag

SEQ ID NO: 2947 - DNA, 330 bp, Staphylococcus aureus
atgataactcatatgaacatgttaatacttattttattgtgtggwatcgtaacgctattaattcgaattataccttttatcatgatttcaaaagtgcaattgcctgatgtygtggttcgatggctatcatttatcccaatcacactatttacggcacttgtcatwgacagcattattcaacagacgcctcatggtgaggggtatacattaaacatcccttacattatcgcgctcattccgacggttattttatctataatcacgcgtagtttaactattacaattattagtgggattgttatcatggcarcattacgatttttcttttaa

SEQ ID NO: 2948 - DNA, 1625 bp, Staphylococcus aureus
atggataaaatgaagaaaaagcttgtaggaggctacattcgygtgtccacagagagacaagtagarggttatagcatmgagggacaaattacacaaatagagcaatattgccaattyaacggctatgaactygttgatatatatgcagatcggggtatatcaggaaaatctatgaaccgtcctgaattacagcgcatgttaaatgatgctaaaaatggaaaattagactgtgttatggtttataaaacaaatcgtttggcacgtaatacttccgatttacttacaatmgtcgaagaacttcatcgycaaaatgttgaattttttagcttgtctgaacgtatggaagtcaaaaattcaacaggcaagttaatgctccagatacttgcaagtttttccgaattygaaagaaatacaattttagagaatatttacamcggrcaacrtcaaagagctttaragggctattatcaaggcaatcttccattaggatataataacatacctgataataaaaaagaattaatgattaatcaacatgaagctaacatcgttaaatatatctttgaatcttatgccaaaggtcatggttatcgtaaaatagccaatgcaytcaatcacaaaggctatgtgactaaaaaaggcaatccatttagtatywmwkcwrtwacytatattywstcaawcccattctayattggtaaaattcaattygcgaartacaaagattggaatgawaarcgwcgtaaaggaytaaaygataarccwrtwatmgctgawggtaaacacmckcctattattagtcaakmattatgggataaagtscaakcacgyaaraaacargtmagtsaaaaaccwcaagtycatggkaaaggaaccaatmtwttaacwggwatwattymstgyccmcaatgtkstgcaccwatggcwgckagtaacacmacraacacaytkaaagatggyactaaaarcgwatwcgttaytattcktgtagtaayttycgaaayaaaggctcaaargtatgttctgcgaatagygttagagccgatgtcattgaraaataygttatggaycaaatacttgaaattgtcaaaagygataaagttctcaaacaagttgtcgaacgtgtyaatcaagakaatcaagtcgatgtagctgcactyaaycatgatattgcttataaacaacaacaatttgatgaartwarcayyaaacttaaaaatctmrttcaaaccatcgaagacaatccagacttaacatctgcactcaaaccaaccattcatcaatatgaaacamaactgaatgatatyacaaaccaaatkaatcaactcaagcascaacaaaatcaagagaaaccatyttatgatackaaacaaatcgctgcyytattacaacgaatatttcaaaatatagaatccatggataaatcacagctcaaagcwttrtacctaacggttattgaccgtattgayattcgtaaagaygagaatcataaaaarcaattctwtgtyacwctmaarctyaataatgaaattattaaacaacttttyaataataayaatctagacgaagtgctyctcagcacttcgtctttgtttttgcctcaaacactctactttcaaatataa

SEQ ID NO: 2949 - DNA, 894 bp, Staphylococcus aureus
ttgaatttcgtttcatccatttgtaaaactggatactctaatatccggtaatagccggttaaatcgacataggatgtcactagctattccaaaattgtcttttgacgctataacgattgttgggaatcttagcatgtctaacgcagagagactttcacattttatgagtactaatcctgaarttcggctttgggatattttacaaacaaactttaaagctaaagctcttaaagaaaaagtttatattgaatatgacaaaataaaagcaactctttggaatagacgtagtatgcgcgttgaatttaatcctaataagctttcgcatgatgaagtgctttggttaaaacaaaatatcatcagttatttggacgatgttagttttacgagattagatttggcttttgattttgaatttgatttaaatgactattatgcattgtcagataagtcgryaaagaaaactatattttatggacgtaatgtaaaaccagaaacaaaatattttggtgtgcgtaatagtgataggtttattcggatttataataaaaacaagaacgtaaagataatgcagatgttgaaattgattcaacatttctatggcgtgtggaaattgaattaaaacgagatatggttgattgttggaaagattgttttgatgatttgcatattttaaaaccgaatttaaaaatgattgaaaatatacaagaacgagcaatgcttcatttattaactcacgaagaagaggaatggggaaatttagaaagacgtactaaaaataaatatagagataagttgaaaaatatagcgtctattgatttgacagatttaatgaaaatatctttaagaggaaatgaaaaccaattgcaaaaacaaatcgacttttggttgaattaa

SEQ ID NO: 2950 - DNA, 936 bp, Staphylococcus aureus
atgactaaaataatatttatgggtacaccagacttttcaacaactgttttagaaatgcttattgcagaacatgatgtcattgcagtcgtaacgcaaccagatcgacctgttggacgtaaacgtgttatgacaccaccaccagttaaaaaagttgcaatgaaatatgatttacctgtatatcarcctgaaaaattaagtggatcagaagaattagaacaattgcttcaattagatgtagatttaattgtaacwgcygcttttggacaattattacctgaatcattgttggcattaccaaawcttggsgcaattaatgtacatgcatcattgttrccraagtatagaggtggtgcaccaattcatcaggcaattatcgatggtgaacaagaaaccggcataacaattatgtatatggttaaaaaattagatgcgggtaatattatttcgcaacaagcaattaaaatagaagaaaatgataatgtcggtacgatgcatgataaattaagtgtattaggrgcagatttattaaaagaaactttaccatcwattatagagggyacaaatgaaagygtaccwcaagatgatacgcaagcaacatttgcttccaatattcgacgcgaagatgagcgaattarctggaataaaccaggaagacaagtgtttaatcaaattcgwggattatcaccatggccagttgcttatacaactatggatgacactaacttgaaaatatacgatgctgaactcgttgagactaataagataaacgagcctggaacmattatagaaacgactaaaaaagccattattgttgctacaaatgataatgaagctgttgcaattaaagatatgcaattrgctgggaaaaagagaatgttagctgccaattatttaagtggtgcgcaaaacacactagtagggaagaaacttatatga

SEQ ID NO: 2951 - DNA, 861 bp, Staphylococcus aureus
atgcctttagtttcaatgaaagaaatgttaattgatgcaaaagaaaatggttatgcggtaggtcaatacaatattaataacctagaattcactcaagcaattttagaagcgtcacaagaagaaaaygcacctgtaattttaggtgtttctgaaggtgctgctcgttacatgagcggtttctacacaattgttaaaatggttgaagggttaatgcatgacttaaacatcactattcctgtagcaatccatttagaccatggttcaagctttgaaaaatgtaaagaagctatcgatgctggtttcacatcagtaatgatcgatgcttcacacagcccattcgaagaaaacgtagcaacaactaaaaaagttgttgaatacgctcatgaaaaaggtgtttctgtagaagctgaattaggtactgttggtggacaagaagatgatgttgtagcagacggcatcatttatgctgatcctaaagaatgtcaagaactagttgaaaaaactggtatygatgcattagcgccagcattaggttcagttcatggtccatacaaaggtgaaccaaaattaggattyaaagaaatggaagaaatcggtttatcwacwggtttaccattagtattacacggtggtactggtatcccractaaagatatccaaaaagcaattccatttggtacagctaaaattaacgtaaacactgaaaaccaaatcgcttcagcaaaagcagttcgtgacgttttaaataacgacaaagaagtttacgatcctcgtaaatacttaggacctgcacgtgaagcyatcaaagaaacagttaaaggtaaaattaaagagttcggtacttcwaaccgcgctaaataa

SEQ ID NO: 2952 - DNA, 1308 bp, Staphylococcus aureus
atgatmgaaaacgtgagaagtcttgcttttgacacgattcaagatatattaaatgaaggtgcgtatagtaacttgcgtatcaatgaagtgttgtcagaaaatgaattaaatgyaatggataargctttatttacagaaattgtctacggaaccgttaaaagaaaatwtacgttagatttttatttaaagccttttgtgaaaacaaarattaaggcatgggttaggcaattattatggatgagtatttatcaatatgtwtatttagataaagttccaaatcaygccatyattaatgaagcagttgaaatagcaaaagaacgcggtggctatcayaayggwaatgtcgtaaatggyattttacgwacaatgatgcgtagtgacttacctgattttaatgaaattgcagatcctaaaaaaagaatggcaatcgagtatagtatgccgaagtggattatagatcattgggcaacacattatggtctcgaaraaactgaaamrattttacagtcatttttagaaacgacatcaacaactgtgcgtgccaacmtgacgcgagcatcattagatgatattattgaaaagttgcaagacgaaggttatgacgttgaaaaagatcatgacttaccttattgtctccatataggaggacaaccaattattcattctcgttcatttaaagatggattcgtttcaattcaagataaaagctcaatgtttgttgcacacattatgaatgtagaccgacatgatcacgtattagatgcatgtagtgcacctggcggtaargcttgtcayattgctgaagttttaatgccagaagggcaagttgacgcttcagatatacatgatcacaaaatagacttaattaattttaatataaaaaaattacgattaacaaatattaargcttttcaacatgatgcgacaaaaccttatgataaaacatacgataagatacttgttgatgcaccatgtagcggattaggtgtwatgagacayaagccggagattaartatactcaaagcaaacaacatattgagtcactagttgawttacagcttgaaatattggaaaatgtaaaaaacaatgtaaaaataggtggmgaaatcatctattcmacatgtacaatwgagcaactagaaaatgaaaacgtgatttatacgtttytgaaaaataataaaaacttcgaatttgaaccgtttcaacatccgataactggagagttggtcaaaacgttacaaatcatgccgcaagactttaattcagatggattctttatcactaagataaaaagaaaggacaattag

SEQ ID NO: 2953 - DNA, 1611 bp, Staphylococcus aureus
atgacaaaatttatttttgtaacaggtggcgtagtttcatcattagggaagggtattacagcatcttctctaggtagattattaaaagatagaggtctaaatgtaacaattcaaaaattcgatccatacttaaatgttgacccaggtacaatgagtccttatcaacatggtgaagtattcgtaacggatgatggtgcagaaactgacctagacttaggacattacgaaagatttatygatattaatttaaacaagttttcaaatgtracagccggtaaagtgtattcacacgtattgaaaaaagaacgtcgtggtgattacttaggyggaacagttcaagttattccgcatatyacaaatgaaattaaagaacgtttattacttgcaggggaaagtacgaatgcagacgttgttatcactgaaattggcggtacaacaggtgatattgagtcattaccgtttattgaagcgattcgtcaaattcgtagcgatttaggtagagaaaatgttatgtatgttcactgtacattactgccttatattaaagctgctggagaaatgaaaacgaagccaacacaacatagygttaaagaattacgaggcttaggtattcaaccagacttaatcgttgtaagaactgaatatgaaatgacacaagatttaaaagataaaattgcattattctgtgacattaataaagaaagtgttattgaatgtcgtgatgcagaytctttatacgaaattccrttacaattaagccaacaaaatatggaygatatcgttattaaacgtttacaattaaacgcgaaatatgaaacacagcttgatgaatggaaacagttgttagatatcgttaataatttrgatggtaaaattacaattggtttagtwggtaartatgttagcttacaagatgcatatttatcwgtwgttgaatcattraaacatgcyggatatcctttygcyaaagatattgayattagatggattgattcaagtgaagtwacagatgaaaatgcrgccgaataccttgcagatgtcgacggtattttagtaccaggtggatttggtttccgtgcaagtgaaggtaaaattagtgcaattaagtatgctagagaaaacaatgtaccattctttggtatttgtttaggaatgcaacttgcaacagttgaattttcaagaaacgtattaggmcttgaaggcgcacattcagctgaattagacccagcaacaccatacccaattatagatttattaccagaacaaaaagatatcgaagatttaggtggtacattacgcttaggcttatatycatgttcwattaaagaaggcacattggcacaagatgtttayggtaaagcggaaattgaagaaagacatcgtcatcgttatgaatttaataatgactatagagaacaattagaagcaaatggtatggtratttctggtacaagtccagatggacgtttagtagaaatggtagagattccgacaaatgatttctttattgcttgtcaattccacccagaattcttatctagaccaaatcgtccgcacccgatttttaaatcattyattgaagcttcrttaaaatatcaacaaaataaataa

SEQ ID NO: 2954 - DNA, 1095 bp, Staphylococcus aureus
atgataactgctgaaaagaaaaagaagaataaatttcttccaaattttgacaagcaatcaatatattcattgcgatttgacgaaatgcaaaactggctcgttgaacaaggkcaacaaaaatttcgagcgaaacagatttttgaatggttatatcaaaaaagagtagattcgattgatgaaatgacgaacttatcgaaagacttacgacagcttttaaaagataactttactgttacaactttaacaactgtagtaaaacaagaaagtaaagacggtacaattaaattcttatwtgaattacaagatggctatacaattgaaactgttttaatgagacatgattatggaaattcagtatgtgtaacgacacaagtaggttgtcgyatcggatgtacgttttgtgcttctacacttggcggcttaaaaagaaaccttgaagctggcgaaattgtttcacaagttttaacagttcaaaaagcccttgatgctacagaagagcgcgtatctcaaattgtcataatgggtatcggtgaaccatttgaaaattatgatgaaatgatggactttttaagaatcgtcaatgatgataayagtttaaatattggtgcacgtcacattacagtatcaacatcaggtatcattcctagaatataygactttgcggaygaagatatycaaattaattttgctgtaagcttacacgccgcaaaagatgaagtgcgatcacgcttgatgccaattaaccgtgcatataatgttgagaagttaatcgaagcaattcaatattatcaagaaaaaacaaatcgtcgtgttacttttgaatatggtctgtttggtggtgtgaatgaccaactagaacatgcaagagaattagcacatttaataaaaggcttaaactgccatgttaacttaattcctgtcaaccatgttccagaaagaaattatgtraaaacggctaaaaatgatatctttaaatttgaaaaagaattaaagagactaggaattaatgccacaatacgtcgtgaacaaggttcrgatattgacgcagcttgtggtcaattaagagcaaaggaacgacaagtagaaacgaggtaa

SEQ ID NO: 2955 - DNA, 744 bp, Staphylococcus aureus
atgctagaggcacaattttttactgatactggacaacatagagataagaatgaagatgcgggtggtattttttataatcraactaatcaacaacttttagttctgtgtgatggtatgggyggccataaagcaggagaagttgcaagtaaatttgttacagatgagttgaaatcccgttttgaagcggaaaatcttatagaasaacatcaagctgaaaattggttgcgtaataatataaaagatataaattttcagttatatcactatgcacaagaaaatgcagaatataaaggtatgggtacaacatgtgtttgtgcacttgtttttgaaaaatcagttgtgatagcaaatgtcggtgattctagagcctatgttattaatagtmgacaaattgaacaaattactagtgatcactcrtttgttaatcatcttgttttaacgggtcaaattacgccggaagaagcatttacacatccacaacgtaatattattacgaaggtgatgggcacagataaacgtgtgagtccagatttgtttattaagcgattaaatttttatgattatttattattaaattcagatggattaactgattatgttaaagacaatgaaattaagcgtttgttagtaaaagaaggtacaatagaagatcatggtgatcaattaatgcaattggcattagataaccattcgaaagataacgttactttcatactcgcggctattgaaggtgataaagtatga

SEQ ID NO: 2956 - DNA, 861 bp, Staphylococcus aureus
atggctaaagaactttgttttgaaggtatcactttaaaagcatttgatgaacaatatcgttcagcaattaatgattttgacttgaatgaaagacaacaaatatattcatctttacctaaagaagttattgatgatgcaattaatgatgytgataggattgctaacgtagcaataaacgataaaaatgaagtggtgggcttttttgtattacatcgttactatcagcatgaaggttatgatacacctgaaaatgtcgtttatattcgttcattatcgattaatgaaaaatatcaaggttttggatatggcacgaaaataatgatgtcattgccgcaatatgttcaaggtgtatttcctgattttaatcatctatatctagtagtagatgcggaaaatgacaatgcttggaacctwtacgaacgtgctggattcatgcatacagcgactaaagaagaaggaccaattggcaaagaacgactatattacttggacttagattcaaaacatgtttcrtcattaaagcttgaagaagaaagtcgttcagaagtgaccaatgtacatatcattaatttaatgattgatggccaaaaggttggctttatcgcattggagcagattggtgaacgcatgaacattgctgctattgaagtggataaatcatatcgctttaatggtattggttcaagtgckctkcgacaattgccwacttacttaagaaaaaactatgacaaccttaatgtgattacgatgattctgtttggagagaataatgattttaaaccattatgtytaaatagtaatttcgttgaaatcgaacaaactgatgattatgtcgttttygaaaaatatttaaattactaa

SEQ ID NO: 2957 - DNA, 672 bp, Staphylococcus aureus
atgtcttataaagcatatccattctttagagatatattaataaatgaatgtatttatttcgcctctaaaaataaaaaactagtacgcctaaattataaaagtgaagcgtatgtaggcgtttggacagaagaaagtgtggccgtatcatttttaacaagtcgtgatattccatttgataaagttgtaaaaatggacgttgatcgttttgctacttatgaattagatgaattgtttgatgaacaagaccatattattatgaatcaaacaatggaagaagaagggcatctactaaacgttgtagctgttacacaagaagtgatgacggaattagataaaattagaatcaaagaatttgtccaagatgtagcraaatatgatgaagtatacggcttaactaaaaaaggtagtaagcagtttattctcattagtgaaaatgatagcgacgaaaaaaagccgcatattatgcctgtatggagtattaaaaacagagcgttaaaagttcgagatgaagattttgaagagtgtgatttaattacgattgaaggttctgttttcggagaatggctagatgaacttagagatgatcataaagccgttgcratagatttaaaaactggcgtggttggtacaattgtttcagcgcaaaaattgtctaatgaacttacattttaa

SEQ ID NO: 2958 - DNA, 1995 bp, Staphylococcus aureus
atgataggtaaaataataaatgaacgatataaaattgtagataagcttggcggcggtggcatgagtaccgtttatcttgcwgaagatacgatacttaacattaaagttgcaattaaggcgatttttataccacctagagaaaaagaagaaacattaaaacgttttgaacgagaagtacataactcatcacagctatcacatcaaaatatagtaagtatgatcgatgttgatgaagaagatgactgttactacttagtaatggaatatatygaaggtccgactttgtctgagtatattgaaagtcatgggccattaagtgttgacacrgcgattaattttacgaatcaaatattggatggyattaaacatgcgcatgatatgcgtattgtacatagagatattaagccacaaaatatattaattgacagcaataaaacgttgaaaatatttgattttggaattgctaaagctttaagtgagacgtctttaactcagactaatcatgtgttaggtactgtgcagtacttttcgccagaacaagcaaaaggtgaggcaacggatgaatgtacagatatttattctataggtattgtgttatatgaaatgcttgttggtgaaccaccmtttaatggagaaactgcagttagcattgcgattaaacatattcaggattctgtgccaaatgtgacaacmgatgtacgtaaggatattccgcaatctttaagtaatgtcattttacgcgctacagaaaaagacaaagcgaatcgttacaaaacaattcaagaaatgaaagatgatttgagtagtgttttacatgaaaatcgagcgaatgaagatgtctatgaactcgataaaatgaaaacgatagcggtaccwttgaaaaaagaagatctagcaaagcatattagtgaacataagtcgaatcaacctaaacgtgaaacgacgcaagtacctattgtaaatgggcctgctcatcatcagcaattccaaaagccagaaggtacsgtktacgaaccaaaacctaaaaagaaatcaacacgaaagattgtgctcttatcactaatcttttcgttgttaatgattgcacttgtttcttttgtggcaatggcaatgtttggtaataaatacgaagagacacctgatgtaatcgggaaatctgtaaaakaagcagagcaaatattcaataaaaacaayctgaaattrggtaaaatttctagaagttatagtgataaatatcctgaaaatgaaattattaagacaactcctaatacwggtgaacgtgttgaacgtggtgacagtgttgatgttgttatatcaaarggccctgaaaaggttaaaatgccaaatgtyattggtttacctaaggaggaagcmttgcagaaattaaaatcgttaggtcttaaagatgttacgattgaaaaagtatataataatcaagcrccaaaaggatacattgcaaatcaaagtgtaaccgcaaatactgaaatcgctattcatgattctaatattaaactatatgaatctttaggcattaarcaagtttatgtagaagactttgarcataaatcctttagcaaagctaaaaaagccttagaagaaaaaggrtttaaagttgaaagtaaggaagagtatagtgacgatattgatgagggtgatgtgatttctcaatctcctaaaggraaatcagtagatgaggggtcaacgatttcatttgttgtttctaaaggtaaaaaaagygactcatcagatgtcaaaacgacaactgaatcggtagatgtaccatacactggtaaaaatgataagtcacaaaaagttaaagtttatattaaagataaagataatgacggttcaacwgaaaaaggtagtttcgayattactagtgatcaacgtatagacattcctttaagaattgaaaaaggaaaaacagcaagttatattgttaaagtwgacggtaaaactgtagctgaaaaagaagtcagctatgatgatrtwtaa

SEQ ID NO: 2959 - DNA, 1194 bp, Staphylococcus aureus
atgacaaataatggtaatgagccgaacttaacgttaagtgatttatatgacaaagatgttgtctatacgtcaagaccttcgtatatatcgaatccatggttgaaaccggacgaacatcaatctaattttttaactggtagggagttattaatagcaaatcaattacctgttattgttcacgaagctagtgcgacagacaaattgcatcagctatttcaagttattggtaaggaagtaccgaactcaatttwtacatttaacaatcagcaatcttacgaaaacttgatyaaacaattggcacataaggaaaataaaaagatttattttcaatatattcatgatgaaacaatcttgaatcagcaatattatgcattagataaaacgttatttgttgctttaaataataaagcaagaatacctgaatggacaaatgggaagtttttaccaaaaagaaaagttgtaaaaattgagcaattcgaaaacgagattaagaattgggaattcccgttwgtaattaagccgggagatgatcttccgacagcaggtggctatggcgttatgatttgttatcatgatgcagatttacaaaaagcgataacgcgtattaaasaggcaactgctgaaacgaattcgcttattatcgaacagaagattgaagaaaaagcgaattattgcgttcagtttgcatactcggaatcgctaggyattcaatatcttggtgcggcaacgcaattaacggataagtacggattttataacggaaatgaaaatactactaatgtaccagagcacgttatagaagcaggtagacaaattatggaaaacggtgtgaatcaaggattctttggtgtagctggttttgacctactcgtcgatgaggatgataacgtttatgcrattgatttaaactttagacaaaatggttcaacgagcatgttattacttgctaacgagttgaattcaggatatcaaaagttttatagttatcattcaaaaggtgataacacacatttcttcaatacgattttgaaatatgtcaaagaaggtagtttatacccgttatcttattatgatggtgattggtacggtgaagataaagttaaatcaaggtttggctgtatttggcatggtgattcaaaagaaacagtactggagaatgaacgcgcatttttagctgaacttgaacactattag

SEQ ID NO: 2960 - DNA, 876 bp, Staphylococcus aureus
ttgaagacaggtcgaatagtgaaatcaattagtggggtatatcaagtagacgttaatggcgaacgtttcaatacaaaaccacgaggattatttagaaagaaaaaattttcaccggtagttggwgatatagtggaatttgawgtwcaaaacattaacgaaggytatattcatcaagtgtwtgagcggraaaatgagttgaaaagaccacctgtaagtaatatagatacactagtaattgtaatgagtgctgtcgarccaaatttttcaacgcaattattagatcgatttttagttattgcacattcgtatcagttaaatgcgagarttttggtgacwaaaaaagataaaacaccaattgaaaagcagttcgaaatwaatgagttgttgaaaatatatgaaaatattggctatgagactgaatttattggaaatgatgatgatcgaaaaaaaattgtagaagcttggycagctggacttatagtacttagtggtcaatcaggtgtcggtaagtccactttcttaaatcattatcgtccagaacttaatcttgagacaaatgatatatcaaaatcattaaatcgaggaaagcatactacaagacatgtcgaactattcgaacgtcaaaacggttatattgcagacacacctggattcagtgctttagattttgatcatatagataaagatgaaataaaagattattttcttgaattaaatcgatatggtgaaacatgtaagtttaggaattgtaatcatatcaaagaacctaattgtaatgttaagcatcaattagagatagggaatattgcgcaatttagatacgaccattatttacaactatttaatgaaatttcaaatagaaaggttagatattaa

SEQ ID NO: 2961 - DNA, 1185 bp, Staphylococcus aureus
atgagtgaaaaacaacaaattctcgattatatagaaacaaataaatatagttatatcgaaatcagtcatagaattcatgaacgtcctgaacttggtaatgaagaaatatttgcgtctcgaactttaatagatcgtttgaaagarcatgattttgaaattgaaaccgagattgctggrcatgcaactgggtttatagcgacatatgattcrgrwcttgacgggccagctataggttttttagcagaatacgatgctttgccaggrttgggtcatgcttgtggtcataatatcattggaactgcaagtgtkcttggtgcaattggtttgaagcaagtgattgaccaaattggtggtaaagtagtcgttctyggatgtccagctgaagaaggtggggaaaatggtagcgctaaagcttcttatgtcaaggctggtgtgattgatcaaatagacattgccttaatgattcatccgggaaatgaaacttataaaacgattgatactttggcagtggatgttttagatgttaaattttacggaaaaagtgctcatgcctctgaaaatgcagatgaagcgttaaatgcattagacgctatgattagttattttaatggtgtagcacaactacgacaacatattaaaaaagatcaacgtgtgcatggtgtgattttagatggcgggaaagcagctaatattattccagactatacacatgctcgtttttatactagagcaatgacgcgtaaagaattggatatattaacagaaaaagtaaatcaaatcgcacgtggagctgcgatacagactggttgtgattatgaatttggtcsaattcaaaacggtgtgaatgaattcattaaaacgccgaaattagatgatttatttgctaaatatgctgaagaagttggtgaagcagttattgatgatgattttggttatggctctacggatacagggaacgtaagtcatgttgtgccaacaatacatcctcatattaaaataggatcacgtaatttagtaggacatacgcatagatttagagargcrgctgcgagtgtacatggtgatgaagcattaattaaaggygctaaaataatggcgttgatggggttagagttaattacaaatcaagacgtttatcaagacattattgaagagcatgcgcatttgaaagggaatgggaagtaa

SEQ ID NO: 2962 - DNA, 645 bp, Staphylococcus aureus
atgacaaaactatatccatcattattatctgttgattttttggatttacaacatgaattaaaacgacttgaagaagcaggygtcgacggagttcattttgatgttatggatggtcaatttgtgcctaatatatctattggtttaccaatattagatgcagtaagaaaaggcacaacattacctatagacgtacatttgatgattgaaaatccagaaaagtatattgcatcatttgcagaacatggtgccgatatgatttcaattcatgtcgaatcaacgcctcatattcatcgtgctattcaaatgattaaacatttagataaaaaagctggtgtagtaattaatcctggtacaccaatatcacaaattgaacctattttagayattgttgattatgtaytagtgatgacagttaacccagggtttggtggtcaatcatttattgatcaatgcgtagaaaaaatagcgggtcttaatgctattaaaatggaacgtcaattaaactttgatattgaagttgatggaggcgtaaataccgatacagcgaaagtwtgtgttgaaaatggtgctacaatgctagtaacaggttcatttttctttaaacaagargattataaaaaagtcacacaagcattgaaaggttga

SEQ ID NO: 2963 - DNA, 351 bp, Staphylococcus aureus
ttgaacatactaagatatttattaggaataggttttagtrtaataggtgtattgcattttacacgagaacgacaatttagaaatatcataccgaaatgtttsmcrcttcgaaaaacagcggttcttgttacaggaatctttgagatattatttggacttgcacttttaattaaaagaccatctcaatgcttgaaaaatacaatcaatctattcttgctagctgtattcccagctaatatctatatggcagttaaaaagttacctttaggagataaacaattgccaacatggcaactatatttaaggttacctatgcagttcgtgttaatgggactaattaagaaattatag

SEQ ID NO: 2964 - DNA, 648 bp, Staphylococcus aureus
gtgtatatgcatataaatttattatgttctratcgacacttgccgcaagatatttgggccaaaagtaatgaaggtaaatggggcggcgttgatagaggtgctttgattttattgaagcatcaaattatcccttttttctcagtgggagactttgattcagtcagtaaagaagaacgccaacttctaacagaacagttacaaatcaaaccagttcaagctgaaaaagctgatacggatttagctttagcggttgataaagctgttgcacttggatttgatagtattacaatttatggtgcaacaggcggacgattagatcacttttttggggcaattcagttattattgaaaaaagcatattataaacatgatgttcatatagaagttatcgatcaacaaaataaaattgaattattgcctaaaggtcaacatacagttgaaaaagataagagttatccgtacatttcatttataccgatgactgatgatgtagaactttctctagcaggttttaaatataatttagctagacaaatgcttaatataggttctactttaactatttcaaatgaaattgagtctttgcaagcgaaagtaactgtacatgatgggttgattttgcaaattagaagtacagatttaaattaa

SEQ ID NO: 2965 - DNA, 1302 bp, Staphylococcus aureus
atgagaatgatagacattattgagaaaaagcgtgacggtcatacactaacaacggaagaaattaatttctttattgrcggctatgttaaaggggatattcctgattaycaagcrtcaagtttagcaatggcgatttatttccaagatatgaaygatgatgagcgtgcagcattaacgatggctatggttaattctggtgatatgatagatttgagtgatattaaaggtgtcaaagtagataagcactcaacaggtggtgtaggagatacaactacattggttttagcaccattagtagcagctgtagatgttcctgttgcaaaaatgagtgggcgtggattaggtcatacaggtggtacgattgataaattagaagcaattgatggttttcatgttgaaatagatgaagcaacatttgtgaaattggttaatgaaaataaagtggcagttgtaggacaatcaggaaatttaactcctgcagayaaaaaattatatgccttaagggatgttactggtactgtcaattcaataccattaattgcctcttcaattatgagtaaaaagattgctgctggtgcagatgcaattgtattagatgtaaaaactggtagcggtgcatttatgaaaacattagaagatgctgaagcattagcgcacgcaatggtacgtattggtaataatgtgggacgtaatacgatggcgattatttctgatatgaatcagccacttggacgtgcgattggcaatgcgcttgagttacaagaagcaattgatacgttgaaaggacaaggtccgaaagatttaacagaacttgtattaacattaggttctcaaatggttgtacttgcaaacaaagctgaaacgcttgaagaagcgagagcgttgctaattgaggcaattrattcaggtgcagcattagaaaaattcaaaacatttattaaaaaccaaggtggcgacraaacwgttattgaccatccagagcgtttgccacaagctcaatatcaaatygaatataaagctaaaaaatcaggttatgtgactgarttagtctctaacgatataggtgtcgcttcgatgatgttaggagcgggacgtttaacaaaagaggatgatattgatttagcggttggtattgttttaaataaaaaaattggtgataaagtagaagaaggagaatcattattaacgattcacagtaatcgccaagatgtagacgatgttgttaaaaaattagattcaagcataacaattgctgatyatgttgtatcgcctacattaattcataaaatmattayagartag

SEQ ID NO: 2966 - DNA, 1533 bp, Staphylococcus aureus
atgaaagaarttggrtttggcacactaaactgggttgccgttatcatwtatctactagctatgttrytcattggcgtttattttacyaagcgcgcgagccaaagtacsaatagtttctttacygcaagtggtcgcttgccatcttgggtagttggsttttcaatttatgcyactacrttaagtgcrattacrtttatgtckacaccagagaaagcatttttaacagattggtcatatatygcwggtaacatygctatcgtmgcaattattccattactyatttatttctatgtyccwttctttaaaaagttaaargtaacatcwgcatatgaatatytagaagcwmgwttyggmcctagcatwcgtgtyattggctcattattatttgtcgtttaycatytagggcgtgtwgcaatygttatctacttaccaacattagcratyacatctgtatcagacatgaacccttatatcgttgcatcactcgtwggtttactatgtattttatatacatttttaggtggwttcgaaggtgtggtttggagtgatttcattcaaggcgtcattytattaggcggcgctttagttatyatyattctwggtgttrtgaacattaaaggcggtttyggcactgtctttgcagatgcgattgagcacaaaaaattaattagtgcagacaattggaaactraatactgcrgcagctgccattccaattattttcctaggaaatattttcaacaayttgtatcaatacacrgcgagtcaagacgtcgtgcagcgttatcaagcttctgatagtttaaaagaaacaaataaatcgttatggacaaatggtatcctagctttaatttcagcmcccttattttatggtatgggtacaatgytgtattcattttatrcacatgaagctgttttaccaaaaggcttcaatacatcatctgtagtgccatatttcattttgactgagatgccaccatttgtagcaggattacttattgcagccattttcgcmgctgcacagtctaccatttcatctagtttaaattctatatctgcttgtatttcaatcgacattaagcaacgcttcttcggaaaagrtagcgarcgacacgaagttaactttgcacgtttcattatyatcattgcaggtattttcggttttggaatgtcactatacttaattgcttctaattcaaatgacttatgggatttattcttgtttgtractggattattcggygttccattrgctggtgtatttgcagttggtattttcactaaacgtacgaatacattcggtgttatttgtggattaatattgggtatcatctttgcttatgtctataatggtgttggcaaaggtaactcacctttctatgtatctaccatttcatttacagttgcttttgtctttgcttatatacttagcttcattgtcccttcaaaacataaaaaagatataacgggattaacaatttttgaaaaagataaaccatcaacatacatttcaaaaayggctacgaawaagtag

SEQ ID NO: 2967 - DNA, 408 bp, Staphylococcus aureus
atgacattagagatttcaaatgattacggtaaaattgatatttcaaacgaagtgattgcttcggttgtaggtggaaaggccgttgaatgttatggtattgtaggtatggcatctagacaacaagttagagatggtattgcggaaatactasgacatgaaaattatgctaaaggcatcaaagtaactgaaaataatggcgtagtggatatagatatgtacattatwgtaagtkayggtgtgaaaatakctsaaswtgccaatwatgyacaatcmacagtgaaatatwctttggaaarmtcactkmaygtmtcastwaatycmatcaatatatatgtmcaasgwgtrcgtgtraatmatmcakgcawgamagctwasgacgactcgaaaactgataactcacaattatga

SEQ ID NO: 2968 - DNA, 444 bp, Staphylococcus aureus
atgagtaatcaacaagatgttgtaaaagaattgaatcaacaagtagcaaactggacagtagcttayacaaagctacayaatttccactggtatgtgaaaggrcctaacttcttctcattacacgttaaatttgaagaattatataatgaagcaagccaatatgtagacgaattagctgaaagaattttagcggtaggaggaaaccctgtaggtacattaactgaatgcttagagcaatcaattgttaaagaagctgcgaaaggttactctgcagaacaaatggttgaagaattatcacaagacttcacaaatatctcaaaacaattagaaaacgcaatcgaaattgctggtaatgcwggcgatgatgtatcagaagatatgtttataggtatgcaaacatcagtagataaacataattggatgtttaaatcttacttaagctaa

SEQ ID NO: 2969 - DNA, 1647 bp, Staphylococcus aureus
atgattagcaaaattaatggtaaattatttgccgatatgattatacaaggggcacaaaatttatctaacaatgcagatttggtagattctttgaatgtgtatccagtgccagatggtgatacaggaacaaatatgaatcttactatgacttcaggtcgcgaagaagtagagaataatttgtcgaaaaatatcggcgaattaggtaaaacattctcgaaaggtttactaatgggtgcaagaggtaactctggtgtcatcttgtcacaattattcagaggattttgtaaaaatattgaaagtgaatctgaaattaattcaaaattgttagctgaaagttttcaagctggtgttgaaacggcatataaagctgttatgaaaccagttgaaggtacaatacttacagttgcaaaagatgctgcgcaagctgcaatagaaaaagcaaataatactgaagattgtatagaattaatggagtacattattgtaaaagccaatgaatcacttgaaaacacaccaaacttattagctgtacttaaagaagttggtgttgttgatagtggcggtaaaggtttgttatgcgtttacgaaggattcttaaaagcgcttaaaggtgaaaaagttgaagccaaagttgcaaagmtagataaagatgaatttgtacatgatgaacatgatttccatggtgtaattaatactgaagatattatttatggctattgtactgaaatgatggttcgttttggaaagaataaaaaagcctttgatgaacaagaattcaggcaagatatgagtcaatttggtgattctttattagtcattaatgatgaagaaattgtgaaagttcacgtgcataccgaatacccaggtaaagtgtttaattatggtcaacaatatggtgaattaattaaacttaaggttgaaaatatgagagaacagcaycgtgaagtgattcgaaaagaacagcacacagctaaaccgaaaatggaaacggttgaaacagcaattattactatttctatgggtgaaggtatttcagagatattyaaatcaatgggtgccacacatatcattagtggtggacaaacgatgaatccttctacagaagatatcgttaaagtcattgaacaatcaaaatgtaaacgtgcaattattttaccgaataataaaaatatyttaatggcaagtgaacaagcagcgagtattgttgatgcagaagcwgttgttattccaacgaaatctattcctcaaggtataagcgcactattccaatatgatgtggacgcaacacttgaagaaaataaagcgcaaatggctgattcagtaaataacgttaaatctggttcattaacgtacgctgttcgtgatacgaaaattgatggcgttgagattaaaaaagacgcgtttatgggcttgattgaagataagattgtaagcagccaaagtgatcaattaacaacggttactgagttgttaaatgagatgttagcagawgatagtgaaatattgactgtgattattggtcaagatgcagagcaagcagttacagataacatgataaactggatygaagagcaatatccagatgtagaagtggaagttcatgaaggtggacaaccaatttatcaatatttcttttcagtagaataa

SEQ ID NO: 2970 - DNA, 414 bp, Staphylococcus aureus
atgccaatcgtatattatgatggaaactgtatatattgttataactatgtcatytggttaattcaacatgacctaccaagaaattatcaatttrccacgttaaaaggtgaagttggmcaacaattttttaaacaacatccagaagcggcaaataaaaatagtgtgattttacagaaaggtgatygtatatattttgaatcgcaggcgattattaaactaatcacagcactacctaatcgaactaaattattgggcgtaggtttatggcttgtacctaaaccagtccgtaatttcggttatcgaatgtttgctrataatagaaatagaatgtggaaaacaacatggcaccaaccaaatgattatgaaaaatcgttctttttagatgataatgcgaaagtaaaacttactgattga

SEQ ID NO: 2971 - DNA, 2061 bp, Staphylococcus aureus
ttggctaaagtaaacttaatagaaagtccatattctcttttacaattaaaaggtataggtcctaagaaaatagaagtattgcaacaactaaatattcatacagtggaagatcttgttctttatttgccaactagatatgaagataatacagtgattgatttgaatcaagcagaagatcaatctaacgttacgatagaaggacaagtatatacagctccagtagttgcattttttggaagaaataawtcaaaattaacygttcatttaatggtaaataatattgctgtcaaatgtatttttttcaatcaaccgtatttaaaaaagaaaatcgaattaaatcaaactataactgttaaaggtaagtggaatagrgttaaacaggaaattactggtaatagggttttcttkaattcacaaggkacacaaactcaagaaaacgcagatgttcaattagaaccagtctatcgtattaaggaaggtattaaacaaaagcaaatacgagaccaaattagacaagcgttaaatgatgtgacaattcatgaatggttaactgatgaactaagagaaaaatataaattagagaccttggactttactttgaacacrttacatcatcctaaaagtaaagaggatttattacgtgctcgtagaacctatgcatttactgaactgtttttattcgaattacgtatgcaatggctaaatagattagaaaagtcatctgacgaagcaattgaaattgattatgrcwtagaccaagttaaatcatttattgatcgtttrccttttgaactaactgaagcacagaaatccagtgttaatgaaatttttagagatttaaaagcaccaatacgtatgcatcgattacttcaaggtgatgtaggttcaggaaaaacagtagttgctgcaatttgtatgtatgcgttaaaaackgctggttatcaatcagcattgatggtaccaactgaaattttagcagagcaacatgctgaaagtttaatkgctttatttggagattctatgaaygttgcrttgttaactgggtcagtaaaaggtaagaaacgaaaratacttttagaacaacttgaaaatsgtacgattgattgtttaattggaacccatgcwttgattcaagatgatgtgattttccataatgttggtttagtaattacagatgaacaacatcgatttggtgtgaatcaacgccarcttttaagagaaaaaggtgcaatgacgaatgtgttatttatgacagcaacsccgataccaagaacactagcaatatcagtttttggtgagatggatgtgtcttcaattaaacaattaccaaaaggtcgtaaacctatcattactacttgggcaaagcatgagcaatacgataaagttttgatgcaaatgacctcagagttgaaaaaaggtcgtcaagcatatgtyatttgcccgctwatagaaagttctgagcatctcgaagatgttcaaaatgttgtcgcattgtacgagtctttacaacagtattatggtgtttcccgtgtagggttattgcatggtaagttrtctgccgatgaaaaagatgaggtcatgcaaaagtttagyaatcatgagataratgttttagtttctactactgttgttgaagtaggtgttaatgtaccgaatgcaacttttatgatgatttatgatgcggatcgctttggattatcaactttacatcagttacgcggtcgtgtrggtagaagtgaccagcaaagttactgtgttttaattgcatcccctaaaacagaaacaggaattgaaagaatgacaattatgacacaaacaacggatggatttgaattgagtgaacgagacttagaaatgcgtggycctggagatttctttggtgttaaacaaagtggrttgccagatttcttagttgccaatttagttgaagattatcgtatgttagaagttgctcgtgatgaagcagctgaacttattcaatctggcgtattctttgaaaatacgtatcaacatttacgtcattttgttgaagaaaatttattacatcgyagttttgactaa

SEQ ID NO: 2972 - DNA, 1374 bp, Staphylococcus aureus
atgacagcagaaacgaattatttttggttgaattgtggatataaccgttggaatcataatgaaccgttagtaggacaaacagctttatttgaatcaggcgcacattttaayccatctcaaggatttagagcgtttaaaaaggctaaagtaggagatcaagtcatcttttatcaagttcagacggatactggactacttggatgtggtgaaattattagtgttgaaacaggtgcacaaaataaaatacgtgtacagtttcgttttaatgaacaattgaaaccattaacagcwgattatttaaagcgtagtgaagctttggaatttcgtatragtaatatgaaagagacattgttcaaycaaatcactgcagaagagtttgatttaataagtggtcttggtaaaggcgaaattaagataccrcgttatttctttttagctgaaactgaagaatttgaacctggaaaccaatatacgatttatacgcacacgtacaacggtattaaacgtaatggttatcatttttatactcagttagaagaaggcgacaatattattttttataatcgaacgaaaaatcaatctgtcgttggaattggagaagtwtcaaagcatattcatgaaaaaccaccaattcctggtagaacaaatagtacagtgattgaagtgtcttatgagaaagacattacrccgattacattaagtacattaaataagcatcctaaattgaaaaayttatatttccttcaagaaaatgcaaaacaggctattgcaagtatgtcacaagcacagtatgatgcaattattgaaatgagcgataataatggattgaaatctccatttgaaatggttmaaaaaccagatatgcttgaaagtgaaaaagaagaagcgttaaagccatttattttacttgttgtagatcgaaaagargarggcttaaaagcggctaatgacttattgcaaaaagcgaatgcaaatcctgttataacaacaggtcatcctgatttttcagaagatatgctttatggcaagtatttaccaaatgaaacaggggcattatactatcgtgaaggrtttattactcaattaatgcctaaaaaggataaaagttatttagttattgataattttaatcgtatagatacagacattttccaaacgtatattaatgtgttagaaggctatgargtaacattaccacgttataataaagacggtaatatgattaaatggtcacgacaaaaagattctttctattatttcaatcctaattggcatattgtaggtattacatatgayagtttagaggaaattaaggagaaatattcagagcagtttttaaaatacacacgtatagtcaaagtcaaacatgactaa

SEQ ID NO: 2973 - DNA, 573 bp, Staphylococcus aureus
atgaggggtgagacgttgaaactaaagaaagataaacgtagagaagcaatcagacaacaaattgatagcaatcccttcatcacagaccatgaactaagcgacttatttcaagtgagtatacaaacaattcgtttagatcgcacttatttaaacataccagaattaaggaagcgtattaaattagttgctgaaaaraattatgaccaaataagttctattgaagaacaagaatttattggtgatttgattcaagtcaatccaaatgttaaagcgcaatcaattttagatattacatcggattctgtttttcataaaactggaattgcgcgtggtcatgtgctgtttgctcaggcaaattcrttatgtgttgcgctaattaagcaaccaacagttttaactcatgagagtagcattcaatttattgaaaaagtaaaattaaatgatacggtaagagcagaagcacgagttgtaaatcaaactgcaaaacattattacgtcgaagtaaagtcatatgttaaacatacattagttttcaaaggaaattttaaaatgttttatgataagcgaggataa

SEQ ID NO: 2974 - DNA, 240 bp, Staphylococcus aureus
gtgaatgatttgaagcaatttctatatattgcgttagtatgtggtgtgatagcaggtcttggtgctttcttacatataccgcagtatccgagcatgacaattccacgtatagtrgctattttaggaattatcagtgctatgttgacttttaaagacaagcaaatcagcgcctcattaaagtttagcgcattgttaattaatgtgctgccattatgcggtacctttgtagcttcaaattaa

SEQ ID NO: 2975 - DNA, 987 bp, Staphylococcus aureus
atggttaaattagcaattgatatgatgggtggcgacaatgcgcctgatatcgtattagaagccgtacaaaaggctgttgaagactttaaaratctagaaattatrcttttcggtgacgaaaaaaagtataatctgaaccatgaacgaatcgaatttagacattgttctgaaaagattgaaatggaagatgagcctgttagagcgattaaacgtaaaaaagatagctcaatggtaaaaatggctgaagctgtgaaatctggtgargcagatggatgtgtgtcagcaggtaatactggtgctttaatgtcagytggtttattcattgttggacgtattaaaggtgtagctagaccggctttagtagtaacattgccaacgattgatggaaaaggttttgtmtttttagacgttggtgcaaatgctgatgctaarcctgaacacttattacagtatgcgcaactaggggatatttatgctcaaaaaatyagaggtattgataatccgaaaatctcattattaaatataggwaccgagccagctaaaggtaatagtttaacgaaaaaatcatwtgagttattaaatcawgatcattcattgaattttgttgggaatattgaagcgaagacattaatggatggcgatacagatgttgtagttaccgatggctatactgggaacatggtccttaaaaatttagaaggtactgcaaaatcaatcggtaaaatgttaaaagatacgattatgagtagtactaaaaataaawtagcaggtgcaatattgaagaaagatttagcwgaattcgctaaaaagatggattactcagaatacggtggttcmgtattattaggattggaaggtacygtagttaaagcacacggtagttcaaatgctaaagctttttattctgcaattagacaagcraaaatmgcaggagarcaaaatattgtacaaacaatgaaagagactgtaggtgaatcaaatgagtaa

SEQ ID NO: 2976 - DNA, 939 bp, Staphylococcus aureus
atgccattatttttacaaccaattttaaaaacaaaattatggggcggtcaacgtctaagtgagtttggatatcaattagacaatgatacaactggggaatgttggtgtgtgtcagcacatccaaatggtacgagcgagattattaatggaccatatcaaggtcaaacattagaccgtatttggtcagaacatcgtgaattgtttggtgatttcccaagcaaagattttccgcttctaactaaaatagtggatgcaagagaatcactttctattcatgtgcaccctgataattcttatgcttwtgarcatgaaaaygggcaatatggcaaatctgaatgttggtatattatagatgcwgaagaagatgcagaaatagttatagggacwttagcagagtctagagaagaagttgcgaatcatgttcaacacggaacgatagagtcgatacttagatatattaaagtaaaacctggagaattctattttattccagcaggaacagtacatactatttcttcaggaataytagcatacgaaacgatgcaatcgtcagacattacatatagactttatgatttcaatcgtcaagataatcaatataatgrtagaccgttaaatattgaaaaagctttagacgttattcagtacaatgcaccattacctaatattttgcctgaaagygaaattattgaraaccataagtgtacacacattgtatcgaatgatttctttacattggttaaatgggaaatttctggcacgttaaattatatgaagcctagagagttctgtttagttacagtgttggaaggygaaggrcaaatgattgtcgatggtgaaattttcaaactgactactggtacaaactttattttgacttctraagatttggatagtgtctttgaaggygatttcacattgatgattagctatgtgtaa

SEQ ID NO: 2977 - DNA, 936 bp, Staphylococcus aureus
gtgaatcaaatgagtaaaacagcaattatttttccgggacaaggtgcccaaaaagttggtatggcrcaagatttrtwtaayaacaaygatcaagcaactgaaattttaacttcagcagcraasacrttagactttgatattttagagacaatgtttactgaygaagaaggtaaattgggtgaaactgaaaacacrcaaccagctttattgacgcatagttcggcattattagcagcrctaaaaaatttgaatccygattttactatggggcatagtttaggtgaatattcaagtttagttgcagctgacgtattatcatttgaagatgcagttaaaattgttagaaaacgtggtcaattaatggcgcaagcatttcctwctggtgtaggaagyatggctgcagtattgggmttagattttgataaagtygatgaaatttgtaagtcattatcatctgatgacaaaataattgaaccagcaaacattaattgcccaggtcaaattgttgtttcaggtcacaaagctttaattgatgagctagtagaaaaaggtaaatcattaggtgcaaarcgtgtcatgcctttagcagtatctgghccattccattcatcgctaatgaaagtgattgaagaagatttttcaagttayattaatcaatttgaatggcgtgatgctaagtttcctgtagttcaaaatgtaaatgcgcaaggtgaaactgacaawgaagtaattaaatctaatatggtcaarcaattatattcaccagtacaattcattaactcaacagaatggctaatagaccaaggtgttgatcattttattgaaattggtcctggaaaagttttatctggcttaattaaaaaaataaatagagatgttaagttaacatcaattcaaactttagaagatgtgaaaggatggaatgaaaatgactaa

SEQ ID NO: 2978 - DNA, 666 bp, Staphylococcus aureus
atgaatattttggttataggtgctaatggcggtgtaggttcgttactagtgcaacaattagcaaaagaaaatgtaccatttactgcwggtgttaggcaatcmgatcaacttaatgcgttaaaatcacaaggtatgaaagcaattcttgttgatgttgaaaatgattcaatagagactttaactgagacgtttaaaccattcgataaagttatcttttcagtaggttctggagggaayacgggtgcagataaaacaattattgtcgatttagatggtgctgttaaatcaatgattgcgagtaaagaggcyaatattaaacactatgtcatggtttcaacatatgattcgagacgtcaggcttttgatgatagcggtgatttaaagccatatacaatwgctaaacattacgctgatgactatttaagacgttcaggtttgaattatacaattttacatccaggggcacttacaaatgcagcaggatctggaaagatagaagcwgcacaatattttgawggtaaaggtgaaattcctagagaagatgttgcgacagtattaaaagaaattgtcacatccaatcattttaatcaccaagagtttcaaattattagtggtgabcaggacattaaagatgcttwaactcaatttgaaawtgaaamggattaa

SEQ ID NO: 2979 - DNA, 735 bp, Staphylococcus aureus
atgactaagagtgctttagtaacaggtgcatcaagaggaattggacgtagtattgcgttacaattagcagaagaaggatataatgtagcagtaaactatgcaggcagcaaagagaaagctgaagcagtagtcgaagaaatcaaagctaaaggtgttgacagttttgcgattcaagcaaatgttgccgatgctgatgaagttaaagcaatgattaaagaagtagttagccaatttggttctttagatgttttagtaaataatgcaggtattactcgcgataatttattaatgcgtatgaaagaacaagagtgggatgatgttattgacacaaacttaaaaggtgtatttaactgtatycaaaaagcaacaccacaaatgttaagacaacgtagtggtgctatcatyaatttatcaagtgttgttggagcagtaggtaatccgggacaagcaaactatgttgcaacaaaagcaggtgttattggtttaactaaatctgcggcgcgtgaattagcatctcgtggtatcactgtaaatgcagttgcacctggttttattgtttctgatatgacagatgctttaagtgatgagcttaaagaacaaatgttgactcaaattccgttagcacgttttggtcaagacacagatattgctaatacagtagcgttcttagcatcagacaaagcaaaatatattacaggtcaaacaatccatgtaaatggtggaatgtacatgtaa

SEQ ID NO: 2980 - DNA, 204 bp, Staphylococcus aureus
atgatcgtgtatcaacgaaagattaatatcgatacacttaaagaatttgggtgtgggtgtgtatatagtgaaagaataagtggtgtcaaacgtacagagcttgttaagtgtttagattatttacgagagagcgacacattagttgtctatcaacttgatcggttaggtagaacgacaaaactattaattgaattatcacaatga

SEQ ID NO: 2981 - DNA, 234 bp, Staphylococcus aureus
gtggaaaatttcgataaagtaaaagatatcatcgttgaccgtttaggtgtagacgctgataaagtaactgaagatgcatctttcaaagatgatttaggcgctgactcacttgatatcgctgaattagtaatggaattagaagacgagtttggtactgaaattcctgatgaagaagctgaaaaaatcaacactgttggtgatgctgttaaatttattaacagtcttgaaaaataa

SEQ ID NO: 2982 - DNA, 1137 bp, Staphylococcus aureus
gtgagcgtaaatgcacgtgatttattagtattacacactaatgtaaatagattggttggagaagagatatttgctaataagtgccttgctaataatgatgttcaaattatgaattcaataaaaaaattaattgaagctgagttattaacaacgactaatgattttgaagttagtatatataaaaagacaagacctgaattacaaagtattttaaaaagttttggtataaaaacaacaggtaataaacctgacttaattaaacgtattgacgacaattttcatattattaataacttagatttaccatatgtatatataccaaytaagaaaggagaagaaattttaaagaaaacagagtacttaacctcttttatacaaagttatggtgaaatttctcttgagcgtgcttattatttggttgaaaactatatagatgaaaattgcgatgataaagttgcagaaatatacaagtttgaatttcaaagaaaatatgacaatggcgagtttgattttaatcatggatataatttcgaattgaatatgttgatagatcactataaaagagatgtaaaagactacgataatgccagaaagtattcaaatatttatctttactttggtttgagagatttcttaaaaaaattaatgagtaattattcatattacgatagtaaagggaatatagatttgaacgaaatacaaaacgatctgaatagatttatcaactctagcgcttctggtatgtacgagcgattaatatataatgaaaatttatccaataatattatgtttgaattatttaaaaaggacacacaagattatagtgatttggaagaacaattgattgaaaagttcataaactatgtagtgtctaatgtaaaaaaagaaagtaggagtaatactcttatagagttatcaaaaattttagagaacggatatacaattgataaagaagaatttaaaaaagaagatgattatctttctaagtacatatttactgacatagattatttgaaaaagttagaatcaaaaataaacgttgctattgatattcgaagtggagaaattcatttggtattagatgatgatagccttgatatattaatacaaaatcaaaaatacggcaatgagttttga

SEQ ID NO: 2983 - DNA, 732 bp, Staphylococcus aureus
atgtctaaacaaaagaaaagtgagatagttaatcgttttagaaagcgctttgatactaaaatgacagagttaggctttacttatcaaaatattgatttataccaacaagcattttcgcattcgagttttattaatgattttaatatgaatcgtttagaccataatgagcgtttagagtttttgggtgatgcggtattagaattgacggtttcacgatatttatttgataaacatcccaacttgccagaagggaatttaacaaaaatgcgtgccactattgtatgtgagccctcacttgtaatatttgcgaataaaattggattgaacgaaatgattttacttggtaaaggtgaagagaaaacagggggacgtacaagaccatcattaatatcagaygcattcgaagcatttattggggcattgtatttggatcaaggactagatatagtttggaaatttgctgagaaagtyattttcccacatgtagaacaaaatgagttattaggcgtggtagattttaaaacacaattccaagaatatgtgcaccagcaaaataaaggtgatgtaacctataatttaataaaagaagagggaccggcacatcatcgtctattcacttcagaagttattctgcaaggggaagcaatagctgaaggtaaagggaaaacgaaaaaagaatcagaacaacgygctgctraaagtgcctataagcaattaaarcaaattaaatag

SEQ ID NO: 2984 - DNA, 828 bp, Staphylococcus aureus
atggatggwacaattttacatgaaaataatcaagcatcamcgtatacgaaagatgtcattaatcrattgagagagaaaggatataaagtatttttrgcracwggacgttcgcattctgaaatacatcaacttgtacctsaagattttgcggtwaatggcatcattagttcaaatggaacmattggagaagtagatggagaaattatcttcaarcatggtttatcattggctcaagtgcaacaaattaytaatttagctaagcgccaacaaatttattatgaggtatttccttttgaaggtaatagagtttctttaaaagaagatgaaacatggatgcgagatatgattcgtagtcaagatcctattaatggcgtaagtcatagtgaatggtcttcaagacaagatgcgcttgctggtaagatagattgggtaactaagtttcctgaaggtgaatattcaaaaatttatctrttcagttctaatttagaaaaaataacagcatttagakatgaattaaagcaaaatcatgtgcaactacagattagtgtttcaaattcatcaagatttaatgcggaaacaatggcttatcaaactgataaaggtacaggcattaaagaaatgattgmacattttggyatymatcaaraagaaacgttagttattggagatagcgacaatgatagagcaatgtttgaatttggycattayacagtygctatgaaaaatgcacgycctgaaatccaagcattaacttcagatgtaacggcwtayacgaatgaagaggatggcgcagcaaaatatttagcaragcattttttagctgawtaa

SEQ ID NO: 2985 - DNA, 633 bp, Staphylococcus aureus
ttgstttgcgaggtwatagctatatacaaaaatcccaaatatagaattattaaatataatgatgaatatttgatggtgaatataataaataattggttagttttattyattccattgcttaattggttgacaccaaaaagatacatcaagatcagtcaagaagaattagaaartttaaatactttcaaacctgctaaaaacaatgcattttggccagcattaggtagttcagttttatttagtgtgacttttagaaagtatatgcctttatttaatgttagattggaaaaaacaatagtaatagccatattttttgttgtatttcttggtattttatttttctacctaaatttaaatcgtaggytagcattaagtgtttttactatgaataaagaaaaaagtcagaaaatgatattrctacctaatttaaaacattttttctttataatatttgcatatttatatttcggtggtttttcatttttcactttatatgccctgataactatagatgttcaaaatataattatatttatctgttggggtgcagtaactatgtttttcttttttataaacattgttcccattggcattaaaaaagctcatgtaatacttcttaaaaaagctgaataa

SEQ ID NO: 2986 - DNA, 3567 bp, Staphylococcus aureus
atggtttatttaaaatcaatagatgccattggatttaagtcttttgcagatcaaaccaatgttcaattcgataaaggtgtractgcaattgttggtccaaatggaagcggtaaaagtaatattacagatgctattaaatgggtgttgggtgaacaatcggctaaatcattacgtggctcaaaaatggaagatattatcttctcaggtgcagaacatcgcaaagctcaaaattatgctgaagtacagttaagattagataatcattctaaaaagctcagtgttgatgaaaacgaagttattgtaacaagaagattgtatcgaagtggtgaaagtgagtactacataaataatgaccgtgcaagattaaaagatattgccgatttatttttagattctggattgggraaagaagcrtatagcattatctcgcaaggtagagttgatgaaatactaaatgctaaaccaattgatagacgtcaaattattgaagaatcggctggtgtacttaaatataaaaaacgtaargctgaatcattaaataaacttgaccaaacagaagataatttaacgagagtagaagacattttatatgatttggaaggtcgygtagaacctctaaaagaggaggcagctatagctaaagaatataagacactttcacaycaaatgaaacatagtgacattgtagttacagtgmacgatattgatcaatatacaaatgacaatagacaattagatcaacgtttaaatgatttacaaggycaacaagcaaataaagaagctgacaarcaacgtttaagccaacaaattcaacaatataaaggtaarcgwcatcaacttgataaygatgttgaatcgcttaattatcaattagtaaaagctacggaagcctttgaaaaatatacgggacaattaaatgttttrgwagaacgtaagaaaaatcaatctgaaacaaatgcacgatatgaagaagaacaagaaaatttaatkgagcttttagaaaatatatcaartgagatttctgragctcaagatacttataagtctctgaaaagtaaacaaaaagaactcaatgctgtcattcgtgaacttgaagaacaactwtatgtttcagacgaagcacaygatgaaaaattggaagaaattaaaaacgaatactatacattaatgtcagagcaatcagatgttaacaatgatattcgttttttaaagcatactatagaagagaatgaggytaaaaaatcaagactagattctcgattagttgaagtytttgagcaattgaaagatattcagggtcaaataaaaacgacwaaaaaagaatatcaacagaccaacaaagaactttctgctgtagataaagaaattaaaaatatagaaaaagayctcactgatacaaaaaaagcacaaaaygaatacgaagagaaattgtatcaagcatatcgatataccgaaaaaatgaaaacacgtattgatagtttggcaacgcaagaggaagaatayacttattttttcaatggcgtcaaacatattttgaaagctaaaaataaagaattaaagggtattyatggtgcagttgcggaaattattgatgtgccatctaaattaactcaggcaattgaaacagcattaggtgcttcattacaacatgtcattgtagattcagaaaaagatggacgccaggctattcaatttttaaaagaacgtaatttaggtcgtgcgacgtttttaccattaaatgttatacagagtagagyggtagcgactgatattaartctattgctaaagaggcaaacggatttattagtatygcttcggaagcagtkaaagtagcaccagaatatcaaaatattatcgggaatttattaggtaatacgattatcgttgatcatttaaagcatgcaaatgaattggcacgtgcgattaaatatcgaactcgtattgttactttggaaggtgatattgtaaaycctggtggttctatgactggtggtggcgctcgtaagtcmaaaagtattctgtctcaaaaagacgagttgacaacaatgagacaccaattagaagattacttgcgtcaaacagaatcatttgaacaacaatttaaagagttgaagataaaaagtgatcaattaagtgaactgtattttgaaaaaagtcaaaagcataatacacttaaagagcaagtgcatcattttgaaatggagctcgatagattaactacacaagaaacacaaataaaaaatgatcatgaagaattygaatttgaaaaaaatgatggttatacgagtgacaaaagtcgacaaactttgagtgaaaaagaaactyatytagaaagtattaaagcatctttaaaacgactagaagatgaaattgaacgctacacaaaactttctaaagaaggtaaggaaagcktwactaaaacacaacaaacsttacatcagaaacaatctgatcttgctgtggttaaagagcgtattaaaacacaacaacagacaatagatcgattaaataatcaaartcaacaaacyaaacatcaattaaawgatgttaaagaaaaaatwgcattstttaattcggatgaagtgatgggcgaacaagcttttcaaaatattaaagatcaaattaatggtcaacaagaaacgagaacacgcttatcwgatgaattagataaattgaaacarcaacgtattgwgttgaatgawcaaatcgatgcgcargaagctamactacaagtttgtcaccaagatattttagctatcgaaaatcactaccaagatattaaagctgaacaatcaaagytagatgtattaattcatcatgcgatagatcatttaaatgatgaatatcaattgactgttgaacgtgcraaatctgaatatacgagtgatgaatcgattgacgcattacgtaaaaaagttaarttaatgaagatgtcgattgatgaactaggtcctgtaaacttaaatgcaattgaacaatttgaagagttaaatgaacgttatacatttttaagtgarcaacgtacagatcttcgtaaagctaaagaaacattagagcaaattataagtgaaatggatcaagaggttactgaaagatttaaagaaactttccatgctattcaaggacattttacagctrtgttcaaacaattgtttggtggaggcgatgcagaattgcaattaactgaagccgattatttaacagctggtattgatattgtggtacaaccaccgggtaaaaagttgcaacatttatcgttactragtggtggtgagcgtgcattaactgctattgctttactatttgcaattttaaaagtaagatctgcaccttttgttatattagatgaggttgaagctgcaytagatgaagcraatgttattagatacgcaaaatatttaaatgagttatcagacgaaacacaattcattgttattacacaccgtaaaggaacaatggaatttgcrgataggttatacggtgtaacaatgcaagaatcaggtgttactaaacttgtgagtgtgaatttaaatacaatagatgatgtgttgaaggaggagcaataa

SEQ ID NO: 2987 - DNA, 783 bp, Staphylococcus aureus
atgttaattcaattagatcaarttgggcgaatgaagcaaggaaaaacaattttaaaaaakatttcttggcaaattrmtraaggtgataaatggatwytatatggkttraatggtgctggyaagacaacrctwytaaatatwttaaatgcrtatgagcctgcracawctggmdvtgttaayctwttyggtaaaatgccmggcaaggtagggtattctrcagaractgtacgacaacatataggttttgtatctcatagtttactggaaaagtttcaagagggtgaaagagtaatcgatgtrgtgataagcggtgcytttaaatcaattggtgtttatcaagatattgatgawgarrtacgtaatgaagcacatcawttacttaaattagttggaatrtctgctaaagcrcaacaatatattggttatttatctacmggtgaaaaacaacgagtgatgattgcrcgagctttaatggggcaaccycaggttttaattttagatgagccagcagctggtttagactttattgcwcgwgartcrytrttrartatacttgactcattgtcagattcatatccaaygcttgcgatgatttatgtkacgcactttattgaagaaatwactrstaactttwcyaaaattttrctrytaaaagatggssaaagtrtwcaacaaggvkywrtagawgayatwttracwtctgaaaacatgtcacgatttttccagaaaaatgtagcagttcaaagatggaataatcgattttctatggcratgttagagtaa

SEQ ID NO: 2988 - DNA, 2610 bp, Staphylococcus aureus
atgttaactatacctgaaaaagaaaatcgtggatcgaaagaacaagaagtggcaattatgattgatgctctagctgacaaagggaaaaargcattagaagcattatctaaaaagtcacaagaagaaattratcatattgttcatcaaatgagcttagcagctgttgatcaacatatggtgctagcaaaattagcacatgaagaaactggaagaggtatatacgaagataaagcgattaaaaatttatacgcttctgaatatatatggaattcaataaaagacaataagacagtagggattattggtgaagataaagaaaaaggattaacgtatgtagcggaaccaattggtgttatttgtggtgttacgccaacaacaaatcctacgtcgacaactatttttaaagcgatgattgcaattaagacaggaaatccaatcatttttgcattccatccaagtgcrcaagaatcgtcgaagcgtgcagcagaagttgtattagaagcggcaatgaaggcaggtgcacctaaagatattattcartggattgaagtgccytctatcgaagcaacaaaacaattaatgaatcacaaaggtattgcattagttctagcaacaggtggttcgggcatggttaagtctgcatattcaactggcaaaccggcattaggtgtgggaccaggtaacgtgccgtcttacattgaaaaaacagcacacattaarcgtgcagtaaatgatatcattggttcaaaaacatttgataatggtatgatttgtgcttctgaacaagttgtagtcattgataaagaaatttataaagatgttactaatgaatttaaagcacatcaagcatactttgttaaaaaagatgaattacaacgcttagaaaatgcaattatgaatgaacaaaaaacargtattaarcctgatattgtcggtaaatctgcagttgaaatagctgaattagcaggtatacctgtccccgaaaatacaaaacttatcatagccgaaattagcggtgtaggttcagactatccgttatctcgtgaaaaattatctccagtattagccttagtaaaagcccaatctacaaaacaagcatttcaaatttgtgaagacacactacattttggtggattaggacacacagccgttatccatacagaagatgaaacattacaaaaagattttggactaagaatgaaagcttgtcgtgtacttgtaaatacaccatcagcggttggaggtattggtgatatgtataacgaattgattccgtctttaacattaggttgtggttcstacggtagaaactcaatttcacataatgttagtgcgacagatttattaaacattaaaacrattgctaaacgacgtaataatactcaaattttcaaggtgcctgctcaaatttattttgaagaaaatgcaatcatgagtctaacaacaatggacaagattgaaaaagtgatgattgtctgtgaccctggtatggtmgaattcggttatacaaaaacagttgagaatgtattaagacaaaraacggaacagcctcaaatwaaaatatttagcgaagtcgaaccgaacccatcaackaatacagtatataaaggtctggaaatgatggttgatttccaaccrgatacaatcattgcacttggtggtggttcagcgatggatgctgcaaaagcaatgtggatgttctttgaacaccctgagacatcattcttcggtgctaaacaaaagttcctagacatcggtaaacgtacttataaaataggcatgcctgaaaatgcgacgttcatttgtatccctacgacatcaggtacaggttcagaagtaacaccatttgcagttatcacagatagtgaaacaaatgtaaaatatccgttggctgattttgctttaacacctgaygttgcaattattgaccctcaatttgtgatgagtgtgccaaaaagcgttacagcagatacaggaatggatgtactaacgcatgcaatggaatcatatgtatctgtaatggcttcagaytayacaagaggtttgagtctacaagcgattaaattgacgttcgaatatttaaaatcatctgttgaaaarggtgataaagtttcaagagagaaaatgcataacgcatcaactttggctggtatggcatttgcaaatgcattcttaggcattgcacactcaattgcrcataaaattggtggsgaatatggtattccgcatggtagagcgaatgcgatattactaccgcatattatccgttataatgccaaagacccgcaaaaacatgcrttattccctaaatatgagttcttcagagcagatacagattatgcagatattgccaaattcttaggattaaaaggkaatacgacagaagcactygtagaatcattagctaaagctgtctacgaattaggtcaatcagtcggaattgaaatgaatttgaaatcacaaggtgtgtctgaagaagaattaaatgartcaattgatagaatggcagagctcgcatttgaagatcartgtacaactgctaatcctaaagaagcrctaatcagtgaaatcaaagatatcattcaaacatcatatgattataagcaataa

SEQ ID NO: 2989 - DNA, 882 bp, Staphylococcus aureus
atgaacaaagatttaaaaggtttatatgcagcgttactcgttccttttgatgaaaatggtcaagtaaatgaacaaggactyaaacaaattgctcaaaatgccattgaaactgaagaattagacggtctttatgtaaatggtagctcaggcgaaaactttttattaaatacagarcagaagaagcaagttttcaargttgccaaagaggcagttggggataaagtgaaattgattgctcaagtaggttcgttagatttaaatgaagccattgaactyggaaaatatgccacagaactcggttatgatgcactttctgccgtaacaccattctactatccatttacttttgaagaaattagagattactatttcgatattatcgaagcaacwcagaacaatatgattatttatgcaataccagatttaacaggtgtgaatatttctattgaacaattcagcgagctwtttaatcaygaaaaaattgttggtgttaaatatacagcgccraacttcttcctactcgaacgtattagaaaagcattcccagacaaattaatcttatctggctttgatgaaatgttagttcaagctacgatttctggcgtagatggtgcaattggttctacatataacgttaatggtcgccgygcwagaaaaatcttcgacttagcamgacaaggtcaaattcaagaagcttaccaactrcaacatgattcaaacgacatyatcgaaacagtgttatcaatggggatttatccaacattgaaagaaataytacgtcaycgtgrcattgatgcaggattaccgaaamgwccwttcaaaccttttaacgaagcacatcgacaaacattagatcaactcattgcaaaatacgatttatag

SEQ ID NO: 2990 - DNA, 1251 bp, Staphylococcus aureus
atgagcttttttaaacgcttaaaagataagtttgcaacaaataaagaaaatgawgaagttaaatccttaasagaagaacaaggtcaagacaaattagaagatacacattctgaargttcaacgcaggacgyaaatgatttagcagaaaatgctgaagtgaaaaagaagccacgcaagttgagtgaagcggattttgatgacgatggcttaatatcaattgaagattttgaagaaattgaagctcaaaaaatgggtgctaaatttaaagcaggactcgaaaaatctcgtcaaaatttccaagaacaattaaataatttgatakcgagatatcgtaaagtagatgaagacttttttgaagctttagaagaaatgttaatcactgcagacgtcggttttaatacagtgatgacgttaactgaagaattacgtatggaagcacaacgacgtaatattcaagatactgaagatttgcgtgaagtcattgttgaaaaratcgtagagatttaccatcaagaagatgataattcagaagctatgaacwtagaagatggtcgtttaaatgtcattttaatggtyggtgtgaatggtgttggtaaaacaacaacaattggaaaattagcttaccgatataaaatggaaggtaaaaaagtaatgttagctgcgggcgatacttttagagcgggtgctattgatcaattgaaagtttggggcgaacgtgttggtgtagaygtaattagccaaagtgaaggttctgatccagctgctgttatgtatgatgcgattaatgccgctaaaaacaaaggtgttgatattttaatctgtgataccgctggacgtttacaaaataaaacaaatctaatgcaagaattagaaaaagttaagcgtgtaattaatcgagcagtgccagatgcgcctcatgaagcattactatgtttagatgctacaactggtcagaatgcgttgtcacaagctagaaactttaaagaagtaacaaatgttacaggtattgtattaacgaaattagatggtacagccaaaggtggtatcgtattagccattcgtaatgaattgcacatyccagttaaatatgtaggtttaggtgagcaattagatgacttacaaccatttaaccctgaaagttatgtctacggcttattcgctgatatgattgaacaaaatgamgaaataacaacagttgaaaatgatcaaattgtaacagaagaaaaggacgataatcatgggkcaaaatga

SEQ ID NO: 2991 - DNA, 1806 bp, Staphylococcus aureus
atgtgtggaattgttggttatattggctatgataatgccaaagaattattattaaaaggtttagaaaaattagaatacagaggttatgactctgcaggtatcgcrgtagtaaatgatgataatacaactgtattyaaagaaaaaggtcgtattgcagaattacgtaaagttgctgatagtagcgattttgatggwcctgttggaatcggtcacacacgttgggcaacacacggtgtaccgaatcatgaaaactctcatccacatcaatcatcaaatggccgttttactctagttcataacggtgttattgaaaactatgaagagttaaaaggtgaatacttacaaggtgtatcattcatttcagaaacagatacagaagttatcgttcaattagttgaatacttttcaaatcaaggactttcaactgargaagcatttacaaaagttgtgtcattattacatggttcatatgcattaggtttattagatgctgaagacaaagacacaatctatgttgctaaaaataaatcaccattattattaggtgttggtgaaggtttcaatgttatcgcatcagacgcacttgcaatgttacaagtgacaagcgaatataaagaaatccatgaccatgaaatcgttattgttaaaaaagatgaagttattattaaagatgcagatggaaacgttgtagaacgtgattcatatattgctgaaattgatgcatcagatgctgaaaaaggtgtttatgcacactacatgttaaaagaaattcatgaacaaccagcagtaatgcgtcgtattattcaagaatatcaagatgcagaaggtaacttgaaaattgatcaagacatcatyaatgatgttaaagaagcagaccgcatttacgttattgcagcaggtacaagctaccatgcaggtttagtaggtaaagaatttttagaaaaatgggctggcgtaccaactgaagtacacgttgcatcwgagtttgtctacaacatgccattattatctgaaaaaccwttgttcgtttatatttctcaatcaggtgaaacwgcagatagccgygcmgtattagttgaaactaataaattaggtcataaatcattaacaatcactaatgttgcaggttcaactttatcacgtgaagcagaccacacattgttattacaygcgggtcctgaaatcgcagttgcatctacaaaagcatatactgcacaaattgcagtattatcaatcttgtctcaaatcgttgcaaaagagcayggtcgtgaagcagatattgatttattgagagaattagcaaaagtaacaacagcaatwgaagcrattgttgacgatgcaccaatyatggaacaaattgcwacagatttcttagaaacaacacgcaatgcattctttatcggacgtactattgactataacgtaagtttagaaggtgcgttaaaacttaaagaaatytcttacattcaagcwgaaggttttgcwggtggmgaacttaaacayggtacrattgcmttaatcgaagawggyacaccagttgtwgstttagcaacwcaagaraamgttaatttatcaattcgtggtaaygttaaagargtagtagcacgtggwgcacayccatgtattatttctatggagggycttgaaaaagaaggcgacacttatgtcattcctcatgtacatgaattrttracrccattagtwtcagtdgttrcattacaattratttcataytatgcagcattacacagagatttagatgtkgataaaccacgtaaccttgctaaatcagttactgtrgaataa

SEQ ID NO: 2992 - DNA, 333 bp, Staphylococcus aureus
atgggkcaaaatgatttagttaaaacgttacgaatgaattatttgtttgatttttatcaatccttattgacgaataaacaacgtaattatttggaattattttatctygaagattattctttaagtgaaatcgcagatacttttaatgtgagtagacaagcagtttatgataatataagaagaactggcgatttagttgaagattatgaaaagaaattggaattataccagaaatttgagcaacgccgagaaatatatgatgaaatgaaamaacatttaagtaatccagaacaaatacaacgttatattcaacaattagaagacttagaatag

SEQ ID NO: 2993 - DNA, 1368 bp, Staphylococcus aureus
atggcatttgaaggsttatcagaacgcytgcaagcgacgatgcaaaaaatgcgtggtaagggtaaacttactgaagctgatataaagataatgatgcgtgaagtaagattagcgttayttgaggctgacgtaaactttaaagtggtaaaagaatttattaaaacagtatcagaacgcgcattaggttccgatgtaatgcaatcattaacaccagggcaacaagttattaaaatagttcaagatgaattaacgmagttgatgggtggagaaaatacrtcgattaatatgtcaaataaaccacctactgttgttatgatggttggtttacaaggtgctggtaaaacaacaactgcaggtaaattagcattattgatgcgtaaaaaatacaacaaaaaaccwatgttagttgcagcagatatttatcgtccagcagcgataaatcaattacaaacagtaggraaacaaattgatattcctgtatacagtgaaggrgatcaagtaaagccacaacaaattgtaactaatgcattaaaacatgctaaagaagaacatttagactttgtaatcattgatacagcaggtcgattacacatcgatgaagcattgatgaacgaattaaaagaagtaaaagamattgctaaaccaaacgaaattatgttagttgtcgattcaatgacgggtcaagatgctgtcaatgttgcagaatcwtttgacgatcaacttgatgtcacaggtgttaccttaactaaattagatggtgatacacgtggtggtgcagctttatctattcgttcggtgacacaaaaaccaattaaatttgttggtatgagtgaaaagttagatggtttagagctattccatcctgaacgtatggcatcacgtattttaggtatgggtgatgtgttaagtttaattgaaaaagcrcaacaagatgtggatcaagaaaaagcaaaagatttagagaaaaagatgcgtgagtcatcrtttactttagatgattttttagaacaacttgatcrggtgaaaaatytaggaccactggatgatattatgaaaatgattccaggtatgaataaaatgaaagggctagataagcttaatatgagtgaaaagcaaattgatcatattaaagcgattatccagtcaatgacgccggctgaaagaaacaatccagacacattgaatgtatcacgtaaaaagcgtattgctaaaggktctggwcgttcattacaagaagtcaatcgtttgatgaaacaatttaacgatatgaagaaaatgatgaaacarttcactggtggcggtaaaggtaaaaaaggtaaacgcaatcaaatgcaaaatatgttaaaaggtatgaayttaccrttttaa

SEQ ID NO: 2994 - DNA, 1356 bp, Staphylococcus aureus
atgggaaaatattttggtacagacggagtaagaggtgtcgcaaaccaagaactaacacctgaattggcatttaaattaggaagatayggtggctatgttctagcacataataaaggtgaaaaacacccacgtgtacttgtaggtcgcgatactagagtttcaggtgaaatgttagaatcagcattaatagctggtttgatttcaattggtgcagaagtgatgcgattaggtattatttcaacaccaggtgttgcatatttaacacgcgatatgggtgcagagttaggtgtaatgatwtcagcctctcataatccagttgcrgataatggtattaaattctttggatcagatggttttaaactatcagatgaacaagaaaatgaaattgaagcattattggatcaagaaaayccagaattaccaagaccagttggyaatgatattgtacattattcagattactttgaaggggcacaaaaatatttgagytatttaaaatcaacagtagatgttaactttgaaggtttgaaaattgytttagatggygcaaatggttcaacatcatcaytagcgccattcttatttggtgayttagargcagatactgaaacaattggatgtagtcctgatggatataatatcaatgagaaatgtggctctacacatcctgaaaaattagcwgaaaaagtwgttgaaactgaaagtgattttgggttagcatttgacggcgatggagacagaatcatagcagtagatgagaatggtcaaatcgttgacggtgaccaaattatgtttattattggtcaagaaatgcataaaaatcaagaattgaataatgacatgattgtttctactgttatgagtaayttaggtttttacaaagcgcttgaacaagaaggaattaaatctaataaaactaaagttggcgacagatatgtagtagaagaaatgcgtcgcggtaattataacttrggtggagaacaatctggrcatatcgttatgatggattacaatacaactggtgatggtttattaactggtattcaattagcttctgtaataaaaatgactggtaaatcactaagtgaattagctggacaaatgaaaaaatatccacaatcattaattaacgtacgcgtaacagataaatatcgtgttgaagaaaatgttgacgttaaagaagttatgactaaagtagaagtagaaatgaatggagaaggtcgaattttagtaagaccttctggaacagaaccattagttcgtgtcatggttgaagcagcaactgatgaagatgctgaaagatttgcacaacaaatagctgatgtggttcaagataaaatgggattagataaataa

SEQ ID NO: 2995 - DNA, 276 bp, Staphylococcus aureus
atggcagttaaaattcgtttaacacgtttaggttcaaaaagaaatccattctatcgtatcgtagtagcagatgctcgttctccacgtgacggacgtatcatcgaacaaatcggtacttataacccaacgagcgctaatgctccagaaattaaagttgacgaagcgttagctttaaaatggttaaatgatggtgcgaaaccaactgatacagttcacaatatcttatcaaaagaaggtattatgaaaaaatttgacgaacaaaagaaagctaagtaa

SEQ ID NO: 2996 - DNA, 933 bp, Staphylococcus aureus
atgctagaaagtaaatggggcttragatttattgcctttcttttggcattgtttttctttttatctgttaayaatgtttttggaaatatctttaacactggtaatcttggtcaaaagtctagtaaaacgattcaagatgtacccgttgaaattctttataacactaaagatttgcatttaacaaaagcgcctgaaacagttaatgtgactatttcaggaccacaatcaaagataataaaaattgaaaatccagaagatttaagagtagtgattgatttatcaaatgctaaagctggaaartatcaagagaagtatcaagttaaagggttagctgatgacattcattattctgtaaaacctaaattrgcaaatattacgcttgaaaacaaagtaactaaaaagatgacagttcaacctgatgtwagtcaragtgatattgatccactttataaaattacaaagcaagaagtttcaccacaaacagttaaartaacaggtggagaagaacaattgaatgatatcgcttatttaaaagccacttttaaaactaataaaaagattaatggtgacacaaaagatrtcgcrgaagtaacggcttttgataaaaaactgaataaattaaatgtatcgattcaacctaatgaagtgaatttacaagttaaagtagagccttttagcaaaaaggttaaagtaaatgttaaacagaaaggtagtttagcagatgataaagarttaagttcgattgayttagaagataaagaaattgaaatcttcggtagtcgagatgacttrcaaaatataagcgaagttgatgcagaagtagatttagatggtatttcagaatcaactgaaaagactgtaaaaatcaatttaccagaacatgtcwctaaagcasaaccaagtgaaacgaaggcttatataaaygtaaaataa

SEQ ID NO: 2997 - DNA, 504 bp, Staphylococcus aureus
atgagagttgaagttggtcaaattgttaacacacatggtattaaaggtgaaattaaagtaaaatccaattcagactttacagacgttcgttttcaacccggtcaagtgctgacagttgtgcataacaataacgaccttgaatatactgttaagtcacatagagtgcataaagggcttcatatgctyacatttgaaggtattaataatattaatgatattgagcatttaaaagggagttctatttatcaagagcgtgatcatgaagatatcgtacttgaggaaaatgaattttattattcagatattataggatgtrcagtttttgatgatcaaraaacaccaataggtcgtgtaattaatatatttgaaacaggtgcgaatgatgtgtgggtgattaaagratctaaagaatatttgattccttatattgctgatgttgtaaaagaagtggatgttgaaaataaaaaaattatcatcacgccaatggaaggattgttggattaa

SEQ ID NO: 2998 - DNA, 810 bp, Staphylococcus aureus
atggatttttccaacttttttcaaaacctcagtacgttaaaaattgtaacgagtatccttgatttactgatagtttggtatgtactttatcttctcatcacggtctttaagggaactaaagcgatacaattacttaaagggatattagtaattgttattggtcagcagataagtatgatattgaacttgactgcaacatctaaattattcgatatcgttattcaatggggggtattagctttaatagtaatattccaaccagaaattagacgtgcgttagaacaacttggtagaggtagctttttaaaacgctatacttctaatacgtatagtaaagatgaagagaaattgattcaatcggtttcaaaggctgtgcaatatatggctaaaagacgtataggtgcattaattgtctttgaaaaagaaacaggtcttcaagattatattgaaacaggtattgcaatggattcaaatatttcrcaagaacttttaattaatgtctttatacctaayacacctttacatgatggtgcaatgattattcaaggcackaagattgcagcagcagcaagttatttgccattgtctgatagtcctaagatatctaaaagtttgggtacaagacatagagcwgcggttggtatttcagaagtatctgakgcmtttaccgttattgtatctgaagaaactggtgatatttcggtaacatttgatggaaaattacgmcgagacatttcaaacgaaatttttgaagagttgcttgctgaacattggtttggcacacgctttcaaaagaaaggtgtgaaataa

SEQ ID NO: 2999 - DNA, 738 bp, Staphylococcus aureus
atgaaaattgattatttaactttatttcctgaaatgtttgatggtgttttaaatcattcaattatgaaacgtgcccaagaaaacaataaattacaaatcaatacggttaattttagagattatgcaattaacaagcacaaccaagtagatgattatccgtatggtggcggacaaggtatggtgttaaagcctgaacctgtttttaatgcgatggaagacttagatgtcacagaacaarcacgcgttattttaatgtgtccacaaggcgagccattttcacatcagaaagctgttgaattaagcaaggcygaccacatcgttttcatatgcggacattatgaaggttacgatgaacgtatccgaacacatcttgtcacagatgaaatatcaatgggtgactatgtkttaacwggyggwgarttrccrgcratgacmatgactgatgctattgttagactgattccaggtgttttaggtaatgaacagtcacatcaagaygattcattttcwgatgggttattagagtttccgcaatatacacgtccgcgtgaatttaagggtctaacagttccagatgttttattgtctggaaatcatgccaatattgatgcatggagacatgagcaaaagttgatccgcacatataataaaagacctgacttaattgaaaaatatccattaactaatgmagataagcaaatattagaaagatataaaataggattgaaaaaaggttag

SEQ ID NO: 3000 - DNA, 909 bp, Staphylococcus aureus
atgacaaagamaaaagsaattgatattatwggtgyaccrtcaacatttggacaaagaaaattaggtgttgatttaggaccaacwgcrattagatatgcwggwttaatwycaagaytaaagcaattagaccttgatgtwwatgacaarggggatattaaggtaycwgytgtrracattgaaaaatttcawagtgaacaaaawggattaagaaaytaygatgaaattatagatgttamtcaaaaattaaataaagargtwtcagcatcaattgaaaataacagatttcctctagttcttggtggwgatcattctattgcgrtaggttcagtatcagcaataagtaaacattataataatttaggtgttatttggtatgatgcacatggtgatttaaatatacctgaagagtcaccaagtggaaatattcatggtatgcctctaaggattttgacaggygaaggtccyaaagaacttttagaattaaatagtaatgtaatcaagccagaaaacatcgtactaattggtatgagagatttagataaaggtgaaagacaatttatcaaagatcataatattaaaacatttactatgtcagatattgataaattrgggataaaggaagtaattgaaaatacaatagaatatttgaagtcacgcaatgttgatggcgttcatttatctttagatgttgatgcyttagatccrcttgaaacgccaggcacwggtactagagtyttrggyggwcttaswtatagagaaagycattttgcrytggaattaytrcatcartcwcaktyarttwcytcaatggayttagttgaagtraatccaytkrttgacagtaataaycatwctgctgaacarkcggtttcrttagktggaacattttttggtgaamctttattataa

SEQ ID NO: 3001 - DNA, 1218 bp, Staphylococcus aureus
atgtcatatacttctgtattgtttaataagaactttactttttatttaatagggatagctttttctaacatgggcagtgcttttactacgtttgtttttccattaatgattttaaagcttactggmtctgcatttcaagttggcatagtttctgcactaagttttataccttatgcaattttaggaytgccagcwggtgctttaattgacagattgaataagaagaccataatgaaatgtgctgatataattaggytcrtttcatatttaagtataccagtattaagtttttwyaatatgttaagcatctttcaaatttatgtagttgcaatcatttcaggtattggattartatttcacagtatttctgaggtttcgataatcccaagtattgtaaaagaagaagatttggcgagcgcaaacagttatatatacgctactcaaaatgtttcggaatttttgggccctataattggaggtttactttatacatatatgggatattcaatattgatttttatagattctatgacttttttactctcatttttcagtttgatattaattaaaattgaaacaaagagtatattcaatcaagaaaagttgagtggaaaaaattttttgagcgatgttaaagttggatttgattatctattatctaattcaactattagagtaatggctgttgttgtaagtttatccaatctaattatctcaccttattatatttatatagtaatgtttgtaaaggaagacatgaatcaatcatctcaagcattggggttagttttaggtatctcatcattaggtgcgctaatcggttcattatctgcaagttttctcttgaaattatttaatttcggaaaactaattgtaattatattatttttagatacaatttttagattaatgttaccatttagtacttatatttttatactcatcccacttttagggttgacatatatgacacaatccattttaaatatagcgataatcacactgaggcaaaagaaatgttcagaamatatgttaggacgtgttaatagtgtttttaaaacaatggtttttgcattcagasctataggcctttttttaggcggyatattacttgaaaataaaggtggattttatgcacttacgatcagygctgtgttatttataccattagtgttatatatactgaaaaatagattttatmaagtwgaagaatattaa

SEQ ID NO: 3002 - DNA, 351 bp, Staphylococcus aureus
atgacaaatcacaaattaatcgaagcagtaactaaatcacaattrcgtacagacttaccaagtttccgtcctggtgatactttacgtgtacacgtacgtatcattgagggtactcgtgagcgtatccaagtattcgaaggcrttgtaattaaacgtcgtggcggtggcgtttctgaaacgtttacagttcgtaaaatttcatcaggtgttggcgtggaacgtacattcccattacacacaccaaaaattgaaaaaatcgaagttaaacgtcgtggtaaagtacgtcgtgctaaattatattacttacgtagtttacgtggtaaagctgctagaatccaagaaattcgttaa

SEQ ID NO: 3003 - DNA, 1065 bp, Staphylococcus aureus
ttgttaacggtagatcaagtkaaagaaytrrtaggagaaattaaagatcctattatagatgtrcctttaaaagaaacagaaggtattgtwgaagtttctattaaggaagaaaaagaacatgtragtgttaaaktrgcaatggcacaattaggtggtgcaccgcaattagatttacagatggcwgttgttaatgywttaaaagaaaayggtgcraaaackgtsggtatacgatttgaaacrttrccrgaagaaaaagtaaatcaatttaaaccaaaagaagaaaataaacctaaaacgatagaaggcytattatctcaaaataatccagtygaatttattgcwatwgcytcmggtaaaggtggygtcggtaaatctactgttgcagtaaatttagccgttgccttagcycgtgaaggkaaaaaagtyggattagtagatgccgatatatatggatttagtgtaccagatatgatgggtattgatgaaaagcctggaattaawgggaaggaagtaattccagttgaacgtcatggcgttaaagttatatcaatggcmttttttgtggaagaaaatgcrccagttatatggagaggrccaatgttaggtaaaatgttgacgaatttctttacagaagttaratggggagacattgaatatttaatactcgatcttccacctggaacaggagatgtagctttagatgttcatacgatgttaccttcaagtaaggaaattattgtaacgacacctcatcctacagcagcatttgttgcagctcgcgcaggtgcgatggcaaaacatacggatcattctattcttggcgtaattgaaaacatgagttattttgaaagtaaagagacgggkaataaagaatatgtctttggcaaaggtggcggtactaagttagctgatgaacttaatactcaattacttggggaattacctttagagcaaccatcttggaatccaaaagattttgcaccgtcaatatatcaatcagatgatcgtctaggtaaaatttatagctcgattgcacaaaaagttatagctgcyacaaataaatag

SEQ ID NO: 3004 - DNA, 885 bp, Staphylococcus aureus
atggttattcaatggtatccaggacatatggcgaaagccaaaagagaagtaagtgaacaattaaaaaaagtagatgtagtgtttgaactagtagatgcaagaattccatatagttcaagaaaccctatgatagatgaagttattaaccaaaaaccacgtgttgttatattaaataaaaaagatatgtctaatttaaatgagatgtcaaaatgggaacaattttttattgataaaggatactatcctgtatcrgtggatgctaagcacggtaaaaatttaaagaaagtggaagctgcagcaattaargcgactgctgaaaaatttgaacgygaaaaagcraarggacttaarccwagagcgatwagagcratgatygttggaattccaaatgttggtaaatccacattaataaataaactggcaaagcgtagtattgcrcagactggtaataaaccaggtgtgaccaaacaacaacaatggattaaagttrgtaatgcattacaactattagayacaccagggatwctttggcctaaatttgaagatgaagargtcggtaagaagttgagtttaacwggygcgatwaaagatagyattgtgcacttagatgaagtwgcyatmtatggaytraactttttaattcaamatgatttagcgcgmttaaarkcacattataawatygaagttcctgaagatgcagaaatcatagcgtggtttgatgcgatagggaaaaaacgtggcttaattcgacgtggtaatgaaattgattacgaagcagtcattgaactgattatttatgatattcgaaatgctaaaataggaaattattgttttgatatttttaaagatatgactgaggaattagcaaatgacgctaacaattaa

SEQ ID NO: 3005 - DNA, 1443 bp, Staphylococcus aureus
atggctaaagttgaattaacaacccggagacgaaacttcatagttgctgttatgttgattagtgcgtttgtagctattttaaatcaaacattattaaatacagcgttacctagtataatgagagaattaaatatyaatgaaagtacatcgcaatggctagttactgggtttatgcttgttaatggcgtcatgatacctytracrgcatayytaatggayagrattaaaactagacctttatacttagcrgcgatggggacatttttaktaggwtcwattgttgcagccwtrgcwccsaattttggagttttaatgttagcwcgtgtmatycaagckatgggkgcaggcgtactyatgccyttaatgcaattyacrttrtttacrttrttcagtaaagaacatmgaggwtttgcaatgggaytagcwggtttagtwattcaatttgcaccagcaatmggvcctacwgttacwggattaatyattgatcaagcgagttggcgagtwccatttattataattgtaggaattgctwtastygcmttyrtyttcggyttrrtttcaatytcragytayaatgaagtgaaatatackaarytagataagcgytcwgtaatgtattcaackattggrttyggrttaatgytataygcattyagtagtgcaggmgayytaggatttacwagyccrrtagtmatwggtgcrwtgatawtwagtwykrttatyatctayttatttatwcgtagacaattyaatatwasyaatgyacttttaaatttaagkgtttttaaraatagaacatttgcattatgtacgattagttcaatgattataatgatgtcaatggttggwccwgcgytrytwataccgctmtatgttcaaaayagyttakctytatctgcmttrttrtywggacttgttatcatgccwggtgcaatmataaatggtattatgtcrgtttttacaggtaaattttatgataagtatggtcctagaccaytgatttatactggttttacrattttaacaattactacwattatgttgtgtttcttgcatacagacacatcttatacgtatttaatagtcgtatatgcaattagaatgttttcagtttctttactcatgatgccgataaatactacaggaattaattctttgaraaatgaagaaatctcacatggcacggctattatgaactttggtcgtgtaatggctggytcaytaggmacagcwttaatggttacwttratgagttttggygcaaaaatattytyatctacatcgccatcgcatttaactgcaactgaaattaaacagcaatcmattgctataggggtggatatctcatttgcttttgtagctgtgcttgttatggcagcttatgtgatagcrctttttataagagaacctaaagaaatagaaagtaatagaaggaaattttaa

SEQ ID NO: 3006 - DNA, 768 bp, Staphylococcus aureus
atgacgctaacaattaaagaagtwamgcagttgattaatgcggttaatacaatagaagaattagaaaatcatgaatgctttttagatgagcgaaaaggtgtwcaaaatgccatagcyagrcgmagaaaagcgttagaaaaagaacaagctttaaaagaaaagtatgttgaaatgacttactttgaaaatgaaatattaamagagmatcctaatgcwattatttgtggkattgatgaagttggaagaggacctttagcaggtccagtcgttgcatgcgcaacaattttaaattcaaatcacaattatttgggccttgatgaytcgaaaaaagtacctrttacgaaacgtctagaattaaatgaagcactaaaaaatgaagttactgcttttgcatatggkatcgcgacagctgaagaaatagatgaatttaatatttataaagctactcaaatcgccatgcagcgagctattgatggattatcagtacaaccaacgcatttattgatagacgcgatgacgcttgataatgcactgcctcaagtatctttaatcaagggtgatgcaagaagtgtrtcyattgcagckgcaagyatcatggcraaggtttttcgtgatgattatatgacacagttatctaaagattatcctgaatayggttttgaaaaaaaygcgggttayggtaccaaacaacatttactagcaatcgatgatattggcattatgaaagagcatagaaaaagctttgaacctataaaatcgttactgtaa

SEQ ID NO: 3007 - DNA, 1167 bp, Staphylococcus aureus
atgaatatccacgagtatcaaggtaaagaaatatttcgttcaatgggcgttgcagttccagaaggacgagtagcatttactgctgaagaagcggtggagaaagcaaaagaattaaattctgatgtwtatgttgtraaagcacaaattcatgctggaggtagaggtaaagcaggcggagtaaaaattrctaaatctttatctgaggtagaaacatatgcaaaagaattattagggaaaactttggtgacacatcaaactggtccagaaggtaaagaaattaarcgtttatatatcgaagaaggttgtgctattcaaaaagaatattacgttggattcgttattgatcgtgcgactgaccaagtaacattgatggcgtctgaagaagggggcactgagattgaagaagttgctgcgaagactcctgaaaagatcttcaaagaaactatcgatccagtaatcggactttcaccattccaagcaagacgaattgcgtttaatattaatattcctaaagaatctgttaacaaagcwgctaaattcttattagcactttataatgtattcattgaaaaagattgttcaatcgtagaaatcaacccattagttacaacagctgatggtgatgtattggcattagatgctaaaattaattttgatgataatgcattattcagacataaagatgttgtagaattacgtgatttagaagaagaagatccgaaagagattgaagcgtctaaacatgatttatcatacattgcattagatggtgacatcggatgtatggttaatggtgcaggtttagccatggcaacaatggatacgattaatcatttcggtggaaacccagccaatttcttagatgcaggcggaagcgctactagagaaaaagtaactgaagcatttaaaatcattttaggtgatgaaaatgttaaaggtatttttgtaaacattttcggtggcattatgaaatgtgatgttatcgcagaaggtatcgttgaagctgtaaaagaagtagatttaactttaccactagttgtacgcytagaaggtacaaatgttgagttaggtaaaaaaatcttaaaagactcaggattagcaattgaaccagcagcaacaatggctgaaggtgcacaaaaaattgttaaactagtcaaagaagcataa

SEQ ID NO: 3008 - DNA, 1344 bp, Staphylococcus aureus
atgcgattaaagtcaatcataactgttatagctttaatattaattatgtttatgtcagcgattgaatcatctattatttcgcttgcattacctacaattaaacaagatttaaatgcaggaaatttaatttcattaattttyacagcgtattttatcgcattagtaattgccaatcctatagtgggmgaattactttcgagatttaaaattatttatgtggcaattgcaggattacttttatttagtataggtagttttatgtgtggtttaagtactaattttactatgctaattatatcacgcgtgatacaaggttttggatcaggtgtattgatgtcattatcgcaaattgttccaaagttagcatttgaaattccgttacgatataaaattatgggcatagttggcagtgtttggggtatttcgagtatcattggrccrcttctaggtggtggtatattagaatttgcaacatggcattggttattctacataaatataccgattgcgatcattgccattatattagttatatggacatttcattttccagaggaagaaacagttgctaaatcaaaatttgatactaaagggctcacgctattttatgtatttattggattgattatgtttgctttattaaaccaacagctrttacttttaaatttcttgagttttatcttagctatcgttgtggcaatgtgtttatttaaagtagaaaaacatgtttcttcaccatttttacctgtggttgaatttaatcgttcgattactttagtttttataackgaccttctaacagctatttgtttaatgggattcawtttatatattccagtctaccttcaagaacaactaggattatctccattgcaaagtggattggttatttttcctttatctktagcttggattacattgaattttaatttacatcgaattgaagcaaaactatcaaggaaagttatttacttactatcatttacattgytactagtaagtagtattatcatttcatttggtattaaattgccggtacttatagcatttgtgttrattttggcaggattaagttttggatatatttatacgaaagatagtgtrattgtccaagaggaaactagcccattacaaatgaagaaaatgatgtcattttatggattaactaaaaatcttggggcatcaataggttcaacaataatgggatatctttatgcgatacaatcaggaatctttggtccaaacttacayaatgtgttaagtgctgttgctgtaattagcattgggcttattgttttatgggtcgtattttttaaagaacagtcatctcaatcaaaagaatag

SEQ ID NO: 3009 - DNA, 660 bp, Staphylococcus aureus
atatatagaaggaggtatttcatgcgattaaagtcaatcataactgttatagctttaatattaattatgtttatgtcagcgattgaatcatctattatttcgcttgcattacctacaattaaacaagatttaaatgcaggaaatttaatttcattaatttttacagcgtattttatcgcattagtaattgccaatcctatagtgggagaattactttcgagatttaaaattatttatgtggcaattgcaggattacttttatttagtataggtagttttatgtgtggtttaagtactaattttactatgctaattatatcacgcgtgatacaaggttttggatcaggtgtattgatgtcattatcgcaaattgttccaaagttagcatttgaaattccgttacgatataaaattatgggcatagttggcagtgtttggggtatttcgagtatcattggaccgcttctaggtggtggtatattagaatttgcaacatggcattggttattctacataaatataccgattgcgatcattgccattatattagttatatggacatttcattttccagaggaagaaacagttgctaaatcaaaatttgatactaaagggctcacgctattttatatattccagtctaccttcaagaacaactag

SEQ ID NO: 3010 - DNA, 669 bp, Staphylococcus aureus
atggaaagtacattagaattaacaaaaattaaagaagtattacaaaaaaacttgaagattttaattattttaccgctattatttttaattattagcgctattgttacatttttcgtcttatcacctaaatatcaagctaayactcaaatyttagtgaatcaaactaagggtgacaatcctcagtttatggcrcaagaggttcaaagtaatattcaacttgtaaatacgtataaagaaattgttaaaagtcctagaattttagatgaggtgtcaaaggacttaaatrataagtattcaccatctaaattrtcgagtatgttgacaattacaaaccaagaaaatacrcaacttatcaacatccaagttaaaagtggtcataaacaagattcggaaaaaattgcgaatagcttcgctaaagttacaagtaaacaaattccgaagattatgagtktggataacgtatcaattttatctaaagcagacggtacagcagttaaagtcgcaccaaaaactgtagtgaatctmatcggtgcaytctttttaggattagttgtcgcgcttatatatatcttcttcaaagtaattttygataagcgaattaaagatgaagaagatgtagagaaagaattaggattgcctgtattgggttcaattcaaaaatttaattaa

SEQ ID NO: 3011 - DNA, 801 bp, Staphylococcus aureus
atgaaatttgagaatcgtgttcaacgttatcaacatttatttacaaaaactgataaacgcatcgtcaattatataagacaaaatggytatagcgatgccttttcaacgattaactccttarcccatgcgattggtacatcaccagcaacgatgacacgctttagtcataagctrgattatgagaatttccaagatttaaaatttaatattcaacaagaaatgacagagacagttattgaaaatagcccaattattcaaagaattcataaatatcatcaacaaatcattcaacaaactggtgaatttattgataacgacattatccaaacctttatcgacaaactycaatcaagtcgacatatactctttgctggactaggtagctctggtttatcagcgactgaattttattatcgtatgattcgtatggggctaaaaggtaatgttactaccgattcacatttaatgaaaatatcggcatccctactatctcattcggayatgtttattgctatgtcaaatagtggtaatacttcggaattaatttcwgcagcggaagtcgccaaatctcatggtgcatatgtcgttgccatcacaaatttygaaggtagyaaacttacagattgtgcagatttagtacttttaacaacggatcaatcgcgtaataccgaccatcaatttatcaacacacaaattgcgacactctttttaatcgatatcgtgagytatcatttattagaaaatacraatctgagtcaaacttatcaacatactaaatctattatcctagacaacaaataa

SEQ ID NO: 3012 - DNA, 909 bp, Staphylococcus aureus
atgagtgtatttatagataagaatactaaagtaatggtacaaggtattacagggtctactgcccttttccatacaaaacaaatgcttgattatggtacsaaaatagtagcaggtgtgacgcctggtaaaggtggtcaagttgttgaaggcgttcctgttttcaacactgttgaagaagctaaaaatgaaacyggggcaacggtttcagtcatttacgttccagcaccatttgctgcagactcaattttagaagcagctgatgcagacttagatatggttatttgtatcactgaacatattcctgtattagacatggttaaagttaaacgctayttacaaggtagaaaaacacgtttagttggtccraactgtccaggtgtgattacagcagatgaatgtaaaattggtattatgcctggctatattcacaaaaaaggtcatgttggtgtagtatcwcgttcaggtacaytaacatatgaagcagtgcaccaattgactgaagaaggtattggtcaaactacagctgttggtattggtggagacccagtmaayggmacaaactttattgatgttttaaaagcattcaatgaagatgacgaaacgaaagcagttgttatgattggtgaaatcggtggtacrgctgaagaagaagcagctgaatggattaaagcgaatatgacaaaaccagttgtaggctttatcggtggacaaacagcacctcctggaaaacgtatgggacatgctggtgcratcatttcaggtggtaaaggtactgctgaagagaaaatwaaaacattaaatagttgtggtgtgaaaacagcggcaacaccttcagaaattggttcaacattaattgaagctgctaaagaagcaggtatttatgaakyattattaacwgttaataaataa

SEQ ID NO: 3013 - DNA, 684 bp, Staphylococcus aureus
atgtccaaatcwastraaaaaagtaatgacacaatcgtagaaacatttaaggatatcatccctttatcatttggagaagaaattggtaatgcrgcatctcatggtgttgcagctttgttaacattattagtgttaccctatgcrgctgtgcacagttatattgcayatggtacgcttgcgtctgtgagtatgtctatttatgttatttctatctttatgatgtttatttcatctactatttatcattctatgcaaaatgaaacrcctcataaatatattttaagrattatygaycayagtatgatttaygtagcaatttcwggtacatatacgcctattttrttaacagttgtaggtggttggatwggwtggacagtrtttatyytattatggggmacracrctttggggdattttatataaatccatagctgtcaaagttaaccaaaagttaagcttaattgtctatttagtgatgggctgggtaggtattatcttgttaccaattatttttattcgcacatcatggatattcatattattcattttcttaggyggtgtgtcwtatacrattggtgcatggttytatgcacaaaaraayagaccatattttcatatgatwtggcatatttttattgtwatagcatcaytattgcatttaattgcdatyttatattttatgtar

SEQ ID NO: 3014 - DNA, 1188 bp, Staphylococcus aureus
atgctagataaaaatcaattagctaaatataaacaagatcatttrtgtgaatatgaaaaaataatgagtaacaatgaaaaagaagcacttgaagagaaggtagcgtcattagatttagattttattgccaaattatataacgatttatacatcaataagaaaacratagatgatgtatctgcagtttctgaagtgaaatatgatattaaatcacaaatgagtgatgatgagattaagcgtttagaggaacaaggacttcaagctattaaagaaggacaatttgcagtacttttgatggcaggtggwcaaggaacaagacttggwtayaarggmcctaaaggttcrttygaaattgaaggtgtaagtttatttgaacttcargcwaamcaattaaaarmaytrmatcrwcaawctggwcatamrattcaatggtayattatgacaagtgatatcaatcatgaagaaactttagcttatttygaakcacatarytaytttggwtatgatcaagaakcaatccatttctttaarcaagataatattgtggcgcttagtgaagmaggrmarttaattttaaatcaacagggtcgtattatggaaacgccgaatggtaatggtggcgtgtttaaatctttagacaaggcaggatacttagaagaaatgtctaataatggcgttaagtatattttcttgaataatatcgayaatgttttagtaaragtgttggatccactatttgcaggatttacggtagaacatgattacgatattacttctaaaacgattcaaccaaaaccaggagaaagtgttggrcgwttagttaatgtcgattgtaaagatacagtaytggagtattcagaattagatccagaagttgcaaatcaatttaacaatgctaatatcggtattcatgcatttaaacttggttttattttaaaygctgtaaatcgtgarttaccttatcatttagctattaagaatttgaarcaattagatgagaactttggkgttattgaacaaccaactttaaaattcgaattgttctattttgacatatttacttatggaactagttttgtcacgttacaagttcctagagaagaagarttytcacctcttaaaaataaagaaggtaaagatagtgttgcaacwgcracwgaagatttacgtagaatgggtttaatttaa

SEQ ID NO: 3015 - DNA, 1245 bp, Staphylococcus aureus
atgaaattttcaactttaagtgaagaagaatttaccaactacaccaaaaagcacttcaaacattatacrcagtctatagaattatataattatagaaataaaataaatcatgaagcacatattgtgggagtgaagaatgataaaaatgaagttatagctgcatgtttattaacagaggcacgwatttttaaattctacaaatatttctactctcatagaggtcctttacttgattatttcgatgctaaattagtttgttacttttttaaagaattatctaaattcatttataaaaatagaggwgtatttattcttgttgatccatatttaatagagaatttaagagatgcraatggtaggataataaagaattataataattcagtgatagtaaagatgctaggraaaattgggtatctccatcaaggttatacaacaggatattcaaataaaagycaaattaggtggatttctgtattggatttaaaagataaagatgagaatcaacttttaaaagaaatggaataccaaactagaagaaatataaaaaagactattgagattggtgttaaggttgaagatttatctattgaagaaacaaatcgattttataaattrtttcaaatggctgaagaaaaacatggttttcatttcatgaatgaagattattttaaacgaatgcaagaaatatataaagataaggcaatgttaaagatagcttgtataratcttaatgaatatcaagataaattaaaaatacaattattgaaaatcgaaaatgaaatgatgactgtgaacagagcattaaatgaaaatccaaattctaaaarraataaatcwaaattaaatcagttaaatatgcaattatctagtattaataatagaattagtaaaaccgaagaactaatattwgaagatggacctgttttggatttagctgctgctttatttatatgtactgatgatgaagtttattatctatcaagtggatcaaatcckaaatataatcagtatatgggygcatatcatctacaatggcatatgataaaatatgcaaaatcacataatattaataggtataatttttatggaataacaggcgtctttagtratgaggcggatgattttggtgtwcaacaatttaaraarggttttaatgcacatgttgaagaattaattggtgatttcatcaaaccagtaagaccaattctatataaatttgcaaaacttatttataaggtttra

SEQ ID NO: 3016 - DNA, 516 bp, Staphylococcus aureus
atgacaggtaaaacacatgcttyatgyggcatgctcgttggagcgctaacaacacaatattttcaaacggatattttttcgtcggttacggttatcattctagcaactctagctagcttattacccgatatatgtcacactcaaagtaagattggcagaaggtttaaggtaattagtttttttgtgagattgatctttggacatcgaacctttacgcattcaatattatttatcgcaatcatagcatttttattgcaaattattcagacgcctaattattatatggcagcaattataattggrttagtgtcacatgttatactagatatgataacaccaaraggcgtgaaattattttatccgttaccgtttaatgtgaagacaccgattcaatttaaaacaggtggacttgtagacttatctttagctacwgcgttaatgrtcggaacagtttatgttttatttcagcctttcatcaatgatataataagcaactggaatactaagtttttatag

SEQ ID NO: 3017 - DNA, 873 bp, Staphylococcus aureus
ttgattaractatttttgcttaagttatactgggcacacttttcgactaaacaaattcatcaatttttaatggcataycctaatgtaattaaagaggrgggmagaaaaaaagatagttatttatgtgaatgggtgaatagggaagaaaatgttcwtttattacgtaaatactatgcttttataaaacttgatcataacgatattattaaagaactgcagaaattaaaagtaagttacattacatatatggatwctgaatacccagtgctattaaaagaaatatatcaatttccattacttcttttctataragggaacatcaaattaataaataatatgcatcatttggcagtagtaggtgcaagagattctacaagttatacccaacagtctttagaatttttattatcaaatgataaaagcaaatatttaacaattgtttccggccttgctcaaggagctgatgcaatggcacatcaaatagctttaaaatacaatctccctacaatwgcagttttagcctttggccatcaaacacattatcccaaaagyacattagcattaagaaataaaatagaagaaawaggtttagttatatcygaatatccaccacatacaccaatygctaaatatagatttcctgagcgcaatagaattatcagcggtttgtcaaaaggggttttaattactgaggctaaggaacaaagtggyagtcacatcacgatagattttgcattagagcaaaatagaaatgtttatgttttacctggatctatgtttaatcctatgacaaaaggtaatttattacgtatccaagaaggtgctaaggtagtattaaacgctaatgatatatttgaagactactatatttaa

SEQ ID NO: 3018 - DNA, 1317 bp, Staphylococcus aureus
atgtctttaattggtatcttattatttytagtrccaattccagtcgaacaagatggacagaagcaaacaacgttgccmgtrgcatttttagcaggcgtkcttaaagatgtattaggtggcgtaatgccatttttaattgtgacgataattactttrtcgggtatcataacwctgatttgttcaactattttaaaagataaattgaaacctgayggrytawtgmayaatgcktttaaygtwagaatwggttggttaattttrcgawtaytwgcmgttgtytttgcrtggatgacatttttacgaattggttcaaargtwatwtaytcagatgaaacgggtggattattgttctcragtttattgccaacwttagtggcagtattcttatttgcrgcwytatttttrccrctattaatggaatacggtttgttagagatgttgggtcctatttttagaccggttatgagacctttatttacattgccaggacgttcgacggtagataatttagcatcatttattggagacggaactgttggkgtcttaattacaagtagacaatatggtgaaggatattattctcgtcgtgaggcaacagttatttcaacgacatttagtgtagtttctatcacctttgcaattgtagttgctgaaacagtrcayatgcaaaatcaattttttgctttctatttatcagtgatagtatcctgcctcgttgcagcagtcattatgccaagaatttggcctttaaataaaattcctgatgagtatgctaaggaggtacctgaaagtgcgcgtactgaggcattgccagaaggaaagacggcattgagacatggctttgatactgcaacagaagtwggtattaaagcaccgggcrttrttgacttytttaagtcaggattraaaacrgtyrttgatatgtggtttgttattttrcctgtwgtratgagtattggtactattgctaccattattgcgaactacacgccmttkttygtyatwttgggtaaaccttttgttccatttttagagttaatgcawatacctgaagcggcacaggcttctcaaacgattattatcggttttgccgatatgtttttaccttctatattaattgaaggtgtacaaaatgatataactcgttttgttattggggcacttagtatatcgcagttaatatacttgtctgaagtaggtggcgtcatacttggttcgaagattcctgtaagyatcggcaaattgtttatgattttcttgattagaacaatcattacactaccaattatttctttgatggcacatcttttrttrtaa

SEQ ID NO: 3019 - DNA, 2076 bp, Staphylococcus aureus
atgacattggcagataatttagtcattgttgaatcgcctgcaaaagcaaaaaccattgaaaagtatttaggtaagaaatataaagttatagcttcaatgggacacgtcagagacttaccaagaagtcaaatgggtgtcgacactgaagataattacgaaccaaaatatataacaatacgcggaaaaggtcctgttgtwaaagaattgaaaaaacatgcaaaaaaagcgaaaaacgtctttctcgcaagtgaccccgaccgtgaaggtgaagcaattgcttggcatttatcaaaaattttagagcttgaagattctaaagaaaatcgcgttgttttcaacgaaataactaaagacgctgttaaagaaagttttaaaaatcctagagaaattgaaatgaacttagtcgatgcacaacaagcgcgtcgaatattagatagattrgttggctataacatctcgccagttctwtggaaaaaagtraaaaaaggkttgtcagcgggtcgagttcaatctgttgcacttcgtttagtcattgaccgtgaaaatgaaatwcgaaactttaaaccagaagaatattggactattgaaggagaatttagatacaaaaaatcaaaattcaatgctaaattccttcattataaaaataaaccttttaaaytaaaaacgaaaaaagatgttgagaaaattacagctgcaytagatggagatcaattcgaaattacaaacgtgactaaaaaagaaaaaacgcgtaatccagcaaacccatttacaacttctacattacaacaagaggcggcacgtaaattaaactttaaagcwagaaaaacaatgatggtcgcacaacaattatatgaaggtatagatttgaaaaaacaaggtacgattggtttaataacatatatgagaaccgattctacacgtatttcagatactgccaaagytgaagcaaaacagtatataactgataaatacggtgaatcttacacttctaaacgtaaagcatcagggaaacaaggtgaccaagatgcccatgaggctattagaccttcaagtactatgcgtacgccagatgatatgaagtcatttttracgaaagaccaataycgattatacaaattaatttgggaacgatttgttgctagtcaaatggctccagcaatacttgatacagtctcattagacataacacaaggtgacattaaatttagagcgaatggtcaaacaatcaagtttaaaggatttatgacactttatgtagaaactaaagatgatagtgatagcgaaaaggaaaataaactgcctaaattagagcaaggtgataaagtcacagcaactcaaattgaaccagctcaacactatacacaaccacctccaagatatactgaggcgagattagtaaaaacactagaagaattgaaaattgggcgaccatcaacttatgcmccgacaatagatacgattcaaaagcgtaactatgtcaaattagaaagtaagcgttttgttcctactgagttgggagaaatagttcatgaacaagtgaaagaatacttcccagagattattgatgtggaattcacagtgaatatggaaacgttacttgataagattgcagaaggcgacattacatggagraaagtaatmgacggtttctttagtagctttaaacaagatgttgaacgtgctgaagaagagatggaaaagattgaaatcaaagatgagccagccggtgaagactgtgaartttgtggttctcctatggttataaaaatgggrcgctatggtaagttyatggcttgctcaaacttcccggattgtcgtaatacaaaagcgatagttaagtctattggtgttaaatgtccaaaatgtaatgatggtgacgtcgtagaaagaaaatctaaaaagaatcgtgtcttttatggatgttcgaaatatcctgaatgcgactttatctcttgggataagccgattggaagagattgtccaaaatgtaaccaatatcttgttgaaaataaaaaaggcaagacaacacaagtaatatgttcaaattgcgattataaagaggcagcgcagaaataa

SEQ ID NO: 3020 - DNA, 969 bp, Staphylococcus aureus
atgatgacaacgaaaattatacgtcgttatagtttaatcacaatccttttaattgtgagtatattcataagtttatgtgtagggtctgtcatgattcayccgattgatgctattaagggaatctttacacaagatgattttattttaaatgagtatcgtatacctagaacrttacttggtattattatcggyagtagcttggctatwtcaggtgcaattatacaagctgtaataagaaacccgttagcctcacctgatgttataggtatttctaaaggtgccagtttagctgctgtrattattattatgayctttccaacagcaccattgtttgtwttacctataggttcattcttaggtgcctttgcagtaagtttatttttatcatttttaatttcaaaatatgatgttaaaggttcaaagcttgccttaattggtttagcaataggcgcaatatgtacggcgattgtgcagttcttattaatcagaaatccactggaagcaaacaaagcgcttgtttggttgacrggtagtctatatggacatgatatgtcgaatatttatactatattaccttggtttttaataacgataccaatcatcattttattgagttatcaattagatgtattgaatctaggtgatgctgttgcaaccgcactcggtttaaaagttaaaactattaaaatgctattgytaattttagcagtaatattagcaggatccgcaatttcagttgtcggtggtattagctttttaggattaattgcacctcatattgcgagacarttaataggaaataaaacattacacgttattatcatgtcggggttaattggtgctatattgttaacatttggwgatggtttagcccgtggcattcatccgccactggatattcctgtwggggttatcattgcaattatcggtgcaccatacttcttaatattattacgaagaatgaaataa

SEQ ID NO: 3021 - DNA, 1308 bp, Staphylococcus aureus
atgactcaaactgtaaatgtaataggtgctggtcttgccggttcagaagcggcatatcaattakctgaaagaggaattaaagttaatctaatagagatgagacctgttaaacaaacaccagcgcaccatactgataaatttgcggaacttgtatgttccaattcattacgmggaaatgctttaactaatggtgtgggtgttttaaaagaagaaatgagaagattgaattctataattattgaagcggctgataaggcacgagttccagctggtggtgcattagcagttgatagacacgatttttcaggttatattactgaaacacttaaaaatcatgaaaatatcacagttattaatgaagaaattaatgccattccagatggatacacaattatcgcaacaggaccacttactacagaaacccttgcrcaagaaatagtggacattactggtaaagatcaactttatttctatgatgcrgctgctccaattattgaaaaagaatctattgatatggataaagtttacttaaagtcccgttatgataaaggtgaagctgcatatttaaactgtcctatgactgaggatgaatttaatcgcttttatgatgcagtattagaagctgaagytgcrcctgtaaattcatttgaaaaagaaaaatatttcgagggttgtatgccttttgaagtaatggcagaacgcggrcgcaagacattactatttggaccaatgaaaccagtaggattagaagatccaaagactgggaaacgtccttatgcrgtggttcaattaagacaagatgaygctgctggyacactctacaatattgtyggcttccaaacrcatttaaaatggggagctcaaaaagaagtyattaaattaattccaggyttagaraatgttgatattgtyagatatggtgtgatgcatagaaataccttcattaaytcaccggacgtattaaacgaraaatatgaattgatttcacaaccaaacatacagtttgcgggmcaaatgactggtgttgaaggttatgtagaaagcgcagctagcggcttagttgcaggyatcaatcttgcgcataaaatattaggcaarggtgaggtagtatttcckagagaaacdatgattggaagtatggcttactatatttctcatgctaaaaayaataagaatttccaacctatgaatgctaacttcgggttattaccatctttagaaactagaattaaagataaaaaagaacgctatgaagcacaagctaatagagctttggattacttagaaaatttcaaaaaaactttataa

SEQ ID NO: 3022 - DNA, 897 bp, Staphylococcus aureus
ttgaatcatattcaagawgcrtttttaaatacattgaaagttgaacgraatttttcrgaacayacattgaaatcatatcaagatgacttaattcagtttaatcaatttttagaacargaacatttasagttgaawacttttgaatacagagatgctagaaattatttgagctatttatattyaaatcatttgaaaagaacatctgtttctcgtaaaatctcaacgttaagaactytctatgaatattggatgacgcttgatgagaacattattaatccatttgttcamttagtacatccgaaaaaagaaaaatatcttccgcaattctytywcgaagaagaaatggaagcgttattyamaactgtagaaraggacacttcaaaaartttacgggatcgagttattcttgaattgttrtatgctacaggyatccgtgtttcggaattagtwaatattaaaaaacaagatatagatttttacgcgaatggtgttaccgtattaggaaaagggagcaaagagcgytttgtaccgtttggtgcttattgtagacaaagcatcgaaaattatttagaacatttcaaaccaattcagtcatgcaatcatgattttcttattktaaatatgaagggtgaagcaatcactgaacgcggtgtacgatatgttttaaatgatattgttaaacgaacagcaggcgtaagtgagattcatccccacaagctcagacatacatttgcaacgcatttattgaatcaaggtgcagacctaagaacagtacaatcgttattaggtcatgttaatttgtcaacaactggtaaatatacacacgtatctaaccaacaattaagaaaagtgtatctaaatgcacatcctcgagcgaaaaaggagaatgaaacatga

SEQ ID NO: 3023 - DNA, 984 bp, Staphylococcus aureus
atgagaggtctaaaaacttttagtatattgggattaatagttgccttayttttagttgcagcttgtggtaatacggataattcaagtaaaaaagaatcatcaactaaagatactatttcggtaaaagatgaaaatggtacagtaaaagtacctaaagatgcaaaacgtatcgttgtattagagtactcatttgcagatgcattagcagcattagacgttaawccagttggtattgctgatgatggtaagaaaaaacgtatcattaaaccagttagagaaaaaattsgggattatacttctgtaggtacacgtaaacagccaaacttagargaaattagtaaattaaaaccggatttaattatcgctgatagcagtagacataaaggtattaataaagaattaaacaaaattgcaccaacattatcattaaagagttttgatggwgactacaarcaaaayatyratkckttcaaracaattgckaaagctttarataaagaaaaagaaggcgaaaaacgtcttgctgarcatgataaattaatcaataagtataaagatgaaattaaatttgatagaaatcaaaaagtgcttccagcagtwgttgckaaagctggtttattagcacatccaaactattcrtatgttggacaatttttaaacgaactwggatttaaaaatgcattaagtgaygatgtaacaaaaggtttaagtaaatayttgaaaggaccttacttacaattagayactgaacatttagctgayttaaatccwgarcgyatgatyattatgacwgatmaygctaaaaaagattctgctgaattcaagaarttacaagaagatgcaacatggaaaaarttgaatgcagttaaaaataatcgygtkgatattgttgaccgtgatgtttgggcaagatctcgtggcttaatttcttctgaagaaatggctaaagaacttgttgaattatcaaaaaaagaacaaaagtaa

SEQ ID NO: 3024 - DNA, 546 bp, Staphylococcus aureus
atgagtaatacaacattacatgcaacaacaatttatgctgtaagacataatgggaaagcagctatggctggagatggrcaagtaacgcttggtcaacaagtcatcatgaaacaaacggcaagaaaagtgcgwcgtttatatgaaggtaaagtgttagctggtttcgcaggtagtgtagcagatgcgtttacgttatttgaaaaattygaaacaaaattacaacagtttagtggtaacttagaaagagctgctgttgaattggcacaagaatggcgaggcgataaacaattacgtcaattagaagctatgctaattgtaatggataaagatgctattttagttgtcagtggaactggcgaagttattgcyccagatgatgaccttatcgctattggatcaggrggcaactaygcattaagcgcaggacgtgcattgaaacgccatgcatcgcatttgtctgctgaagaaatggcatatgagagcttgaaagtagcggctgatatttgtgtctttaccaacgataatattgttgtygaaacactataa

SEQ ID NO: 3025 - DNA, 1071 bp, Staphylococcus aureus
atggcacacgttaayataaatatatcgaagattaaatataacgccaaagtacttcaaacagtttttcaaagtaaaaatatdcaattcacaccagtaattaagtgyatagctggtgaccgtacaattgtagaaagcttaaaagcgttaggtatcaatcatgttgcagaatccagattggataacataattagtatkgcagatcaggatttaacatatacgttattgcgtacgcctgccaaaaaagagatttcagatatgatagaaaaagttgatatgagtatccaaacagaattatctaccatacatcawataaatgaagtagcagaagttttaggaaaaaaacataagattttattaatggtagattggaaagatggccgtgaaggtgttctgacttatgatgttttagattatattaaagagattattcacttgaaaaatatccattttgtwggtttagcattcaattttatgtgttttaaatctgatgcrccaagtgatgatgatatctttatgattaatcgattcgtctcagctgttgaaagagaaataggatatcgattgaaaattatttcaggtggtaattcgagcatgttaccacaacttttatataatgatttgggtaaaataaatgaattgcgaataggtgaaacgttgtttagaggtgttgatacaackacaaatcaagcgatmgctatgttatatcaagatgcgattacattggaggctgagattttagaaattaaacctcgagttaatacacaaacgcatgaatcattcwtacaagctattgtagatattggktatttagatacaaaagtcgataatatttcacctatggatcagcatatcaatattttaggcgcttcgagtgatcatttaatgcttgatttaaatggtcaaggacactatcaagtwggagatcatatwwstttttcaytwaattatgaagcactttctcattcgatgtatatgaaaaatttacataaggtatatattgatgattcaaagattgatacgctacttcaaaattttgatgtgaaatctcctgctatggtraaccamtattaa

SEQ ID NO: 3026 - DNA, 1404 bp, Staphylococcus aureus
atggatacagctggaataagattaactccaaaagaaatcgtatctaaattaaatgaatayatcgttggacaaaatgatgctaaacgtaaagtggcaattgccytacgtaatcgatacagaagaagtttattrgatgaggaatcaaagcaagaaatttcacctaaaaatattttgatgattggaccaacyggygttggtaaaactgaaattgcaagaagaatggccaaagttgtcggcgcrccatttataaaagtagaagctactaaatttactgarstaggttatgtaggacgagatgttgaaagtatggttagagatcttgttgatgtttcagtaagattagtcaaggcrcagaaaaaatcattggtacaagatgaagcaacagctaaggccaatgaaaaacttgttaagttattagttccaagtatgaaaaagaaagcgtctcaaacgaataatcctttagagtcacttttcggaggtgcaattccaaatttcggacaaaataacgaagatgaagaagaaccacctactgaggaaattaaaacaaaacgttctgaaattaagagacarytagaagaaggmaaacttgaaaaagaaaaggtaagaattaaagtcgaacaagatcctggtgctttaggtatgctaggtacaaatcaaaatcagcaaatgcaagagatgatgaatcaattaatgcctaaaaagaaagttgagcgagaagttgctgttgagacggcaaggaaaatcttagctgatagttatgcggatgaactaattgatcaagaaagcgctaaccaagaagcrcttgaattagcagaacaaatgggtatcatctttatagatgaaatcgacaaagttgcgacgaataatcataatagtggtcaagatgtctcaagacaaggtgtkcaaagagatattttacctatacttgaaggtagcgttattcaaaccaaatatggtactgtgaatactgaacatatgctgtttataggtgctggagctttccatgtatctaagccgagtgacttgataccagaattgcaaggtcgttttccgattagagttgaacttgatagtttakcggtagaagattttgtaagaattttgacagaaccaaaattgtcattaattaaacaatatgaagcattgcttcaaacagaagaagttactgtaaactttaccgatgaagcaattactcgyttagctgagattgcttatcaagtaaatcaagatacagacaacattggtgcacgtcgacttcatacaattttagaaaagatgytagaagatttatcattcgaagcaccaagtatgccgaatgcagttgtagatattaccccacaatatgttgatgataaattaaaatcaatttcaacaaataaagatttaagtgcatttattctataa

SEQ ID NO: 3027 - DNA, 1758 bp, Staphylococcus aureus
atggtatatcttgaatgggcaaaggcagatagaaatattcaatatcgtgtaattaacgccattattaaagaacgtatttaccccgagcaaacatttatttcrcaaaaagratctttaattgaaattcagtatcatatgcatgtgttgactattgaarttgttagaaaaagtgcattagaacgctaygagtttacaggtgatattacttatttaaataaaggtgaaacgtcrytaatyatrackttagaaggkytrytagatgtgttgaatcatgactttgatatccctatttcagagcgactacgcgaagagttaatacacagtcgagatagtttagttgaaacatataagcaaatgtctcacagacaaacrttaataagtcaaagttttaaattttcaagrttaccacaagatattaactttttttcatggttacaacatgtaaaagatagtgataagacagatgatttaacttattctgagagyttggtaccagaggggcatccaacacaccctttaaccaaaacgaaattrcccttaactatggaagaagtacgagcatatgcacctgagtttgaaaaagaaatccctttgcaaattatgatgattgaaaaagaycatgttgtgtgcacagctatrgatggtaatgatcaatttattattgatgaaataattccygaatactacaatcagattcgtgtgtttttraagagtttaggtttgaaaagtgaagactatagagcgattttagtacatccttggcaatatgatcatacgatagggaaatattttgaagcatggattgctaaaaaaatattaattccaacgccgtttacaatactttcaaaagcaactttatcattyaggacgatgtctttaattgataaaccataycatgttaagttgcccgtcgatgcacaagcaacaagtgccgttagaacagtctcaactgtgactactgtagatggaccaaagttaagttatgctttacaaaacatgttgaatcaatatccaggatttaaagttgctatggaaccgttcggtgaatatgcaaatgttgataaagatagggcrcgtcagcttgcttgtatyataagacaaaagcctgaaattgatggaaaaggtgcaacagtagttagtgcaagtctagttaataaaaatccaatagatcaaaaagttatcgtggatagttacttagagtggttaaatcaaggaattactaaagaaagtattacgacatttattgaacgatackctcaagcattaatcccgcctttaattgcttttattcaaaattatggaattgcwttagaagcacacatgcaaaatacagtagtgaacttggggccacattttgacattcaatttttagtgagagatttaggtggttctagaattgatttagaaacattacaacatcgtgtatcagatattaaaattacaaatgatagtttaatagctgattctatagatgcagtgattgcaaaattccaacatgctgttattcaaaatcaaatggcagaattaatccatcattttaatcagtatgattgtgttgaagaarccgaattatttaacatagtacagcaagtagtagcgcatgcyattaacccaacaytaccacatgcaaatgagttaaaagatattttgtttggaccracaattactgtcaaagcgttgttaaatatgagaatggaaaataaagtaaagcaatatttaaatattgagttagataatccgataaaaaaagaggtgtag

SEQ ID NO: 3028 - DNA, 96 bp, Staphylococcus aureus
gtgcaaacgcttgactcatttgcagaagttattgaaagaaagcgattgtcaatcaaggcgttgaaggaagaaacgagaagagtttatstttataaa

SEQ ID NO: 3029 - DNA, 774 bp, Staphylococcus aureus
atgagcttattatctaaaacgagagagttaaacacgttacttcaaaaacacaaaggtattgcggttgattttaaagatgtagcacaaacgattagtagcgtaactgtaacaaatgtatttattgtatcgcgtcgaggtaaaattttaggrtcgagtctaaatgaattattaaaaagtcaaagaattattcaaatgttggaagaaagacatatyccaagtgaatatacagaacgattaatggaagttaaacaaacagaatcaaatattgatatcgacaatgtattaacagtwttyccacctgaaaacagagaattattcatagatagtcgtacaactatcttcccaattttaggyggaggrgaaagattaggtacattagtacttggtcgagtacaygatgaytttaatgaaaatgatttggtactaggtgaatatgctgctacagttattggtatggaaatcttacgtgagaagcatagtgaagtagaaaaagaagcgcgcgataaagctgctattacaatggcaattaattcattatcttattctgaaaaagaagcrattgaacatatctttgaagaacttggcggtacrgaaggcctattaatcgcatcaaaagttgcagatagagttggtattactagatctgtaattgtaaatgcactacgtmaattagaaagtgctggtgtaattgaatcacgttctttaggaatgaaaggtactttcattaaagttaaaaaagaaaaattcttagatgaattagaaaaaagtaartaa

SEQ ID NO: 3030 - DNA, 1194 bp, Staphylococcus aureus
atgacaaaatatttttttagcagttcttttctactatttctaggtaattggattggacaaatagggctaaattggtttgtacttaccacttatcataacgcagtttatctggggattgtcaatttttgcagacttgtaccaatattattactaagtgtgtgggcaggggcaattgccgataaatatgataaagggcgattgctgagaattacaatttcatcatcatttttagtaactgcaattttatgtgtgctyacgtatagtttcactgcaattccaattagcgtcattattatatatgcgacattaagaggrattttaagtgcdgttgaaacacctttaagacaagcaatcttaccagatttatcagataaaatatctactacacaagctgtatcatttcattcattcatcattaatatttgtcgttcaatagggcctgccattgctggtgtcatattagcagtctatcatgcgccaacaacatttcttgcacagkcaatttgttattttatcgcagytttattatgyttaccattacattttaaagtaactaaaatacctgaagatgcawcaagrtacatgccgttaaaagtyattatagattacttcaaattacatatggaaggtcgacaaatatttataacatcattattgattatggcgacaggtttttcatatacgacacttttaccagttttracaaacaaagtatttccggggaaatctgaaatatttggtatcgctatgacgatgtgtgccattggtggtattattgcaacgctagttttacctaragtacttaaatatattggtatggtaaatatgtattatttaagttcayttttatttggyattgctttgttaggtgtggtatttcacaatattgtcatcatgttcatttgtattacattgattgggttatttagtcaatgggcacgtacgacaaatcgcgtttattttcaaaataatgttaaagattatgaacgtggtaaagtactgagtattattatgatggatagaggtatgattccattgggaagtctrttratgagtatatgtgcagatgtgtttggcattgttagaactttttcaataatgggaataagtactatatgcattacaatggtattctattttataaatagaaagttgaagttaaagttggaggaaagtaatcatggtatatcttga

SEQ ID NO: 3031 - DNA, 687 bp, Staphylococcus aureus
atgtcaaaaaaggaaaatacgacaacaacactatttgtrtatgaaaaaccaaaatcaacaattagtgaaaagtttcgaggtatacgttcaaacatcatgttttcaaaagcaaatggtgaagtaaagcgcttrttggttacttctgaaaarcctggtgcaggtaaaagtacagtygtatcsaatgtagcgattacttatgcacaagcaggytataarwcrttarttatygayggsgatatgygtaagccaacacaaaactatatttttaatgarcaaaataataatggaytatcraryttaatcattggtmgaacgactatgtcagaagcwattacgwcgacagaaattgawaatttagatttrctaacagctggycctgtacctccwaatccawcwgarttaatwgsktcwgaaagrttyaaagarttagttratmtkttyaatrarcgttaygacatyattatygtygatacrccrycrgtyaayachgtgackgatgcacaactatatgcrcgtgctattaaagatagtytgttagtmattgatagtgaaaaaaatgataaaaatgaagttaaaaaagcwaaarcacttatggaaaaagcaggcagtaayattctaggygtcattttraayaagrcaaargtmgataartcttctagttattatcactattatggagatgaatar

SEQ ID NO: 3032 - DNA, 1314 bp, Staphylococcus aureus
atgaatcaatatcattctaatgcacaacaaccaagtgcatggcgtttttttgtctatagtttagtgggcatactatgtttctttattccttttacgattaatggtaacaacactattttcgtcgatcatgttcatctagccattcgctcaatcataggtccacttatgccctatgttgcactgattatgattttaattggtacagcgttaccaatagtgagacgtacttttatgacttcaatcacaaacttggtcattacattatttaaagttgcaggtgcaatgatyggtataatgtatgtatttaaawtcggtccatcaatactatttaaagctaactatggtccgttyttgtttgaaaaattaatgatgccattaagtatcttaattccagtaggtgcaattgcgctttctttattagtrggytatggcttattagaatttgtcggtgtttatatggagcctattatgagacctatttttaaaacaccaggaaaatccgctrtcgatgcagtrgcttcgtttgtcggcagttattccttaggattattgattactaatcgtgtctataagcaagggatgtacaacaaacgagaagccacgattattgcgactggctttycaacagtttcagcaacttttatgattatcrttgctaaaactttaggrytaatgcckcattggaatttatacttttggataactttagtcatcacatttgtcgtgactgcaattactgcatggctaccgccaatcascaatgaatcaacagaatattataacggacaagaaggagaacaagaagttgctattgaaggaagcagactgaaaactgcatatgcagaggcgatgaaacaaaatgcattaacaccatcyctcgtgaagaacgtttgggacaatttkaaagacggtttagaaatgactgttggtattttrccttctatattatcgattggttttttaggrctgattgtagcgaactatacaccattcattgattggcttggctayatmttctatccatttatttatattttcccaattgctgatcaggctktactwgcaaaagcktcagcgatttctattgtagaratgtttctaccatctttgttagtaactaaagctgcaatgagtactaaatttgtcgtcggtgtagtaagcgtatcagccattatctttttctcagcattagtgccatgtatactagcaactgaaattaaaatacctgtctggaaactcatcatcatttggtttttacgcgtggcrttgtcgctattaatcaccatccccgtcgctttacttatttttggataa

SEQ ID NO: 3033 - DNA, 90 bp, Staphylococcus aureus
ttggcggtagtcaatgaaatgactttgatgattatgttgaagtcatttctttatttttgtctaattttcaatcaaattgatatttcacat

SEQ ID NO: 3034 - DNA, 510 bp, Staphylococcus aureus
atgactgtagataacaataaagcaaaacaagcatacgacaatcaaactggtgttaacgaaaaagaaagagaagagcgtcaaaaacaacaagaacaaaatcargagcctcaattcaaaaayaaattaacwttctctgatgaagttgttgaaaaaattgctggtatcgctgcacgtgaagttaaaggtatcttagayatgaaaggtggcttaactgatacattcactaatgcattctcaagtggmaayaaygttacwcaaggtgtatctgttgaagttggtgaaaaacaagctgctgtagacttaaaagtaatyttagaatatggtgaatcagcaccwaaaatcttccgtaaagtaactgaattagtwaaagaacaagttaaatatattactggtttagatgtwgttgaagttaacatgcaagttgaygatgtaatgactcaaaaagartggaaacaaaaacacgaaaaaaataaygaaaacaataaccaagaaagacaaggtttacaataa

SEQ ID NO: 3035 - DNA, 775 bp, Staphylococcus aureus
atggcagtaatttcaatgaaacaattactagaagcgggtgttcacttcggtcaccaaacacgtcgttggaacccaaaaatgaaaaaatatatcttcactgagagaaatggtatttatatcatcgacttacaaaaaacagtgaaaaaagtagacgaggcatacaacttcttgaaacaagtttcagaagatggtggacaagtcttattcgtaggaactaaaaaacaagcacaagaatcagttaaatctgaagcagaacgtgctggtcaattctacattaaccaaagatggttaggtggattattaactaactataaaacratctcaaaacgaatcaaacgtatttctgaaattgaaaaaatggaagaagatggtttattcgaagtattacctaaaaaagaagtagtagaacttaaaaaagaatacgaccgtttaatcaaattcttaggcggaattcgtgatatgaaatcaatgcctcaagcattattcgtagttgacccacgtaaagagcgtaatgcaattgctgaagctcgtaaattaaatattcctatcgtaggtatcgttgacactaactgtgatcctgacgaaattgactacgttatcccagcaaacgacgatgctatccgtgcggttaaattattaactgctaaaatggcagatgcaatcttagaaggtcaacaaggcgtttctaatgaagaagtagctgcagaacaaaacatcgatttagatgaaaaagaaaaatcagaagaaacagaagcaacwgaagaatraagaataa

SEQ ID NO: 3036 - DNA, 240 bp, Staphylococcus aureus
atggctaacaatcataaccaaaacggacaagactctacacaacaagtgattaattttttaaaagtatttaaatggagaatcgttggtttcytagcgtttctattaatcgcgatattattcttaacgttaggtttttggaaaacartacttatcatcgttttatgtttaattggtgtaggtattgggtatatgaaagaccgtaagcaagattttatgaattttttaaatcgatggagttaa

SEQ ID NO: 3037 - DNA, 111 bp, Staphylococcus aureus
atgggtgataagatattaatgcttatcaccttttttaaaaagaaaatcgaggcaaattacaaatattcaattagagtattrgcaatcttgcctataataatgctaaaatca

SEQ ID NO: 3038 - DNA, 537 bp, Staphylococcus aureus
gtgaaacgacttaaaaactttatccttggcttattaatagtagtaatcgtggggttcctgttattcatgtatatccaagatggacgtataactgaatatcaagactacttccttcaatttgaatggttccaaccattacttatttcacttgctgcactattgatattaataggtcttatattagtatttagtatcttcaaacctacgcatcgaaaacctggattatacaaagacttcgatgatggtcatgtttacgtatctcgtaaagctgttgaaaarackgcattygatacrgttgcaaaatatgaycaagtaagacaaccraatgtagttgcraaactatataacaaaaaaaataaatcttatatcgacattaaaactgactttttcgtaccraataatgttcargtwcaatctttaactgaagcaattcgtkcggatattaaaaagaatgtagaayatttyacagaaatgccagtacgtaagttagaagtwaatgtgagagatcagaaaacttctggtccacgagtgttgtaa

SEQ ID NO: 3039 - DNA, 882 bp, Staphylococcus aureus
atggcaactatttcagcaaaacttgttaaagaattacgtraaaaaactggcgcgggtatgatggattgtaaaaaagcgctaactgaaactgatggtgacatcgataaagcgattgaytacctacgtgaaaaaggtattgctaaagcagctaaaaaagcagaccgtattgcggctgaaggtttagtacatgtagaaactaaaggtaacgacgcagttatcgttgaaatcaactctgaaacagactttgttgctcgtaacgaaggwttccaagagttagttaaagaaatcgctaatcaagtattagatacaaaagctgaaactgttgaagctttaatggaaacaactttaccaaatggtaaatcagttgatgaaagaattaaagaagcaatttcaacaatcggtgaaaaattaagtgttcgtcgttttgctatcagaactaaaactgataacgatgctttcggcgcttacttacacatgggtggacgcattggtgtattaacagttgttgaaggttcaactgacgaagaagcagcaagagacgttgctatgcatatcgctgcaatcaaccctaaatatgtttcttctgaacaagttagcgaagaagaaatcaaccacgaaagagaagttttaaaacaacaagcattaaatgaaggtaaaccagaaaacatcgttgaaaaaatggtggaaggacgtttacgtaaatacttacaagaaatttgtgctgtagatcaagacttcgttaaaaaccctgatgtaacagttgaagctttcttaaaaacaaaaggtggaaaacttgttgacttcgtacgctatgaagtaggcgaaggtatggaaaaacgcgaagaaaactttgcggatgaagttaaaggacaaatgaaataa

SEQ ID NO: 3040 - DNA, 1563 bp, Staphylococcus aureus
atgaaaaataaawcagtaagtctagtgttttgggtatckttagtgatwtgtacgatatttgttgcttttggwgcaatatttccgaaacarttagaaaaactcacgcaaaacattactwcatttattgcgctacatttttcttggtattatttattgctcgttttagttattttatttgtctgtgtgtatatwttattttcragatacgcawmmattacattaggtgaagaaggygaagayccwgaattytcattgccrtcttggtttgctatgttatttagtgctggtatgggwataggacttgtgttctggacaacggcagaaccaatcagtcaygccttcaaattaacgcctattcataaagctggcacgcaatcygcwattaatgatgcaatgcagttttcatttttccattgggggattcatgcatgggcagtctatggtattgtcgcgctwgtgtttgcatattttagctttcataaaggatatcctggcttagtcagcgctacattgacgcctttattaggtgaaaargcaatgcgtggmcctttaggtggtgccattgatgtattggcagtcatagctacagtaacaggcgttgctgcaacattaggtttcggtgcattgcaaataaacgaaggtttacattttttatttaatgtaccgagtaayttcacgatgcaagtaatcttgattgtcattgcaacyatattatttacttggtcagcatggtcaggtatmgataaaggtatcaaaacgttgagtaatatcaacatgttacttgcttttgtagtacttmttggtctttttattgttgggccaacgctwtacattttaaatacatttacraatggtctaggtaattatattgcaaatttctttagtatgagtttacgyattccgwcwggyggtcaaaaattccaatggttacaaaattggacaatcttttactgggcatggtggatatcttgggcaccatttgtaggtatatttattgcacgtgtgtcaaaaggacgtacgattaaagaatttattctaggtgtactttttgtcccggcrttagtttgctttatattctttgcggtattcggcgcgtcagcaatttacttacaagataatcatattgccgawattgctaaagcwgcgacagaaacagcaacttttgcracgctacaacattayccrctaggttttgtattaagcttaattactttacttgttattatgattttctttgttacatcagcggaytcggcaacttatgttttaggkatgttgagttcaagwggtgatattaatccraagtcatttgtcaaagtgagttggggtatcattatggcattatttgcaatyatyatgatytacacaggtggtackcaagcratwcaaaatttattaatcatygcwgcgttrccattttccgtggtcattatwgcgatgatatggtcgcttwtaaaatctttragtgargaraaacckagaaatagtaataaggttttaattaaacatcgtgayccagayrtwttagaataycgttcttcaaaacatattgaygaaaattaa

SEQ ID NO: 3041 - DNA, 723 bp, Staphylococcus aureus
atggctcaaatttctaaatataaacgtgtagttttgaaactaagtggtgaagcgttagctggagaaaaaggatttggcataaatccagtaattattaaaagtgttgctgagcaagtggctgaagttgctaaaatggactgtgaaatcgcagtaatcgttggtggcggaaacatttggagaggtaaaacaggtagtgacttaggtatggaccgtggaactgctgattacatgggtatgcttgcaactgtaatgaatgccttagcattacaagatagtttagaacaattggattgtgatacacgagtattaacatctattgaaatgaagcaagtggctgaaccttatattcgtcgtcgtgcaattagacacttagaaaagaaacgygtagttatttttgctgcaggtattggaaacccatacttctctacagatactacagcggcattacgtgctgcagaagttgaagcagatgttattttaatgggcaaaaataatgtagatggtgtatattctgcagatcctaaagtaaacaaagatgcggtwaaatatgaacatttaacgcatattcaaatgcttcaagaaggtttacaagtaatggattcaacagcatcctcattctgtatggataataacattccgttaactgttttctctattatggaagaaggraatattaaacgtgctgttatgggtgaaaagataggtacgttaattacaaaataa

SEQ ID NO: 3042 - DNA, 1008 bp, Staphylococcus aureus
atgaaaatgataggatttgaraagccctttaaattggaagaaggaaatttatttaaagtatacgaacaaagaaagccaacgccagaaaaygatgatatcttagtcaaagtaaatagyattagtgtaaatcctgtagatacaaarcaacgwcaaatgraagtcactcaagcacctcgtgtacttgggtttgatgctattggtactgttgaagctatcggaccaracgttacattatttagtccgggtgacgttgtattttatgctggatcgccaaatagacaaggatcaaatgcgacatatcaattggtktcagaagctatagttgcaaargcrccacacaacataagygctaatgaagcggttagtctaccgctaactggtattacggcatatgaaacgttttttgatacatttaaaatttcacakaatcctkctgaaaayrwaggkaartcygtsttaatcattaatggygcyggkggtgtaggmagtatwgccactcaaattgctaaacggtatggtttaactgtcattacaacagcatcacgacaagaaacaacagagtggtgtgaaaagatgggcgcagatatcgtattgaatcataaagaggatttagtgcgtcaatttaaagaaaaagaaattccattagtagattatatattttgcacytataatacagacttgtattacaatactatgattgaactgataaaaccattagggcatattacractatcgtagcttttaatgaagatcaagatttaaatgcaytaaaattaaaaagtataacatttacacatgaatttatgtttgcgcgtccaattcatcgaacgcctgatatgattaaacaacatgagtatttagaagatattacgaaaaatatagaatyaggrcattaccaaccaacaacgacacaagtttttgaaggtttatcacctgaaaacttatatcaagcacatcwattgttggaaaaacartcaatgattggraaattagtaattaatatatag

SEQ ID NO: 3043 - DNA, 555 bp, Staphylococcus aureus
atgagtgacattattaatgaaactaaatcaagaatgcaaaaatcaatcgaaagcttatcacgtgaattagckaayatcagtgcaggaagagctaattcaaatttattaaayggcgtaacagttgattactatggtgcaccaacacctgtacaacaattagcaagcatcaatgttccagaagcacgtttacttgttatttctccatacgacaaaacttctgtagctgacatcgaaaaagcgataatagcrgctaacttaggtgtyaacccaacaagtgatggtgaagtgatacgtattgcwgtacctgccttaacagaagarcgtagaaaagagcgcgttaaagatgttaagaaaattggtgaagaagctaaagtatctgttcgaaatattcgtcgtgatatgaatgatcagttgaaaaaagatgaaaaaaatggcgacattactgaagatgagttgagaagtggyactgaagatgttcagaaagcaacagacaattcaataaaagaaattgatcaaatgattgctgataaagaaaaagatattatgtcagtataa

SEQ ID NO: 3044 - DNA, 1002 bp, Staphylococcus aureus
atgcaaaataaacaaattctttttaacaaaataccagaaggcatgcctcaagaggatacattcaaaattgaagasaytgacacgcctaaacttgagagcgatggygtacttgtacaaacgctgtatatttcagtggatccatatatgagaggacgtatgactaaggcagattcgtatgtacagccttttgaaattggtaaaccgattgttagccatgtcgttgcaaaagtaattgattcgacactcgcagattataaaaaaggagatgtcgttgtaggtatgttgccttggcgaatcattaatcatgtccaagcggatcaaattactaaagttccaacgacagatgtaccacttgatttatatttaagtgtyttaggaatgccaggacaaacrgcatatcatggtctgcttgatattggacaacctaaagmcggtgatactgttgtggtttcagctgcatctggygctgtaggttcagttgtaggtcaaattgctaagattaaaggttgccgtgtwgtaggtattgcgggtggcgacaaaaaagtaaattatttaacagrgacactgggctttgacgctggtattgattataagaaagaggattttgcagaakcgttagcacaagcagtaccagatggtattgatgtttattttgaaaatgttggtggwacagttggcgatgaagtatttaagcatttaaatcgttttgcacgtgtaccagtatgyggcgcaatttcgtcatataatcatcctgaagcmgatatcggaccacgtattcaaggtacgcttattaagaagcaagtaatgatgagaggcttcttrgtaagtgaattygctaatgcttttaaagaagctagtgaacagctygcaacatgggttcaagaaggtaaaattcagtcacaagtaaccattgaagatggttttgaaaatgcgccacrtgcatttaaaaatttatttackggcgataactttggtaaacaagttattaaagtwacggaataa

SEQ ID NO: 3045 - DNA, 771 bp, Staphylococcus aureus
atgtttaaaaagctaataaataaaaagaacactataaataattataatgaagaattagactcgtctaatatacctgaacatatcgctattattatggatggtaatgggcgatgggctaagaagcgaaaaatgcctagaattaaaggycattacgaaggtatgcaaacaataaaaaaaattactaggrtagctagtgatattggtgttaagtacttaactttataygccttttccactgaaaattggtcaagacctgaaagtgaagtaaattatattatgaatttgcctgtcaatttcttaaagacattyttaccggaactaattgaaaaaaatgtcaaagttgaaacaattggatttactgataagttgccaaaatcaacgatagaagcaatwaataatgctaaagaaaagacagctaataataccggcttaaaattaatatttgcaattaattatggtggcagagcagaacttgttcatagtattaaaaatatgtttgacgagcttcatcaacaaggtttraatagtgatatcatagatgaaacatatataaacaatcatttaatgacaaaagactatcctgatccagagttgttaattcgtacttcaggagaacaaagaataagtaatttcttgatttggcaagtttcgtatagtgaatttatctttaatcaaaaattatggcctgactttgacgaagatgaattaattaaatgtatwaaaatttatcagtcacgtcaaagacgctttggcggattgagtgaggagtag

SEQ ID NO: 3046 - DNA, 885 bp, Staphylococcus aureus
atgggagttaaaagtgtgaagaaaatttttgtaattaktacgacattgttagcggtcgctattattataggcwctattattayggtkgtgtttagtcaacgacaggcacaaacatttaaaatacaacaacagcaatttgttaaaaagccaattccracattgttyttacatggatttggtggtagtgccaaytctgaaaartttatggtgaagcaagcagaaaaaagaggggtaactaaagatatcatcactgcttacgtttcaaaggatggtgcagtgacatttaaagggaaactaagwaaagatgcagtgaatcctattgtgaaaattgaacttgaaaataacagacaaggctatttggataagaatgctgcgtggtttaaaaatgtactgactaagttacaatctgaatacaatttcgataaattcaactttgtcggtcactcaatggggaacttaacatttgcacaatatatgatgacatatggtaacgacaagtcactgccacagttaaacaaacaagtgaatattgcwgggacatttaatggygttttaaatatgaatgaagatgtcaatgaaattacagttgataaagatggtaaaccaagtcgaatgaatcaaccttatcagcaattacgcgtgctaaaagatatttataaaggtaaaggtatcgaagtgctaaatatttatggrgatttgaaagatggtacacattcagacggcagagtgtctaatagttcttcgaaatcattaaaatatttactgggaaatagtccgaaaagttatcgagaatctaaatatgaaggtgagyctgcacarcatagtcagcttcatgagaatgaaaatkttgctaatgagttratcgacttyttatggaaaaaataa

SEQ ID NO: 3047 - DNA, 783 bp, Staphylococcus aureus
atgaaagttagaacgctgacagctattattgccttaatcgtattcttgcctatcttgttaaaaggcggccttgtgttaatgatatttgctaatatattagcattgattgcattaaaagaattgttgaatatgaatatgattaaatttgtttcagttcctggtttaattagtgcagttggtcttatcatcattatgttgccacaacatgcagggccatgggtacaagtaattcaattaaaaagtttaattgcaatgagctttattgtattaagttatactgtcttatctaaaaacagatttagttttatggatgctgcattttgcttaatgtctgtggcttatgtaggcattggttttatgttcttttatgaaacgagatcagaaggattacattacatattatatgcctttttaattgtttggcttacagatacaggggcttacttrtttggtaaaatgatgggyaaacataagctttggccagtaataagtccgaataaracaatcgaaggattcataggtggcttgttctgtagtttgatagtrccwcttgcaatgttatattttgtagatttcaatatgaatgtatggatattacttggagtgacattgattttaagtttatttggtcaattaggtgatttagtggaatcaggatttaagcgtcatttcggcgttaaagactcaggtcgwatactacctggacacggtggtattttagaccgatttgacagytttatgtttgtgttaccattattaaatattttattaatacaatcttaa

SEQ ID NO: 3048 - DNA, 1413 bp, Staphylococcus aureus
atgactaaaacattacctgaagattttatttttggtggagcaacagcagcatatcaagcagaaggtgcgacaaatacrgatggtaaaggtcgygtwgcatgggatacgtatttrgaagaaaactattggtayactgcagaaccagcgagtgatttttatracagatatccagtggatttagaattaagtgaaaaattcggtgttaatggtatccgwatttcaattgcatggtcwcgtatcttcccaaatggatatggcgaagttaaccctaaaggtgttgagtattaccataagttatttgcrgagtgtcataaacgtcatgttgaaccatttgtaacattgcatcattttgatacaccagaagtgttacacaaagatggcgattttctaaatcgtaaaacgattgactactttgtagattatgctgaatattgttttaaagaattcccagaagtaaaatattggactacattcaatgaaattggaccwattggtgatggycaatatttagtaggtaaattccctccaggtattaaatatgattttgaaaaagtwttccaatcwcatcayaayatgatggtkgctcatgcwagagcagtraaattattyaargatggcggmtaymaaggagaaattggtgttgtacacgcattgccaacaaaatatccgttcgatccatcaaatcctgaagatgttcgtgcagcagaattagaagatatcatccataayaaattcatcttagatgcaacatatttaggtragtattctcgtgaaacgatggaaggtgtgcaacatatcttatctgttaatggcggtaaattaaayattacagatgaagattatgccattttagatgcagccaaagatttaaacgacttcttaggtatcaattactacatgagtgaytggatgagaggttaygatggagaatctgaaatyacgcataatgcgacaggtgataaaggcggttctaaataccaacttaaaggtgtcggwcaacgtgaatttgatgtcgacgtacctcgcacagactgggactggatgatctatcctcaaggtttatatgatcaaatcatgcgtgttgttaaagattatcctaactatcayaagatttatatcactgaaaatggtttaggatataaagatgaatttattgaatctgaaaaaacagttcatgatgatgcacgtattgattatgtaagacaacatttraacgttattgcagatgctattawagatggtgcaaatgttaaaggttactttatttggtcattaatggatgtgttctcttggtcaaatggttatgaaaaacgatatggtttattctatgtcgattttgagactcaagaacgytatcctaagaaaagtgcttattggtacaaagagttagccgaaacaaaagaaattaaataa

SEQ ID NO: 3049 - DNA, 1185 bp, Staphylococcus aureus
atgtgtccagaatttgcgatcggtatgggrccraaaatttttagttttagaaaaaaygaaacactttacactattaggttattgcctgttggtggatatgttcgtatggcaggagatggcttagaagagccaccagtcgagccyggtatgaacgttaaaattaaactkaatgaagaaaatgaaataacacatatcatattagatgatcatcataagtttcaacaaattgaagcratcgaagttaaaaaatgtgattttaargatgacttattcatagaaggtatcactgcttatgataatgaaagacatcattttaaaattgctagaaagtctttctttgttgaaaatggtagcttagttcaaattgctccgagagacagacaatttgcacataaaaagccatggccgaaatttttaacattatttgcgggaccgttatttaactttatattagctttagtyctatttattggtcttgcatattatcaaggyacrcctacktctactgtagaacaagtcgcagataagtatccagctcaacaagcaggmwtacaaaaaggygataaratygtycaaattggcaaatataaaatatctgaatttgatgatgttgataaggcgttagataaagttaaagataataagacgactgttaaatttgaacgtgatggtaaaacraagtcagttgaattaacacctaaaaagacygaaaraaaactgactaaagtaagttcagagacgaagtatgttctcggattccaaccagcgagtgaacrtacrctyttyaaaccaattgtatwyggatttraaagctttttrawmggtagtacwytaatttttwcagctgtagtmggtatgttggctagtatatttacgggcggattctcrtttgatatgttaaatggtccggttggtatttatcataacgtcgactcagttgttaaagcgggtatcattagcttaattggwtacactgcgttattaagtgtaaacttaggtattatgaatttaattcctattcctgcactagacggtggtcgtattttatttgttatatatgaagcgattttcagaaaaccagttaataaaaaagcggaaacaacgattatygctattggtgccattttcatggtcgttatwatgatattagtaacgtggaatgatattcgacgatatttcttataa

SEQ ID NO: 3050 - DNA, 1713 bp, Staphylococcus aureus
atgatgcaaaaattgatcgcacaaattgaaaaagggaagccatttttcgagaaattatcacgtaacatatatttaagagccatccgtgatggatttatttctgcaatgcctgtcatcttattctcaagtatctttctattaattgcataygtgccaaatatatttggttttaaatgggataaaggcatggaagccattttaatgaaaccatataactatacgatggggcttgtagcatttttagtagcaggaacgacagcgaaatctttaacagattcatttaaccgtaagctagaaagtacaaatcaaattaactttatttctacaatgcwagcagcgatgtgtggattcttgttcttagcttctgatccagccaaagatggtggattcttaagtgcrtttatgggaactaaaggtttattaacagcattyttatcagcatttgtaactgttattgtttataacttctgtgtgaagcgcaatattacaattaaaatgccgaaagaagtaccgccgaatatttcacaagtatttaaggacttaattccattttcagcggtaatcatcattctttatgcaytagatttagtcattcgcaacagctttaaatcaaatgtagcggaaggtattttaaaattattcgaaccattatttacagcagcagatggatggatwggtgtcacaattatctttggtgcctttgcattattctggtttgtaggwattcatggtccrtcaatwgtagarccagcaattgcagccattacatatgcgaatatcgaagcgaacttcaagttgcttcaagctggwgaacacgcagataaaattattacatcaggtacacaaatgtttatcgttacwtttggwggtacgggtgcaacattggtcgtsccrttyatgtttatgtggatgacgaaatctaaacgaaacaaagcgattggacgtgcatcwgttgtaccaacattctttggtgtaaacgarccrattttattyggkgcaccactagtattgaatcctgtgttctttattccatttgtattagcrccaattgtkaacgtatggatwttyaaacttttcgttgaagtgttaggaatraayagttttagtgtraayttaccwtggacaacaccaggtccaytsggcatyatcatgggtacwggwtttggtttatggtcattcgtwctagckattactttrattgttgtagatattattatttactacccattcctaaaagtttatgatagtgaaattcttgatgaagaagaaggacgtaaagaaagtaattcagatttaaaagaaaaagttgcagcaaactttgatacgaaaaaagctgattcaattttagcggcaagtggtgtatcagacgatgcagctaaagcttcaaatatcacagaacaaacaaatgtcttagtactttgtgccggtggtggtacaagtggattattagccaaygcacttaataaagcagctgaagaatatcatgtgccagtgaaagcrgcagctggcggatayggcgcacatatggacattatgaaagagtaccaattaatcattttagcgccacaagttgcgtctaactatgaagatattaagcaagatacagatagattaggtattaaattagcgaagactcaaggtgcygaatatatcaaattgacacgagayggccaagcagcccttgatttcgttcaacaacaatttgaaaattaa

SEQ ID NO: 3051 - DNA, 1704 bp, Staphylococcus aureus
atgaagcaatccaaagtttttataccaacgatgcgtgaygtgccatcagaagcagaagcacaaagtcatcgtttattattgaaakcgggtttgataaaacaaagtacaagtgggatttatagttatttaccgctagcaacacgtgtgttaaataatattactgcaattgtgcgacaagaaatggaacgtatcgattctgttgaaattttaatgccagcgttacaacaagctgaattatgggaagaatcaggacgttggggtgcatatggcccagaattaatgcgtttacaagatagacatggaagacaatttgcattaggtccaacacatgaagaattagttacatcaatagtaagaaatgaattgaaatcatacaaacaattaccgatgacattattccaaattcaatctaaattccgtgatgaaaagagaccacgttttggtttacttcgtggkcgtgaatttattatgaaagatgcrtattcattccatgctgacgaggcatcattagatcaaacgtatcaagatatgtatcaagcgtatagccgtatttttgagagagttggcattaaygcwagaccagtwgtwgcagattcaggtgctatwggcggtagccatacacatgaatttatggcattaagtgctatcggtgaggatacaatcgtttacagtaaagaaagtgaytatgctgctaayatcgaaaaagcagaagtcgtttacgaaccaaatcataagyatwctactgtgcaacctwtagaaaaaattgaaacaccaaatgttaagactgcrcaagaattggcagacttcttaggtagaccagtagatgaaatcgttaaaacgatgattttcaaagttgatggcgaatatattatggttttagtgcgtggmcatcatgaaattaatgacattaaattaaaatcttatttcggcacagataatattgaattagcaacacaagacgaaattgttaatttagttggtgcaaatcckggttcactaggtcctgtwattgataaagaratcaaaatttatgcagataattttgtgcaagatttaaataatttagttgtcggkgctaacgaagatggytatcacttaattaatgtaaatgtaggtagagacttcaacgttgatgaatatggcgatttccgttttattttagaaggcgaaaagttaagtgatggttcaggcgytgcacattttgctgaaggwattgaagttggtcaagtattcaaattgggtactaagtattcagaatcaatgaatgctacattcttagataaycaaggaaaagcycaayckttaattatgggytgttacggwattggaatttctagaacgctragtgcgattgttgaacaaaatcacgatgataatggwattgtttggcctaaatcagttactccrtttgatttacatttaatttctattaatcctaagaaagatgatcaacgagarctagcrgatgcactatatgctgaatttaatactaaatttgatgtgttgtacgatgatcgtcaggaacgtgcdggtgtyaaatttaatgatgccgatttaattggtttaccactgcgaattgttgttggtaaacgtgcatcggaaggtattgtagaagttaaagaacgtttaacaggtgatagcgaagaagtycacattgatgacttaatgactgtcattacaaataaatatgataayttaaaataa

SEQ ID NO: 3052 - DNA, 312 bp, Staphylococcus aureus
atgaatagagaagaagtccaattattaggttttgaaattgttgcatttgcaggggatgcacgttctaagtttttagaagcattracagcagctcaagctggagattttgcaaaagcagatgcaytgattgaagaaggaaacaattgcattgckgaagcgcatagagcacaaacaagcytrttrgctaaagaagcrcaaggtgatgatattgcatacagtgtracgatgatgcatggtcaagaycatttaatgacaacaattttactgaaagatttaatgaagcatttattagaattttataaaagagggtga

SEQ ID NO: 3053 - DNA, 765 bp, Staphylococcus aureus
atgattgatattcataaccatatattgcckaatatcgatgacggtccgacaaatgaaacagagatgmtggatcttttaaracaagcgacaacacaaggtgttacagaartyattgtaacatcacatcacttacatcctcgatataccacacctatagaaaaagtgaaatcatgtttaaaccatattgaaagcttagaggaagtacaagcactaaatctaaagttttattatggtcaggaaataagaattaccgatcaaatccttaatgatattgatcgaaaagttattamcggtattaatgattcacgytatttactaatagaatttccatcaaatgaagttccacactatactgatcaattatttttcgaattacagagtaaaggctttgtaccgattattgcacatccagagcgraataaagcaataagtcaaaaccttgacatactatacgatttaattaacaaaggtgctttaagtcaagtgacaacggcgtcattagcgggtatttccggtaraaaaattagaaaattagcaattcaaatgattgaaaacaatctgacacatttcatcggttcagatgcgcataacacagaaatcagaccgttcttaatgaaagacttatttaatgataagaaattacgtgattattatgaagatatgaacggatttattagtaatgcgaagttagttgttgatgataaaaaaattcctaaacgaatgccacaacaagattataaacagaaaagatggtttgggttataa

SEQ ID NO: 3054 - DNA, 1206 bp, Staphylococcus aureus
atgtggtttgaaaaatttaaaaataagaacaatgaaacgaagtatagatactacgagaaatacaaagatccgtatacagataaatggaaacgtgtaagtgttgtcttgaataagaatacaaagcaatcgcaaaaagaggcaatgtttcgtttagaagaaaaaataaaagaaaaactaaacaacaagtcgtcaagcgaattaaaaactttgacttttcacgcgttattagatgaatggcttgaatatcatataaaaacatctggctttaaagtaacgacgcttgataatttgaaaacaagaatcaaaaacatcaaaaagaacagttctcaaaatttacttttaaacaaaattgatacaaagtacatgcaaacatttattaacgaattatcaaacgtatattctgcaaatcaggtaaagcgtcaacttggacatatgaaagaagctattaaatacgccgttaaattttacaattatccaaacgaacacatattaaatagcgtcacactaccaaagaagagtaagacgatagaagatatagaaaaagaagaagcgaaaatgtacaactatttagagatggaacaggtaatacagatacgcgattttatactgaacgataataacatgcagtatagagctcgtattttagttgctggggctgtagaagttcaagctttaacaggtatgcgcataggtgagttattagctctccaagttaaagatgttgacctcaaaaataaaacgatcgmtattaatggcactattcacagaatcaaatgtaatgctggatttggtcacaaagatactacgaagaccgcaggttcaaaaagaaaaatcgccatcaattcaaggatagcaaatgtattgaaaaaaataatgttagaaaataaaaagatgcaacaatgggaaccaagctatgttgatagagggtttatattcacaacttgccaaggaaatcctatgcaaggcagtaggataaacaaacgattgtcctcagctgcagaatcattaaatataaataaaaaagttactactcacacactaaggcatacacacataagtttattggcggaaatgaatatatcgttaaaagcaattatgaaaagagtaggacatasagatgaaaaaacgactataaaggtrtatacmcatgtaacagagaaaatggacagagagttagagcaaaaattagaaaaacttgtgtactaa

SEQ ID NO: 3055 - DNA, 4311 bp, Staphylococcus aureus
atgacagagcaacaaaaatttaaagtgcttgctgatcaaattaaaatttcaaatcaattagatgctgaaattttaaattcaggtgaactgacacgtatagatgtttctaacaaaaacagaacatgggaatttcatattacattaccacaattcttagctcatgaagattatttattatttataaatgcaatagagcaagagtttaaagatatcgccaacgttacatgtcgttttacggtaacraatggcacgaatcaagatgaacatgcaattaaatactttggrcactgtattgaccaaacagctttatctccaaaagttaaaggtcaattgaaacagaaaaagcttattatgtctggaaaagtattaaaagtaatggtatcaaatgacattgaacgtaatcattttgataaggcatgyaatggaagtcttatcaaagcgtttagaaattgtggttttgatatcgataaaatcatmttcgaaacaaatgataatgatcaagaacaaaacttagcttctttagaagcacatattcaagaagaagacgaacaaagtgcacgattggcaacagagaaacttgaaaaaatgaaagctgaaaaakcgaaacaacaagataacaassaaagtgctgtygataagtgtcaaattggtaagccgattcaaattgaaaatattaaaccaattgaatctattattgaggaagagtwtaaagttgcaatagagggtgtcatttttgatatwaacttaaaagaacttaaaagtggtcgycatatcgtagaaattaaagtgactgactatacggactcwttagttttaaaaatgtttactcgtaaaaacaaagatgatttagaacattttaaagcgctaagtgtwggtaaatgggttagggctcaaggtcgtattgaagaagatacatttattagagatttagttatgatgatgtctgatattgaagagattaaaaaagcgacaaaaaaagataaggctgaagaaaarcgwgtagaattccacttrcatactgcaatgagycaaatggatggtataccmaatattggtgcgtatgttaaacaggcagcagactggggacatccagccattgcggttacagaccataatgtkgtgcaagcatttccagatgctcacgcagcagcggaaaaacatggyattaaaatgatatayggtatggaaggtatgttagttgatgatggtgttccgattgcatacaaaccacaagatgtcgtattaaaagatgctacttatgttgtrttcgacgtygagacaactggtttatcaaatcagtatgataaaatcatcgagcttgcagctgtgaaagttcataacggygaaatcatcgataagtttgaaaggtttagtaatccgcatgaacgattatcggaaacgattatcaatttgacgcatattactgatgatatgttagtagatgcccctgagattgaagaagtacttacagartttaaagaatgggttggcgatgcgatattcgtagcrcataatgcttcgtttgatatgggcttyatcgayacgggatatgaacgtcttggrtttggaccatcwacgaatggtgttatcgatacwttagaattatctcgtacgattaatactgaatatggtaaacatggtttraatttcttrgctaaaaaatayggygtagaattaacgcaacatcaccgtgccatttatgatacagargcaacagcttacattttcataaaaatggttcaacaaatgaaagaattaggygtattaaatcataacgaaatyaacaaaaaactcagtaatgaagatgcatataaacgtgcaagacctagycatgtcacattaattgtacaaaaycaacaaggtcttaaaaatctatttaaaattgtaagtgcatcattggtgaagtatttctaccgtacrcctcgaattccacgttcattgttagatgaatatcgtgagggattattggtaggtacagcgtgtgatgaaggtgaattatttacggcagttatgcagaaggaccagagycaagttgaaaaaattgccaaatattatgattttattgaaattcaaccaccggcactttatcaagatttaattgatagagagcttattagagatactgaaacattacatgaaatttatcaacgtttaatwcatgcaggtgacacagcgggtatwcctgttattgcgacaggaaatgcacactatttgtttgaacatgatggyatcgcacgtaaaattttaatagcatcacaacccggcaatccacttaatcgctcaactttaccggaagcacattttagaactacagatgaaatgttaaacgagtttcattttttaggtgaagaaaaagcgcatgaaattgttgtgaaaaatacaaacgaattagcagatcgaattgaacgtgttgttcctattaaagatgaattatacacaccgcgtatggaaggtgctaacgaagaaattagagaactaagttatrcaaatgcgcgtaaactgtatggtgaagayctgcctcaaatcgtaattgatcgattagaaaaagaattaaaaagtattatcggtaatggatttgcggtaatttacttaatttcgcaacgtttagttaaaaaatcattagatgatggatacttagttggttcccgtggttcagtaggttctagttttgtrgcgacaatgactgagattactgaagtaaacccgttaccgccacactatatwtgtccgaactgtaaaacgagtgaatttttcaatgatggttcagtaggatcaggattygatttacctgataagacgtgtgaaacttgtggagcgccacttattaaagaaggacaagatattccgtttgaaamatttttaggatttaarggagataaagttcctgatatcgacttaaactttagtggtgaatatcaaccraatgcccataactacacaaaagtattatttggtgaggataaagtattccgtgcaggtacaattggtacygttgctgaaaagactgcttttggttatgttaaaggytatttgaatgatcaaggyatccacaaaagaggygctgaaatagatcgactcgttaaaggatgtacaggtgttaaasstacaactggacagcatccaggrggtattattgtagtacctgattacatggatatttatgattttacgccgatacaatatcctgccgatgatcaaaattcagcatggatgacgacacattttgatttccattctattcatgataatgtattaaaacttgatatacttggacacgatgatccaacaatgattcgtatgcttcaagatttatcrggvattgatccaaaaacratacctgtagatgayaaagaagtyatgcaratwtttagtacacctgaaagtttrggtgttactgaagatgaaattttatgtaaaacaggtacrtttggggtwccagaattcggtacaggrttcgtgcgtcaaatgttagaagatacaaagccaacaacattttcwgaattagttcaaatctcaggattatctcatggkacagatgtgtggttaggyaatgctcaagaattaattaaaacmggtatatgtgatttatcaagtgtaattggttgtcgtgaygatatcatggtttatttaatgtatgctggtytagaaccatcaatggcttttaaaataatggagtcagtacgtaaaggtaaaggtttaactgaagaaatgattgaaacgatgaaagaaaatgaagtgccrgattggtatttagattcatgtcttaaaattaagtacatrttccctaaagcccatgcagcagcatacgttttaatggcagtacgtatcgcatatttcaaagtacatcatccactttattactatgcatcttactttacaattcgtgcgtcagaytttgatttaatcacgatgattaaagataaaacaagcatwcgaaatactgtaaaagacatgtattctcgctatatggatctaggtaaaaaagaaaaagacgtattaacwgtcttggaaattatgaatgaaatggcgcatcgrggttatcgmatgcaaccgattagtttagaaaagagtcargcgttcgaatttatcattgaaggcgawacacttattccgccgttcatatcagtgcctgggcttggcgaaaacgttgcgaaacgaattgttgaagctcgtgacgatggmccatttttatcaaaagaagatttaaacaaaaaagctggattatmtcagaaaattattgagtatttagatgagttaggctcattaccgaatttaccagataaagctcaactttcgatattygatatgtaa

SEQ ID NO: 3056 - DNA, 981 bp, Staphylococcus aureus
atgtcaaaatckaatcaaaaaatcgcatcaattgaacaaytaagtaayaacgaaggtatcatttctgcattagcatttgaccaacgtggtgctttaaaacgmatgatggcwaaacatcaaackgaagarccaactgtmgctcaaattgaacaattaaaagtattrgttgcggaagaattaacrcaatatgcrtcttcaattttattagatccwgaatayggtttaccagcwtcwgatgcacgtaacaaagattgtggattattrctwgcttatgaaaaaactggwtatgacgtaaaygctaaaggtcgtttacctgactgtttagtagagtggtctgcaaaacgtttaaaagaacaaggygcaaatgctgttaaattcttactttactatgatgttgatgatgctgaagaaattaacattcaaaagaaagcatayattgaaagaatcggttcagaatgtgttgcagaagayattccwttcttyttagaagtattaacatacgatgacaacattcctgataacggtagtgttgaattygcaaaagttaagcctagaaaggttaacgaagcaatgaaattrttctcagaaccacgctttaaygttgatgtattgaaagttgaagtaccagtaaacatgaartatgtagaaggctttgctgaaggtgaagtggtttatacaaaagaggaagcggcacaacactttaaaratcaagatgcakcaactcatttaccatacatttacttaagtgctggtgtttctgcggaattattccaagaaactttaaaatttgctcacgaagctggtgctaaattcaacggkgtactttgtggccgtgctacatggtctggtgctgttcaagtatacattgaacaaggtgaagatgctgctcgtgaatggttacgtacaactggtttcaaaaatattgatgacttaaataaagtattaaaagatactgcgacatcttggaaacaaagaaaataa

SEQ ID NO: 3057 - DNA, 468 bp, Staphylococcus aureus
atgagtaaaattacagaacaagtagaagtgattgttmaaccaattatggaagacttgaattttgaacttgtagacgttgaatatgtcaaagagggtagagatcattttcttagaatctctattgataaagaaggtggcgtagatttaaatgattgtacgctagcttctgaaaaaataagtgaagctatggatgcaaatgatcctattcctgaaatgtattatttagacgtagcgtcacctggtgcagaacgtccaattaaaaaagaacaagatttccaaaatgcaataactaaacctgtatttgtttctttatatgtaccaattgaaggtgaaaaggaatggttaggcattttacaagaagtcaataatgaaacaattgtagtacaagttaaaatcaaagcaagaacgaaagatatagagataccgagagacaaaatagcaaaagcacgtcacgcagttatgatttaa

SEQ ID NO: 3058 - DNA, 933 bp, Staphylococcus aureus
atgattttaactttaacattaaatccatccgttgatatttcatayccattaacagcattgaaattagatgatgttaatcgtgttcaagaagtaagtaaaacagctggtggtaaaggtttaaatgtaacaagagtacttgcgcaagtaggygagccagtccttgcgagtggttttattggcggtgaattaggtcaatttattgctaaaaaattagatcatgccgrcatcaagcatgcattttataacattaagggtgaaacacgaaactgcattgcaattttacatgaaggrcaacaaacagaaattttagagcagggaccggagattgataatcaagaggctgcaggatttattaaacattttgarcaattaytagaaaaagttgaagcagttgctatttcaggtagcttaccwaaaggattaaatcaagattattatgcacaaatyattgaacgatgccaaaacaaaggtgtgcctgtgatattrgaytgctcgggtgcaactttrcaaacagtwttggaaaatccatacaaaccwacagtcattaaaccaaacatttctgaaytatatcarttgcttaaccagccacttgatgaaagtttagaaagtttgaaacargcagtktcacaacccttattcgaaggrattgagtggattattgtgtctttaggtgcacaaggtgcrttcgctaagcacaatcayacattctatagagtgaatattccgamaataarygtattaaatccggttggttcaggtgattctacagttgctggaattacttcagcaattctyaatcatgaaaacgaccacgatttactaaaaaaagcyaatactttaggcatgctgaatgcrcaagaagcacaaacaggwtatgtcaatttaaataattatgatgawttattcaatcaaattgaagttttagaggtgtaa

SEQ ID NO: 3059 - DNA, 1176 bp, Staphylococcus aureus
gtgtcaagtaatgaattattattagctactgagtatttagaaaaagaaaagaagattcctagagcagtattaattgatgctattgaagcagctttaattactgcatacaaaaagaattatgatagtgcaagaaatgtccgtgtggaattaaatatggatcaaggtactttcaaagttatcgctcgtaaagatgttgttgaagaagtatttgacgacagagatgaagtggatttaagtacagcgcttgttaaaaaccctgcatatgaaattggtgatatatacgaagaagatgtaacacctaaagattttggtcgtgtaggtgctcaagcagcgaaacaagcagtaatgcaacgtcttcgtgatgctgaacgtgaaattttatttgaagaatttatagacaaagaagaagacatacttactggaattattgaccgtgttgaccatcgttatgtatatgtgaayttaggtcgtatygaagctgttttatctgaagcagaaagaagtcctaacgaaaaatatattcctaacgaacgtatcaaagtatatgttaacaaagtggaacaaacgacaaaaggtcctcaaatctatgtttctcgtagccatccaggtttattaaaacgtttatttgaacaagaagttccagaaatttacgatggtactgtaattgttaaatcagtagcacgtgaagctggcgatcgctctaaaattagtgtcttctctgaaaacaatgatatagatgctgttggtgcatgtgttggtgcyaaaggcgcrcgtgttgaagctgttgttgaagagctaggtggygaaaaaatcgayatcgttcaatggaatgaagatccaaaagtatttgtaaaaaatgctttaagcccttctcaagtkttagaagttattgttgatgaaacaaatcaatctacartagttgttgttcctgattatcaattgtcattagcgattggtaaaagaggacaaaacgcacgtctagctgctaaattaaccggctggaaaattgatattaaatcagaaacagatgcgcgygaagcgggtatctatccagtagttgaagctgaaaaagtaactgaagaagatrttgctttagaagatgctgacacaacagaatcaaccgaagaggtaamtgatgtttcagttgaaacaaatgtagagaaagaatctgaataa

SEQ ID NO: 3060 - DNA, 516 bp, Staphylococcus aureus
atgaagattgcattaggatgcgaccatattgttacagatacaaaaatgcgtgtatctgaatttttaaaatcaaaaggacatgaagtcattgacgtaggaacatacgatttyacaagaacacattatccaatttttggtaaaaaagttggmgaacaagttgttagcggtaatgcagacttaggtgtttgyatttgtggaacaggtgttggtattaacaatgctgtaaataaagtacctggcgttcgttcagcactagtacgtgatatgacatcagcgytataygctaaagaagaattaaatgcgaacgttattggcttyggtggacgtattatwggtgagttattaatgtgcgatattatcgatgcatttattaaygctgaatataaascaactgaagagaayaaaaaattaatcgctaaaattaaacatttagaaacaagcaatgcagatcaagctgatccacatttctttgatgaattcttagaaaaatgggacagaggcgaataccacgattaa

SEQ ID NO: 3061 - DNA, 285 bp, Staphylococcus aureus
atgaaaaagaaaaaaattccgatgcgaaaatgtattctttcaaatgaaatgcatcccaaaaaagatatgattcgtgttgttgttaataaagaaggcgaaatctttgcggatgttactggaaagaaacaaggccgtggcgcrtatgtttctaaagatgttgctatggttgaaaaagcacaacaaaaagaaattttagaaaaatattttaaagcatctaaagagcaattggatcckgtttayaaagaaattattagattaatttatagagaagagatyccaaaatga

SEQ ID NO: 3062 - DNA, 429 bp, Staphylococcus aureus
atggcgattattattggttcagatgaagctggcaaacgattaaaagaagtcatcaaatcatacttattagacaataaatatgaygttgttgacgtaacagaaggacaggaagttgactttgttgatgcaactttggctgtagcaaaagatgttcaaagtcaagaaggtaacttaggtattgttatcgatgcatttggtgcaggtagctttatggttgctacaaaaatcaaaggcatgattgctgctgaagtatcagatgaacgctctggatatatgactagaggccataacaattcaagaatgatcactatgggrtctgaaattgttggagacacattagcgaaaaatgtcgttaaaggttttgttgaaggtaaatacgatggtggtagacaccaaatccgygtagatatgcttaataaaatgtgctar

SEQ ID NO: 3063 - DNA, 318 bp, Staphylococcus aureus
atgagtatagatcaaatattaaactttttaggattagcaatgagagcyggtaaagtaaaaacaggtgaatcagtcattgttaatgaratwaaaaaaggaaatttraagctcgttattgttgcaaatgatgcgtctrataatacagctaaattaattacagataaatgtaagagttacaaagttccattcagaaagtttggaaatcgaaatgaattgggaatagcacttggaaaaggtgagcgtgttaatgtagggattactgacccaggctttgctaaaaagttgctatcratgatagatgaatatcataaggagtga

SEQ ID NO: 3064 - DNA, 2118 bp, Staphylococcus aureus
atgagtaaacaaagaatttacgaatatgcgaaagaattaaatctaaagagtaaagagattatagatgagttaaaaagcatgaatatwgaggtttcaaatcatatgcaagctttggaagatgaccaaattaaagcattagataaaaagttcaaaaaagaacaaaagaacgacaataaacaaagcactcaaaataatcaccaaaaatcaaacaatcaaaaycaaaataaagggcaacaaaaagataacaaaaagaatcaacaacaaaataataaaggcaacaaaggcaataaaaagaataatagaaataataagaaaaataacaagaataataaaccacaaartcaaccagctgctccaaaagaaataccatcaaaagtgacatatcaagaaggtattacagtaggcgaatttgcggataaattaaatgttgaatcatcagaaattatcaaaaaattattcttacttggtattgttgctaatatcaatcaatcattaaatcaagaaacaatcgaattaattgccgatgattatggcgttgaggttgaagargaagttgtgattaatgaagaagayttatcaatctayttcgaagacgaaaaagatgatccagargcaattgagagaccagcwgttgtaacaattatgggacatgttgaccatggtaaaackactttattagattcaattcgtcatacaaaagttacagcaggtgaagcaggyggaatcactcaacatattggtgcatatcaaattgaaaacgatggcaaaaaaatcactttcttagatacaccgggacatgctgcatttacaacgatgcgtgcgcgtggtgcacaagtaacagatattacwattttagtagtagcagctgacgatggtgttatgccacaaacaattgaagcaattaaccatgctaaagaagcagaagtaccaattattgttgcagtaaataaaattgataaaccaacttcaaatcctgatcgagttatgcaagaattaactgaatatggtttaattcctgaagattggggyggcgaaacaattttcgttccactttctgcattaagtggtgatggtatcgacgatttattagaaatgataggattagttgcagaagttcaagaacttaaagcaaatcctaaaaaccgtgctgttggtacagttatcgaagctgaattagataaatcacgwggtccttctgcatcattattagtacaaaacggtacattaaatgttggkgatgcgattgtagtkggtaatacttacggccgtatycgtgcaatggttaatgacttaggtcaaagaatcaaaayggctggtccatcaacgcctgttgaaattacaggtattaatgatgtgccacaagctggggatcgctttgttgtatttagtgatgaaaaacaagctcgtcgtattggtgaatcaagacacgaagctagcattrtwcaacaacgtcaagaaagtaaaaatgtttcattagataacctgtttgaacaaatgaaacaaggtgaaatgaaagayttaaacgttattattaaaggtgatgttcaaggttctgttgaagctttagctgcatcattaatgaaaattgatgttgaaggcgtaaatgttcgtatcattcatacagcggttggtgcrattaaygagtcagacgtgacacttgctaatgcctcaaatggtattatcattggtttcaatgttcgtccagacagtggtgcaaaacgtgctgcagaagctgaaaatgttgatatgcgtttacacagagttatttataatgttatcgaagaaattgaatcagcgatgaaaggtttacttgatccagaatttgaagaacaagttatcggacaagctgaagttcgtcaaacattcaaagtttctaaagttggtactattgctggatgttatgttactgaaggtaaaattacgcgaaatgctggtgtacgtattattcgtgatggtattgttcaatatgaaggcgaattagatacacttaaacgtttcaaagatgatgctaaggaagttgcaaaaggttatgaatgtggtattacaattgaaaactacaatgaccttaaagaaggcgatgttatcgaagcatttgaaatggttgaaattaagcgttaa

SEQ ID NO: 3065 - DNA, 792 bp, Staphylococcus aureus
atgacccatcgcctaaataaaggaggcaattttacattgaataaacatgaacgtttggacgaaattgctaaactagtgaataaaaagggcacgataagaacgaatgaaatcgtcgaaggtttaaatgtgtctgatatgacagttcgaagagatttaattgarttggaaaataarggsattttaacgaagattcatggtggtgcacgcagtaattcaacatttcagtataaagaaatatcrcataaagaaaaacatacycgtcaaattgcwgaaaaamgatwtatagctarraaagctgcatcattaattgaagatggggatactttgtttttcggaccrggaacaacagtggaactattagcrgaagaagtcaatcatcatacgctcacaattattacgaattgtttgccrgtgtataaaattttgttrgaaaaacaaacagcacattttcgtgtctatttaattggtggtgaaatgcgccatattacagaagcrtttgtaggtgaaatggcgaaygccatgttrgaaaaactaagatttagcaagatgttctttagtagtaacgcagtaaataaaggtgctgtgatgacatctacattagatgaagcytatacgcaacaaytggcactaagtaattcaattgaaaaatacttgytaatygatcatacgaaagttggsaaagaagattttacatcattttgtcagttaaacgaattgactgcagtggtcatggactatgaagatgaagaaaaagtagaaacgattaaaacatatattgaagtagtcgactaa

SEQ ID NO: 3066 - DNA, 351 bp, Staphylococcus aureus
atgagcagtatgagagcagagcgtgttggtgaacaaatgaagaaggaattaatggatatcatcaacaataaagtcaaagatcctcgagttggttttattacaattacagatgttgttttaacaaatgatttatcgcaggctaaagtatttttaactgtattaggtaacgataaagaagtagaaaatacatttaaagcacttgataaagcaaaaggcttcattaagtctgaattaggttctagaatgcgattacgtattatgccggaattaatgtatgaatatgatcaatcaatcgaatatggyaataaaattgaacgaatgattcaagatttacacaaacaagatagataa

SEQ ID NO: 3067 - DNA, 606 bp, Staphylococcus aureus
atgtgctttgatataaataatttkgatataaaaaagttgaattttagaaaggtaaaaaacgcaattcatttaagtttaagtggcgataaataccagtttttggaggacggtaaaactatcaataatacttattttttagctgtatatgataatgcaataaacatttttgaagatttgttttcgccttctgattctataaatttggttcatgtagtatatgtttatartgaaccttataagaraacaaatgttataaaaaaatttacatcgttaacaatagatgaattgtattactttaaagaatataaaaaggagaaggatgataatattttgtgcgaggagttttcatataagtgttccataaaagatataaaatataaaaaattattaaaagctatatccaatcaagactttaaagggttagttccaaatatcaatcagaatgataattattctgaaatatatataattaacaatactaaaaacttaatatatcatttatatgatgatagaggtctatggytagcttttaataataatgaagattatgcaagatattctgaaaaatataatgatttaatatyggaatttgataaygaagatatc

SEQ ID NO: 3068 - DNA, 918 bp, Staphylococcus aureus
atgtataayggkatattaccagtatataaagarcgyggtttaacaagtcatgacgtygtattcaaattgcgtaaaatwttaaaractaaaaaaataggkcacackggtacgcttgatccygaagttgcaggcgtgttaccggtatgtataggtaatgcaacgagagttagtgattatgttatggatatgggyaaagcttatgargcaackgtatcgataggmagaagtacaacractgaagatcaaacgggtgatacattggaaahraarggtgtacaytcagcwratttyaayaakgacgatattgaccgattgttagaaarttttaaaggtrtyattgaacaaattccgccratgtaytcatcmgtcaargtraatggyaaaaaattatatgaatatgcgcgtaataatgaaacagttgaaagaccaaagcgtaaagttaatattaaagayattgggcgtatatctgaattagattttaaagaaaatgagtgtcattttaaaatacgygtcatctgtggyaaaggtacatatattagaacgytagcractgatatyggtgtgaaattaggctttccggcacatatgtcgaaattaacrcgaatcgagtctggtggatttgtgttgaaagatagccttacattagaacaaataaaagaacttcatgagcaggattcattgcaaaataaattgtttcctttagaatatggattaaagggtttgccaagyattaaaattaaagattcgcacataaaaaaacgtattttaaatgggcagaaatttaataaaaatgaatttgataacaaaattaaagaccaaattgtatttattgatgatgattcagaaaaagtattagcaatttatatggtacaccctacaaaagaatcagaaattaaacctaaaaaagtctttaattaa

SEQ ID NO: 3069 - DNA, 972 bp, Staphylococcus aureus
atgaaagtcatagaagtgacacatcctatacaatcwaaacagtatawtacagaggatgttgcaatggcattcggatttttcgatggcatgcataaaggtcatgacaaagtctttgatatattaaaygaaatagctgaggcacgcagtttaaaaaaagcggtgatgacatttgayccgcatccgtctgtcgtgttgaatcctaaaagaaaacgaacaacstatttaacrccactttcagataaaatcgaaaaaattagccaacatgatattgattattgtatagtggttaatttttcatctaggtttgctaatgtgagcgtwgaagattttgttgaaaattatataattaaaaataatgtaaaagaagtcattgctggttttgattttacttttggtaaatttggaaaaggtaatatgactgtwcttcaagaatatgaygcgtttaatacgacaattgtgartaaacaagaaattgaaaatgaaaaaatttctacaacttctattcgtcaagatttaatcaatggtgagttgcaaaaagcgaatgatgctttaggctatatwtattctattaaaggcactgtagtgcaaggtgaaaaaaggggaagaactattggcttcccaacagctaacattcaacctagtgatgattatttgttacctcgtaaaggtgtttatgcygttagtattgaaatcggcactgaaaataaattatatcgaggggtagctaacataggtgtaaagccaacatttcatgatcctaacaaagcagaagttgtcatcgaagtgaatatctttgactttgaggataatatttatggtgaacgagtgachgtgaattggcatcatttcttacgtcctgagattaaatktgatggtatcgacccattagttaaacaaatgaacgatgataaatcgcgtgctaaatatttattagcagttgattttggtgatgaagtagcttataatatytag

SEQ ID NO: 3070 - DNA, 849 bp, Staphylococcus aureus
atgaatcatattgaaataagtaaagatgtaaagatwccagtattaggyttcggagtatttcaaattcctcaagaacaaacagcagaagcggttaaagaagcaattaaagcgggytatagacatattgatacagcrcaaagttatttaaatgaaactgaagtaggtcaaggtattgaagcttcaggtattgatagaagtgaactattcattacgactaaagtatggattgaaaatgtwaactatgaagatactatcaaatcaatcgaacgatcattacaacgattaaatttrgactatmttgatctagtgcttattcaccarccttayaatgaygtatatggctcatggcgtgcattagaagagttaaaagaaamtggtaaaattaaagcaatcggtgtatctaacttcggcgttgatcgaattgtagatttaggtattcacaatcaaattcaaccacaagtgaaccaaatagaaattaatccattccatcaacaagaagaacaagttgcagcacttcaacaagaaaatgttgtggtagaagcttgggcaccatttgcagaaggtaaaaatcaattattccaaaatcaattgttgcaggccattgcagataaatayaacaaatcaattgcacaagttattttacgstggttagtagaacgtgacatygttgtactcgcaaaatcagtraatccagaacgtatggctcaaaacttagatatatttgattttgaacttacagaagaagataaacaacaaattgcgacattagaagaaagtaatagccaatttttctcacatgctgatccagagatgattaaagcacttacaagcagagaattagatgtttaa

SEQ ID NO: 3071 - DNA, 270 bp, Staphylococcus aureus
atggcaatttcacaagaacgtaaaaacgaaatcattaaagaataccgtgtacacgaaactgatactggttcaccagaagtacaaatcgctgtacttactgcagaaatcaacgcagtaaacgaacacttacgtacacacaaaaaagaccaccattcacgtcgtggattattaaaaatggtaggwcgtcgtagacatttattaaactacttacgtagtaaagatattcaacgttaccgtgaattaattaaatcacttggtatccgtcgttaa

SEQ ID NO: 3072 - DNA, 417 bp, Staphylococcus aureus
atgaaaactaaagaagtcgtagcgctcatgaatatatctcaagacactttaagatattatgaaaaggttggtgtgattccacchgttaatcgagatgaaaatggatatagaatatayaatgatartgatttaaattggatttatttagtgaaaaatttgcgaaatgcaggcgtcagtattgaatcgcttatcgaattttgyagrttagcgcagcttcctaaaaatraaaatattcaarcacagcaaaagcaaattttaaataagcaactcgaagaattaaatgaaaacttaaagacaattcatgatgcgagagatttactamaatataaaattgataattatgataatcatattgctaaaatcaatgctagtgataatyatgatgacaatgttgaacgtctttgggagagaaagtaa

SEQ ID NO: 3073 - DNA, 1824 bp, Staphylococcus aureus
atggcacatttatctgtgaaattgcggcttttaatactagcattaatcgattcactgatagtgacattttcagtattcgtaagttattacattttagaaccgtatttcaaaacatattctgtcaaattattaatattggcagctatatcactattcatatcgcatcatatttcagcatttatttttaatatgtatcatcgagcgtgggaatatgccagtgtgagtgaattgattttaattgttaaagctgtgacgacatctatcgttattacgatggtgktcgtgacaattgttacaggcaatagaccgttttttagrttgtatttaattacwtggatgatgcacttgattttaataggtggctcaaggttattttggcgtatttatcggaaataccttggaggtaagtcatttaataagaagccaactttagttgttggtgctggtcaagcaggttcaatgctgattagamaaatgttgaaaagtgacgaaatgaaacttgaaccggtattagcagtcgatgatgacgaacataarcgyaatatcacaattactgagggtgtaaaagtccaaggyaaaatygcggatattccagaactagtgaggaaatataagattaaaaaaatyatcattgcaattccaactattggtcaagagcgtttgaaagaaattaataatatttgccatatggatggcgtwgagttattgaaaatgccaaatatagaagaygtcatgtctggtgagttagaagtgaaycaactkaaaaaagttgaagtagaagatttactwggcagagatcctgttgaattagatatggatatgatatcaaatgaattgacgaataaaactattttagttacgggygcwggwggttcaataggatcagaaatttgtagacaagtttgtaatttctatccagaacgtattattctacttggccatggtgaaaacagtatttatttaatcaatcgtgaattgcgaaatcgcttcggaaaaaatgttgatatcgttcctattatagcggatgtgcaaaatagagcgcgtatgtttgaaattatggaaaygtataaaccatacgcagtttatcatgcagcagcacacaagcacgtgccgttaatggaagasaaccctgaagaagcagtacrtaataatattttaggtacgaaaaatactgctgaagctgctaaaaatgcagaggtraagaaattcgttatgatttctacggataaagccgttaatccrcctaatgtcatgggagcttcaaagcgaattgcagaaatgattattcaaagtttaaatgatgaaacgcatcgaacaaattttgttgcagtgagatttggtaatgtacttggatcgagaggatctgtgattccacttttcaaaagtcaaatygaagmrggtggkccagttactgtracrcatcctgaaatgacacgwtactttatgacrattcctgargcktctagrytagttttgcaggcaggggcattagcagaaggtggcgaagtatttgtgytagayatgggagaaccagtgaaaatwgtagatttrgcacgwaatttaattaagytaagtggtaaraaagaagacgayatacgcattacttwtacagggattagaccyggygaaaaaatgtwtgaagarytkatgaataargatgarrttcayccwgaacaagtatttgaaaaaatttatcgyggyaaagtacaacatatgmaatgyaatgaagttramgcgattattcaagacatcgtcaatgaytttagtaaagaaaaaattattaactatgccaatggcraaaagggagataattatgttcgatga

SEQ ID NO: 3074 - DNA, 714 bp, Staphylococcus aureus
atgacgcataatatagaaaaacgcattaataaattaaaaacttctggaaatccaaaatttaaaaaattagattcagatattcactatttactcaagagatttgaaggtgaaaaaaaccataaaggtttttatccaaagtttaaacaaggagaaatagtttttgtagatttcggtataaacgttaataaagaattttctaattcacactttgcaatagtgatgaataaaaatgattctaatacggaagatatagtaaatgttattcccttatcttctaaagaaaacaaaaagtatttaaagatgaattttgatttgaaatgggagtattatttaagattgtttttaaatttaattagcgcgcaaaataattcagctatattaaaagaagttttcgataaaaaataccaaaaaaacaacacagaattcatcactaaagattattttagtgaatttatatctgatagtttagaaattgaaaataaattaaataaaattgacagaaacattaataacatagtatcagcaattgataaggtaaaaaaattaaaaggtaatagttacgcttgcataaattctttccagccgattagtaagtttcgcataagaaaagttttacccccaaaaattaaaaatccagtaatagattcttcggatattatgttactgataaatagaattaataataatatattgcagattcctgatataagatga

SEQ ID NO: 3075 - DNA, 2097 bp, Staphylococcus aureus
atgtctcaagaaaagaaagtttttaaaactgaatgggcaggaagatctttaacgattgaaacagggcaattagctaaacaagcaaatggcgctgtattggttcgttatggagatacagtcgtgttatcgacggcaactgcatcaaaagaacctcgtgatggagatttcttcccattaacagtgaactaygaagaaaaaatgtacgctgcgggtaaaattcctggtggatttaaaaagagagaaggacgtcctggtgacgatgcaacattaactgcgcgattaattgatagaccaattagacctttattccctaaaggrtataagcatgatgttcaaattatgaacatggtattaagtgcagatcctgattgttcaccacaaatggctgcaatgattggttcatctatggcgcttagtgtgtcggatattccattccaagggccaatcgccggtgtaaatgtgggttatattgayggtaaatatatcattaacccaacagtagaagaaaaagaagtttctcgyttagaccttgaagtagctggtcataaagatgcrgtaaacatggtagargcaggcgctagtgagattactgaacaagaaatgttagaggcgattttctttggtcatgaagagattcaacgtttagttgatttccaacaacaaatcgtcgaccacattcaacctgttaaacaagaatttattccaryagagcgtgatgaagcgctagttgaacgtgtraaatctttaaccgaagaaaarggacttaaagaaacagttttaacatttgataaacaacaacgagatgaaaatcttgataacttaaaagaagaaatcgtcaatgaatttatcgatgaagaagatccagaraatgaattacttattaaagaagtttatgcaattttaaatgaattagtgaaagaagaagttcgacgtttaattgcagatgaaaaaattagaccagacggccgtaaacctgatgaaatccgtccattagattctgaagttggtattttacctagaacgcatggttcaggtctatttacacgtggtcaractcaagcactttcagttttaacattaggtgctttaggygattatcaattaattgatggtttaggacctgaagaagaaaaaagattcatgcatcattayaacttcccgaayttttcagtaggtgaaactggtccagtacgtgcgccaggtcgtcgtgaaattggacatggtgcgttaggtgaaagagcattaaaatatattattcctgatactgctgatttcccatatacaattcgtattgtaagtgaggtacttgaatcaaayggttcatcatctcaagcgtcaatttgtggatcaacmttagcwttaatggatgcgggcgtaccgattaaagcaccagttgctggtattgctatgggccttgttacacgtgaagatagctatacgattttaacwgatatccaaggtatggaagatgcattaggtgatatggactttaaagtcgctggtactaaagaaggtattacagcaatccaaatggatattaaaattgacggtttaacgcgtgaaattatcgaagaggctctagaacaagcgagacgtggtcgtttagaaataatgaatcatatgttacaaacaattgatcaaccacgtactgaattaagtgcttacgcgccaaaagttgtaactatgacaattaaaccagataagattagagatgttatcggacctggtggtaaaaaaattaacgaaattattgatgaaacaggygttaaattagatatygaacaagatggtactatctttattggkgcygttgatcaagctatgataaatcgygctcgtgaaatcattgaggaaattacacgtgaagcggaagtaggtcaaacttatcaagccactgttaaacgtattgaaaaatacggtgcgtttgtaggcctattcccrggtaaagatgcgttgcttcacatttcacaaatttcaaaaaatagaattgaaaaagtggaagatgtwttaaaaatyggtgacacaattgaagttaarattactgaaattgataaacaaggtcgagtaaatgcwtcacayagagcattagaagaataa

SEQ ID NO: 3076 - DNA, 855 bp, Staphylococcus aureus
atgaataaaacaaactttggggmttatttaaataaaagtaagagcaggaaaatatataagatttttgatcaaaatttgaagcgagagtttagttattggcagtttaggaaacttttcaaatcttatacawggcagtctgatgtacatgarttaaaagtgtgtactcaaaatgatgrtactatkgagcaaatatggatagatraagcaaatcaatttggagtgkcagtgacwtggaaagataatagtattatcggatttgttatgcgtccgttaatyaattatgatgcgattaagaatgaaacgactttaaaatacgcagtgccgacaacagattgctatgagrttttttggggtggagataatgaattatataattatcactatttataccyacatcaaaggtatgctattgatttagttattaaagaaaatcataaaacatataagaaycwaggaaaagtaaatrctgattatttttgttttggaaaagatatcattgcgccagcaaatggtacagttgaaaaagtagtgaatggggttcaagacaacagtattggaagtacgaakgaatcacagtttttaggaaattatattgtaatyaagcacgcagaaaatgagtatagcttaatagctcatttacamcaatattcaatcattgtgaatgaggggcaaaatgttaaatatggtgaywtcmttgggaaggttgggaattctggcaattctactgaacctcatatacatttycaagtaatgaatgataagaatattgaagcatgtacrtctttraaaattcgatttwtaaataatckagaacttatcaaaggrgatgtggtctgcggattacaagstgaatga

SEQ ID NO: 3077 - DNA, 816 bp, Staphylococcus aureus
atgtcaaagcgtctattattgtttgattttgatgaaacatattttaaacataatacaaatgaagaagatttaagtcatttaagagaaatggaaaaattgttggaaaaaytaactaataataatgaagtgatcactgytgtattgacaggaagtacatttcaaagtgtcatggataaaatggatcaagttaatatgacgtttaaaccattacatatcttttctgatttgagttctaaaatgttcacttggaataatggcgaatatgttgaatcagaaacatataaaaagaaagtcttgagcgaaccatttttatttgaagatattgargatatattacrtcatatttctgcgcaatataatgtcgaatttattccacaaagagcatttgaaggtaatgaaacacattataatttttattttcattcaacaggtaatcacaacaatgatagkcgtatyctagaagyacttgtcagatacgcaaatgaccaaaactatacagcgagatttagtcgaagcaatccattagctggtgatcctgaaaatgcgtatgatattgacttcacaccgtcaaatgctggaaaaytatatgctactcaatttctgatgarraaatayaatataccagtaaaatcaatattaggttttggagatagcggcaatgacgaagcatatttaagctatcttgaacatgcmtatttgatgtcgaatagtagagatgaagcattaaagcagaaatttagattaacaaaatatccatattatcaagggataacactgcatgttaaagaatttgttgaaggtaagtatgattattga

SEQ ID NO: 3078 - DNA, 1572 bp, Staphylococcus aureus
atgtttatgttagatgctggacttatgtttccagaagacgaaatgctaggtattgatattgttataccagacatttcatacgtacttgaaaataaagawaaattgaagggtatattccttacacacggacatgagcacgcgattggtgcagtgagttatgttttagaacaattagatgcaccagtatatggatctaaattgacaatagcgttaattaaagaaaatatgaaagcccgtaatattgataaaaaagttcgctactayacagttaayaatgattcaattatgagattcaaaaacgtgaatattagtttctttaatacgacacacagtattcctgatagtytaggtgtttgtattcacacttcatatggtgccattgtgtatacaggtgaatttaagtttgaccaaagtttacatggacattatgcaccagatattaaacgtatggcagagattggtgaagaaggygtatttgtcttaatcagtgattctactgaggcagagaaacctggatataatactccggaaaatgtrattgaacatcatatgtatgaygcttttgcaaaagtgcgaggtcgcttgatwgtttcatgttatgcttcgaactttatacgtatwcagcaagttttaaatattgctagcaagctaaatcgtaaagtgtcatttttaggaagatcacttgaaagttcatttaatattgctcgtaaaatggggtatttcgacattcctaaagatttgctaattcctataacagaagttgataattatcctaaaaatgaagtgataattatagctactggtatgcaaggagaacctgtagaagccttaagtcaaatggcgcaacataagcataaaattatgaatatcgaagaaggcgattctgtatttttagcaattacggcttctgcwaatatggaagttatcattgcgaatacattaaatgagcttgtacgtgctggcgcacatattattccaaataacaaraagattcatgcttcaagtcatggttgcatggaagaattaaaaatgatgattaatattatgaaacctgaatactttattcctgtacaaggtgaatttaaaatgcagatagcacatgcgaagctagcagctgaagcaggtgttgcaccrgaaaagattttccttgtggaaaaaggagatgtcattaattacaacggtaaagatatgatattaaatgaaaaggtaaattcrggaaatattttaatagatggyattggtattggggatgtaggaaatatcgtgttgagagaccgtcatcttttagcagaagatggtatctttattgctgtwgtaacgttagatcctaaaaatagacgtatagctgcgggwcctgaaattcaatctcgtgggtttgtatatgtacgtgaaagtgaagacttattacgtgaagcagaagagaaagtacgtgaaatagtagargctggtttacaagaaaaacgcatagaatggtctgaaattaarcaaaatatgcgtgatcaaattagtaaactattattcgaaagtacaaaacgtcgtcctatgattattccagtaatttctgaaatttaa

SEQ ID NO: 3079 - DNA, 153 bp, Staphylococcus aureus
ttggtaaataaaatcaataagtttaaccaatatgttgctcgcttcataccgtatattgcaacaaaaattccgatyaagaaaaatatagcccctatgataaaacagaaatccgatgctgaattattaaaaaatgaggtgtttagagttagaaaa

SEQ ID NO: 3080 - DNA, 2379 bp, Staphylococcus aureus
gtgcgtcaattggcacaagcaaaaaagaaatcgacagctaagaaaaaaacarcatcaaaaaaaagaacaaattcraggaaaaagaagaatgataatccgatacgttatgtcatagctattttagtagttgtattaatggtgttgggtgttttccaattaggaataatmggtcgtctaattgacagcttctttaattatttatttgggtacagtagatatttaacatatattttagtactcttagcaactggttttattacatactctaaacgtattcctaaaactagacgaacggctggttcgattgtattgcaaattgcattgctatttgtatcacagttagtttttcattttaatagtggtatcaaagctgaaagagaacctgtactttcttatgtrtatcagtcataccaacacagtcatttyccaaattttggtggcggtgtattaggyttttatttattagagttaagcgtacctttaatttcattatttggtgtatgtattattactattttattattatgctcaagtgttattttattaacaaaccatcaacatcgtgawgtygcaaaagttgyactggaaaatataaaagcttggtttggttcatttaatgaaaaaatgtcggaaagaaaccaagaaaaacaattgaagcgtgaagaaaaagcragacttaaagaagaacaaaaggcacgtcaaaatgaacagccacaaataaaagatgtgagtgattttacggaagtgcctcaagaaagagatattccaatttatgggcatactgaaaatgaaagtaaaagycagwgtcaaccaagtcgraaaaarcgagtgtttgatgcagagaatagttcgaataacatcgtaaatcatcatcaagcagatcagcaagarcaattaayagaacaaactcataacagtgttgaaagtgaaaacactattgaagaagctggtgaagttacgaatgtrtcgtatgttgttccaccgttaactttacttaatcaacctgcaaaacaaaaagcaacatctaaagctgaagtrcaacgtaaaggacaagtactagagaatacattaaaagattttggggtaaatgcaaaagtgacacaaattaaaattggtcctgcagtaactcaatatgaaattcaaccagctcaaggggttaaagtgagtaaaattgtaaacttgcataatgatattgcattagctttagcagcaaaagatgttagaatygaagcrccaatacctggtcgytctgcagtaggtattgaagtgccaaatgagaaaatttcattagtttcactaaaagaagttttagatgaaaaattcccgtctaataataaactagaagttggattaggaagagatatatcaggtgatccaattactgttccactaaatgaaatgccacacttattggtggcaggatcgacgggtagtggtaaatctgtttgtataaatggtattattacaagtattttattaaatgctaagccgcatgaagttaaacttatgttaatcgatccgaaaatggttgaactaaatgtttataacggaattccacayttattaattccggttgttacaaatcctcataaagctgctcaagctttagaaaaaattgtagctgagatggaaagacgttatgatttattccaacattcatcaactagaaayattaaaggttataacgaattaatccgtaagcaaaatcaagaattagatgagaagcaaccagaattaccttatatcgttgttattgtagatgagcttgcagatttaatgatggtagctggtaaagaagttgaaaatgcgattcaacgtatyacacaaatggcacgtgcagcaggtatacatttrattgtagcracacaaagaccttctgtggatgtaattacaggtatcattaaaaataayattccatctagaatwgcttttgctgtragttctcaaacagattcaagaactattattggtactggcggygcagaaaagttacttggtaaaggtgacatgttatacgttggaaatggtgaytcatcacaaacacgtattcaaggggcgtttttaagtgaccaagaggtgcaagatgttgtaaattatgtagtagaacaacaacaggcaaattatgtaaaagaaatggaaccagatgcaccagtggataaatcggaaatgaaaagtgaagatgctttatatgatgaagcgtatttgtttgttgttgaacaacaaaaggcaagtacatcattgttacaacgccaatttagaattggttataatagagcatctaggttgatggatgatttagaacgcaatcaggtaatcggtccacaaaaaggaagcaagcctagacaagttttaatagatcttaataatgacgaggtgtaa

SEQ ID NO: 3081 - DNA, 705 bp, Staphylococcus aureus
atgrctartgttttataycaacatggtacattaggcacattaatggcaggwttattaaaaggaactgcatcaataaatgaattattgcaacatggtgayytaggtatcgctacactaacaggttcaaayggtgaggtmatctttttagatggaaaagcytaycatgcaaatgaacataaagaatttgtrgaattaaaaggtgaygagttaacaccatatgcaactgtaactaaattygtagcagatacaagctatgaaacgaaagataaatcttcwgaagcagtttttgcagaaattaaggaaaagatgttgagtgaaaatttattttcwgcagtaaaaatttcaggcttatttaaaaaaatgcatgtacgtatgatgccggcwcaagarccaccttatacacgtttaatygaytcagctagaagacaacctgarcaaactgaaacrtaygtcaaaggykcagtcgttggkttctttacaccagaaytattccatggtatcggrtcagcaggattycatgtacactttgcraatgatgatcgtaaytttggtggacatgtcttagattttgaagtagaagatgttaargtagaaatccaaaatatagaaacatttgaacagcattttccaattcaagatraagatttcactaaagcaaatattgactataaagatattgcrgacgaaattagagaagctgaataa

SEQ ID NO: 3082 - DNA, 714 bp, Staphylococcus aureus
atgtcagaaatgaatgcggtatataacgttaaacaatacattttaaatttgattawgcaaaataaattggaatatggtgaccaacttccaagtaatttatcaattgccagagaattaaatgtaaaaaccgacgatgtttatgaagcaattcaggcattgattactgaacaagtcattaaagataattttgaagagggcacaagtgttaartcactgccccctttcttttatccattgaatgaacttataagtattgggcaaatgattaaaaatgcaggatttgaatgcggaactgaatacttaaattttgatgagcaaccagcaactatgttagatgcaaatttgttgagygttgaagaaggatatccagtaaccattatagaacgattacgaactgccgatggagaaccggtcgtctattgtttagataaaattgctaaaaaagaattaacatgtacagagtatcaaatgagcaatggatcgatwctaagtgcgataaaagaacaaagtaatcataatatttgttaygctgatacagaaattgaagcggtaaattatgaacctcgaatatccgaagtactgaatgcttcgccacacgaaggtttgattttattaaaaattacgcactayaatgaatyagatgaacctattttgtattcattaaattatatgaaaaatagcttagttcaatttaaaatcactagaaaaatatag

SEQ ID NO: 3083 - DNA, 1665 bp, Staphylococcus aureus
atgactgataaaaagtacactgcagccgatatggttattgatactttgaaaaataatggggtagaatatgtttttggtattccgggtgcaaagatwgactatctatttaatgctttaattgatgatggtcctgaacttattgtcackcgtcatgaacaaaaygcygcaatgatggcrcaaggtattggaagattaacaggyaaaccgggtgtagtacttgttacaagtggbcctggtgtaagtaatttaackactggaytattaacmgcwacatctgaaggggatcctgthttrgcgttaggyggccaagtgaaacgtaatgatttattacgattaacgcatcaaagtattgataatgctgckytattaaaataytcatcaaaatayagtgaagaagtacaagatcctgaatcattatcagaagttatgacaaatgcaattcgwattgctacttcaggraaaaatggcgcaagttttattagtattccgcaagaygtkatttcttcaccagttgaatctaargckatatcactttgycaaaaamcaaatttaggwgtaccragtgaacargatattaatgatgtcattgaagcgattaaaaatgcatcatttcckgttttaytagctggwatgagaagttcwagtgcwgamgaracraatgccattcgcaarytagtwgagcgyacsaatttaccmgttgtagaaacattccaaggtgcrggtgtrattagtcgtgaattagaaaatcatttcttyggycgwgtgggyttattccgyaatcaagttggtgatgaattattacgtaaaagtgatttagttgttacaatcggttatgatccwatwgaataygargctagtaactggaataaagaattagawacrcaaatwatcaatattgacgaagttcaagctgaaattactaattatatgcaaccgaaaaaagagttgattggtaatattgctaaaacgattgaaatgatttctgamaaagtrgatgarccatttataaatcaacaacatttrgaygaattagaacarttaagarcrcatattgatgaagaaactggtattaaagcgacgcatgaagaaggmatyytacayccagtkgaaattatwgaatctatgcaaaaggtattaactgatgawacwacwgtracagttgatgttggwagtcactatatttggatggcacgtaatttcagaagttacaatccaagacatttattatttagyaayggtatgcaaacrcttggtgtagcattaccgtgggcaatttcagctgcrcttgtrcgccctaatacgcaagttgtrtccgttgctggcgatggwggctttttattttcatcacaagatttagaaacrgccgtacgtaaaaatytaaayatyatycarcttatttggaaygatggaaaatataayatggttgaattccaagaagaaatgaaatataaacgttcrtcaggygtmgacttcggtcctgtagatttygtaaaatatgcwgaatcatttggcgcraaaggtttacgagttactaatcaagaagaattagaagcggcaattaaagagggstatgaaacagatggyccagtattaattgatatacctgtaaaytacaaagataatatcaaactttcaacaaatatgttacctgacgtatttaactaa

SEQ ID NO: 3084 - DNA, 138 bp, Staphylococcus aureus
ttgaaatacacaacagatcaaacgaatattgtatcaatcaatagwgatggtcaagttactgcggaagcacaaggcattgctacggttaaagcaacagttggtaatatgagtgacactataacaataaatgtagaagca

SEQ ID NO: 3085 - DNA, 405 bp, Staphylococcus aureus
atgagtgtgaaagtgataggtgataaagcattagaaagagaattagaaaaacgttttggcataaaagagatggtaaaagttcaagataaggcgytaatagctggtgctaaggtaattgttgaagaagtaaaaaaacaactaaagccctcaaaagatacgggagcattaattaatgaggtaagttttagtaaacctgaatggataaacggaaaacgtacaattactgttyattggcgaggttctaaagaccgttataaaatcgtacatttaattgaatatggacacgttcaaaaaggaacaggtaaatttatcaaacctaaagctatgggcggtgttaatagagcaataagacaagggcaaaataagtattttgagacgctaaaaagggagttgaaaaaattgtga

SEQ ID NO: 3086 - DNA, 285 bp, Staphylococcus aureus
atgacgattgatgatttgcttgtcaaatttaaatcacttgaaaagattgaccataattcagaggatgagtacttaaagcagttgttaaaaatgtcgtacgagcgtataaaaaatcagtgcggagtttttgaattagagaatttaataggtcaagaattgatacttatacgcgctagatatgcttatcaagatttattagaacacttcaacgataattacagacctgaaataatagatttttcgttatctctaatggaggtatcagaagatgaagaaagtgtttaa

SEQ ID NO: 3087 - DNA, 1266 bp, Staphylococcus aureus
ttgagtagacaatctcaaccaaatatacatatcaaagtttcaccaacaactaaatttaaaacaactactatagtttttaaatttatggcacctttagaatatgacacaaywacagctagatcattattaagcaaattattagttcgagcaactaagaaatggccaaccgataagtcrtttaataatcacttagccgatttatatggtgcrtatgtgaatagtacaatttcaaaattcaaagatcagcatgtcattacattttcattagaaattgtwaatgaacgttatttaagaaacggtgaatcattatttaatcaaggattagatttattacaagaaatcatttggaatccattaattgaaaataaagcattcaatgataattttgttaaccaagagaaaacattattagccaaaaaaatagaagcaatggtagataayaaagcacaatattcgtttttaaaattactcgaccatatgtttgaaaatgaagcatayaaatacttatctacaggacaactagaacaaatcccacatattactgctgaaacactatatcatacatatcaatcaatgattaataatgatcaatgttctgtttatgttgtcggcaatgtagaacctgaaagtgttgagaaacaaatacgtgaaaaatttgcacttaaaccattcgataaacatcaattccaacattctacwcatcatttacacgatgaagaagttgattatattgttgaatatgatgacgtggatcaagctaaattaaatatgggataycgwtttccaacacaatatggacaaagtggatatgctgcbtttgttgtatttaacatgatgtttggaggagatccttcatctgttttatttaatgaagtgcgagaaaagcaaagtttagcgtactctatacattcacaaattgatggcaaaaatggctatttatttgttttgagtggggtttcaagygataagtacgaaactgcaaaagacactattataagtgaatttgaaaaaataaaagcaggagatttcactgaagaaaaattagagttagctaaaaaagtaatcatttctcatcgatatgaatctgaagatcgtccgaaaagtattatagagattatgcataaccaaatattattagagcaaccacaaagcaaagaaacatttataaatgatatacagaaggtaagtcgcgaagatattgtttctgttgctgaaaaagcatttttagatacaatctatgtgttgacaaaaggaggggataaataa

SEQ ID NO: 3088 - DNA, 300 bp, Staphylococcus aureus
atgatgactaaagacgaacgyatacgattctataagtctaaagaatggcaaayaacaagaaaaagagtrctagaaagagataattatgaatgtcaacaatgtaagagagacggcaagttaacgacatatgacaaaagcaarcrtaagtcgttggatgtagatcatatattatcgctagaacatcatccggagtttgctcatgacttaaacaatttagaaacactgtgtattaaatgtcacaacaaaaaagaaaagagatttataaaaaaagaaaataaatggaaagacgaaaaatggtaa

SEQ ID NO: 3089 - DNA, 1287 bp, Staphylococcus aureus
atgaaagagcgttattatgaattaatagacgaaagagtattcgaacaagaattagaaaatggtttacgattatttrttatcccyaaaccaggttttcaaaagacatttgtcacttacactacacaatttggttcattagataatcaattcaaacccctyggacaagaccaatttgttactgtacctgatggagttgctcactttttagaacataaattatttgaaaaagaagaagaagacttatttactgcrtttgctgaagawaaygcacaagcaaatgcgtttacaagctttgatcgtacaagctacttgttcagtgcaactgataatattgaaaacaacattaaacgtttacttacaatggttgaaacgccttattttacaaaagaaactgttgataaagaaaaaggtattattgcagaagaaataaaaatgtatcaagarcaacctggatataaattaatgtttratacattgcgtgcaatgtatcaacracatccaatacgtgttgatattgccggtagtgtagaaagtatatacgatattacaaaagatgatttgtatctatgttatgaaacgttttatcatccatcaaatatggttttatttgttgttggygatgtgratccwgaagmaatatgtcgaatagtaaaacaacacgaggatgctcgtaataaagttaaccaacccaaaatcgaacgaggacttgttratgaaccggaggatgttaaagaagcatttgttactgaatctatgaaaattcaatcaccaagactaatgcttggttttaaaaataaaccattacaagaagcgcctcaaaaatatgtacaacgtgatttagaaatgtcattattctttgagttaatttttggggaagaaacagatttttatcagaatttattaaacgaaggacttatcgatgatacatttggttatcaatttgtactagagccgacktatagtttttcaatcgtgacaagygctactgaagaaccagataaattaaaaaaattattattagatgagttgcgygataaaaaaggcaatttccaagatgcagaagcatttgaacttttgaaaaagcaatttataggtgaattcatatcaagtttaaactcacctgaatatattgctaatcaatatactaaattgtattttgaaggtgttagygtgtttgacatgttagacattgttgaaaayatcacsttagatagtattaaygaaacgtcatcgttatatttaaatttagatcagcaagtcgatagtcgtttggagattaaaaagtaa

SEQ ID NO: 3090 - DNA, 705 bp, Staphylococcus aureus
atgaaagcattagtattaggtggttctggttcaattggttctgagatagtcaaacaattattaactgatggatttgaagtttatgtgcaatattatcgtactgatataaatgaattaactarcaaatttaatgatgataaagttcrttttatacaagcggatttatctcaaacaattgatattgacaaaacatttggtgacattaaatcattagactgtttaatatatgcaagtggtcagtctttatatggtgttttacaagatatgaaagaccatgatattgatgcatgttatcagttaaatgtcttgcaattaattcgattatgtagatatttcgttgatgttttacgtcaaagtgmcaatggaagaattattgtaatttcatcaatttggggtgagacaggagctagyatggaaactatttattcgrcgatgaaaagtgcacaattaggtttcgttaaggcgcttagtcaagagcttgcactaacatcagtgacagtaaatgctatcgcacctggwtttgtagcyggtaatatggcaagtgagtggcaagaagatgaacttcaagcaatgataactgaattaccacaacagcgattgrttttaccgagtgaggttgctcatacatgcgcctatttatatcacycaaatgctagaagygttactggaactatacagaaagttaatggkgcttggtatatttaa

SEQ ID NO: 3091 - DNA, 1137 bp, Staphylococcus aureus
atggaaattcatgtttatacgggaccgctttgtggatttaatgaatatattaattctgaagttaaagaatatcaccgcttcatggaattaatcagagaatacaatatcatagtgcgagcaagtgatacatttggaactcatgatgttgayggtatttttgatactgagatagaaaatcttgtgatattttcaaacgactttgcttctgtaacaactcatgttattactaattttataaatatcgttactttaggtagaaatattaagaaaatctatattcagaatcctccaaaaagagtatttcaatcactaaatagttttcacgattctgaaataatagaaataaactatgaatatacaacattaaaaaaagatgatgtaataaatttttataaagagcagatggctggttctaaaataataggtcaaacagacgctaaaaaacaaatgagcatagatttatataaacatacttccttagaaaataataaaccgaccgtaatgctttactatggtccatcaggtgttggaaaaacagaattagccaaagaaatagcaaaaaaatataaaggtaatatcactagaatacaattttctatgatgcagaatgatgaatcttttaattatatctttggagatgaacatgccaaagtatcattgtcaaaagatttagtagatcgtgaaactaatgttgttttaattgatgaatttgataaggtattaccaatctattacaatgttttctatcaaatgtttgatgaaggtattattgaagatgccaattataaagtagacgtttcaaattgtattttcattctaacatctaattttaatagtattgaagaagcaatagttaatattggagaaccggtattttctagaatagattcctgtattaaatttttatatttaacacaggaagaaaagcagaaagtaatagaaaataaattaaatgaaatactatcatctctaaatgaaaaagaaaaaagaatagttaccgcatataacttgttagagaaatataaagagacagaaatagatatcgataacattaggtatttaaagaaaataataacaaatgatatttatacaataatttttgaagatgaattatttaatacggatattatagattaa

SEQ ID NO: 3092 - DNA, 828 bp, Staphylococcus aureus
atgacagttgcagagaaaaaagaatggtacctagaatacgaaattgaaattaatagaccgggtcttttaggtgatgtatctagtttattaggtatgttaggtataagtattgttacaattaatggtgttgatcaaggtaaacgaggccttttaattaaaacagacaatcttgaaaaagttgaacgttttgagcaaatagctcgtggtataaatgaaattgaaataacaaagcttaaaaaaccagaattaagagaccgtcttgcagtwagacatggwagatatattgagcaagatgcaaaagataagaaaacctttcgatttgagcgtgaagatttaggcttgttagtagactttttagctgaattgttcaaagaagaaggtcataagttgattggcattagaggtatgccacgrgttggtaaaacygaatcaattgttgcgggaagtgtttgtgcacataagagatggttatttattagttctactttaataaaacaaactgtacgtagctctctaattaaaggggaatatgatgccaatcatgtatayattattgatggtgcagttactgccagagaatctaatccaaaacatcaagagcttgttaacgaagttatgacgttaccwtcaatcaaagtcgttgaacayccagatttatttgttgaaacaagtacttgtacaatggaagattttgactatattatcgaattgagagaaaatgaaaatcaagaaatacattacgaagaaatgaagaaacagacagtccaaagtaagaataatttagattttggagatccrtttggtggtggttttggtttcttcgagtaa

SEQ ID NO: 3093 - DNA, 792 bp, Staphylococcus aureus
ttgacaaatwctatcaaaaaaataatttattttgatgaactatcagcaatggatttattacagatagagaagaaaggtaaccttactaaaacagttcagttgatgcatgatgaaaaaggtagtgcaagtggtgaatctaaagtgaacatggaatttggtaagcaaagcgctgtaaaacaaatttttgattctttacttgggatgtcagcgagtgcttcggctagtgcaggtataaatggaaatataactggagagcgagtagccaaaacaattttagagaatacattaatatatgattttttggatacagtagagtttagaaagaaaaaaactattattgatatttcagaggggtttaaactaaatattcaacaagatacgatgacatatttcgcgactattacccccatagcaagtatgtttgaaggatctaaacatctagacgaggaggagctatcatttgatgtttcaaaaatgaatgaagcgattagaagtattaaaggctattttgaattaataggaacaagagggaatgaaaacagagtttttagatttaatatagaatcttttaaaaataactatagaatacaagatttaaaatttatgaatttaacactctactcagtacttgttggtgaaataagcaaagaaaatctaaattacgataaagagtttgatctaaatcaaggtgccaaacctagtggaattggaaagtttaagggaattagatcagaagcaactaaagaagataaatatcaagtgtatgatgttattcttgcaggagtgaaataa

SEQ ID NO: 3094 - DNA, 393 bp, Staphylococcus aureus
ttgaaaacggtcggtgaagcgctaaaaggtagacgtgaaaggttaggaatgactttaacagaattagagcaacgtactggaattaaacgtgaaatgctagtgcatattgaaaataatgaattcgatcaactaccgaataaaaattacagcgaaggatttattagaaaatatgcaagcgtagtaaatattgaacctaaccaattaattcaagctcatcaagatgaaattccatcgaaccaagccgaatgggacgaagtaattacagttttcaataataataaagacttagattataagagtaaatcaaaagagccaatacaattattagtaatcatgggtattacagttttaataactttattgttatggatcatgttagttttaatattttaa

SEQ ID NO: 3095 - DNA, 1098 bp, Staphylococcus aureus
ttgagaggcgaccaacgaacacagggtgaaaaatcaagaaaagaaggtggaaaaatatttggatcaggaagtagagcaccgatagctatatctattttagttaaagatggaagttacaatcacgatatctattataatgacattggtgaatatttaactagagagcaaaaattagatactttaatgaaacatcaatcaattgtgaatttgaaaagtttgaatgttttacccgataaaaacaatgattggattaatcaacgagacataaactatgagaattatttaccaatgtatgattccaaggatattgaaaattctatatatttagatcaatttaatggagtaaattcagcaagagataattgggtaacaaatttttcgaatgaaaaagcattagtaaatgcaaaattacttgtagataactataattctgaaatagatagattaattgatatcttagattcaagagaacgtataaatttagtgaacaaagatgaaacatttattagttggacacgaggacttacccaaaaattttctaaaggaaaaaatatttcaattaatccagagagaattgttaaatttatgcatagaccatttacaaaaaaatggatagtgtacgacaaaaatattatggaaatgccaagtagatattataatataatggagaatactggacaggtgatttatatacaaggacagggaatgaataaagaattctcggctatgatcacggacatattacctaatttccaatttattggtaatggcaaaggctttgctacatacaaaggtaaagatagtttgaggcttgtagataatatttctaattcttttaaaaagaaaataaatcttaattcagaagagatagtatattatatatatgcaattttgcatcataaatattatgtgaacaaatattcaagtgatttgagtaaaggttttccgcgaataccgatattaaaggatgtatatggatttgttgaaattggtagggagttagtggaattacatttaaattatgaaaaacaactcaattgggatggtgtagaaataatttataataatatgaatccgaattataaagttgaaaaatga

SEQ ID NO: 3096 - DNA, 579 bp, Staphylococcus aureus
atgaatattccgaaccagattacggtttttagagtagtgttaataccagtttttatattgtttgcgttagttgattttggatttggcaatgtgtcatttctaggaggatatgaaataagaattgagttattaatcagtggttttatttttatattggcttcccttagcgattttgttgatggttatttagctagaaaatggaatttagttacaaatatggggaaatttttggatccattagcggataaattattagttgcaagtgctttaattgtwcttgtgcaactaggactaacmaattctgtagtagcaatcattattattgccagagaatttgccgtaactggtttacgtttactacaaattgaacaaggattygtaagtgcagctggtcaattaggtaaaattaaaacagcagttactatggtagcaattacttggttgttattaggtgatccattggcaacattgattggtttgtcattaggacaaattttattatacattggcgttatttttactatcttatctggtattgaatacttttataaaggtagagatgtttttaaacaaaaataa

SEQ ID NO: 3097 - DNA, 399 bp, Staphylococcus aureus
atgactttggcacaagttgaatatagaggcacaggccgtcgtaaaaactcagtagcacgtgtacgtttagtaccaggtgaaggtaacatcacagttaataaccgtgacgtacgcgaatacttaccattcgaatcattaattttagacttaaaccaaccatttgatgtaactgaaactaaaggtaactatgatgttttagttaacgtwcatggtggtggtttcactggacaagctcaagctatccgtcacggaatcgctcgtgcattattagaagcagatcctgaatacagaggttctttaaaacgcgctggattacttactcgtgacccacgtatgaaagaacgtaaaaaaccaggtcttaaagcagctcgtcgttcacctcaattctcaaaacgttaa

SEQ ID NO: 3098 - DNA, 1029 bp, Staphylococcus aureus
atgttcgatgacaaaattttattaattactggrggcacaggatcattcggtaatgctgttatgaaacrktttttagaytctaatattaaagaaatycgtattttttcacgcgatgagaaaaaacaagatgacattcgaaaaaaatataataattcaaaattaaagttctacattggtgatgtrcgtgatagtcaaagtgtagaaacagcaatgcgagatgttgattaygtattccatgcagcagctttaaaacaagtrccgtcatgtgaattctttccagttgaggcagtgaagacaaatattattggtacagaaaatgtcttacaaagtgckattcatcaaaatgttaaaaaagtcatatgtttatctacagataaggcagcgtatcctattaatgctakgggtatttcraaagcaatgatggaaaaagtattygtagcyaaatcaagaaatattcgtagtgaacaaacgctkatttgyggtacaagatacggtaatgtratggcttcaagaggwtcagtaatwcctttgtttatcgayaaaatcaaagctggagaacctttaacgattacagatcctgatatgacaagatttttaatgagyttagaagatgcsgtagaactagttgttcatgcatttaagcatgcagaracaggmgatattatggttcaaaaagcaccaagytcmacrgtaggggatcttgcgaccgcattattagaattgtttgaagctgataatgcaattgaaatcattggtacrcgacatggagagaaaaaagcagaaacrttgttgacragagaagaataygcacaatgtgaagatatgggtgattattttagagtgccggcagactccagagatttaaattatagtaattatgttgaaaccggtaacgaaaagattacgcaatcttatgaatataactccgataatacacatattttaacggtggaagagataaaagaaaaactwytaacactrgaatatgttagaaacgaattgaatgattataaagcttcaatgagatag

SEQ ID NO: 3099 - DNA, 1152 bp, Staphylococcus aureus
atgtcaattgccattattgctgtaggctcagaactattgctaggtcaaatcgctaataccaayggacaatttctatctaaagtatttaatgaaattggacaaaatgtattagaacataaagttattggagataataaaaaacgtttagaatcaagtgtwcgtcatgcgytagaaaaatatgatactgttattttaacaggtggcttaggtcctacgaaagatgacttaacgaagcatacagtggcccagattgttggtaaagatttagttattgatgagccttctttaaaatatattgaaagctattttgaggaacaaggacaagaaatgacacctaataataaacaacaggctttagtaattgaaggttcaactgtattarcaaatcatcatggcatggctccaggaatgatggtgaattttgaaaacaaacaaattattttattaccaggtccaccgaaagaaatgcaaccaatggtraaaaatgaattgttgtcacattttataaaccataatcgaattatacaytctgaactattaagatttgckggaataggtgaatctaaagtagaaacartattaatagatcttatcgataaacagactaatcctacgattgcgcctttggcrggaagtcatgaagtatatattagattgactgcaaatgccgactcaaaagaacaagcacaatcattgattcaacctgttaarcaagaaattcttgatcgtattggagaatattattatggttcagatgacacattaattgagcaagctgtaataaagaaaattmatgaaccttttgtaatatatgatggtattactaatggtgctttatatcatcgattgaaagaagtggatttaaacgatgttctaaagggtatgattaatcacaatgaaaactttgttgatattaataaacctattgagcagcaattaaaagatgcagtgcaatttgttaataaattrtttaatgtgtcatcagcaattattctattagagtatgatggtgtagtycatataggctatgataataacttwgaatttaaaactgagcaatttaaaatgtctraatctagaaatttattaaagaacagaagtcaaaattatgygctyataagrttattaaattggcttagaacaacaaattaa

SEQ ID NO: 3100 - DNA, 438 bp, Staphylococcus aureus
atgcgtcaaacatttatggcaaatgaatcaaacattgagcgcaaatggtatgttatcgatgctgaaggccaaacattaggtcgtttatcatcagaagtagcatctatcttacgcggtaaaaataaagtaacttacacaccacacgttgatactggtgattatgtaatcgttattaatgcatcaaaaatcgaatttactggtaacaaagaaactgacaaagtttactaccgtcactcaaatcayccaggtggtatcaaatcaatcactgctggtgaattaagaagaactaacccagaacgtttaattgaaaaytcaattaaaggtatgttaccaagcactcgtttaggcgaaaaacaaggtaaaaaattatttgtatatggtggcgctgaacatccacacgctgcacaacaaccagaaaactacgaattacgtggttaa

SEQ ID NO: 3101 - DNA, 1044 bp, Staphylococcus aureus
ttggataacgatcgtcaaaaagctttagatacagtaattaaaaatatggagaaatctttcggtaaaggtgccgtaatgaagttgggtgacaatataggtcgccgagtttcaactacatcaactggttcagttacattagataatgcgctaggtgtaggtggctatcctaaaggacgaattattgaaatttatggtcctgaaagttctggtaagacaacagtagcgcttcacgctattgctgaagtacaaagtaatggcggggtggcagcatttatcgatgctgaacatgctttagatccagaatatgctcaagcattaggcgtagatatcgataatttatatttatcgcaaccggatcatggtgaacaaggtcttgaaatcgcygaagcatttgttagaagtggtgcagttgatattgtagttgtagactcagttgctgctttaacacctaaagctgaaattgaaggagaaatgggagacactcacgttggtttacaagctcgtttaatgtcacaagcgttacgtaaactttcaggtgctatttctaaatcaaatacaactgctattttcatcaaccaaattcgtgaaaaagttggtgttatgttcggtaatccagagactacaccaggtggacgtgcattaaaattctatagttcagtaagactagaagtacgtcgtgcagaacagcttaaacaaggacaagaaattgtaggtaatagaactaaaattaaagtcgttaaaaataaagtggcaccaccatttagagtagctgaagttgayattatgtatggacaaggtatttctaaagagggtgaacttattgatttaggtgttgaaaacgacatcgttgataaatcaggagcatggtattcwtacaatggcgaacgaatgggtcaaggtaaggaaaatgttaaaatgtacttgaaagaaaatccacaaattaaagaagaaattgatcgtaaattgagagaaaaattaggtatatctgayggtgatgttgaagaaacrgaagatgcaccaaagtcattatttgacgaagaatag

SEQ ID NO: 3102 - DNA, 804 bp, Staphylococcus aureus
atgcgtatattagtagaaattgcgtatcaaggaaataattttctaggytttcaaattcaacaraatggwcgwacggtacagcaacaatttgaaaagctattacaacgcatkcataaaagacatgtgagaatccatccttcaagtaggactgatagaggtgtacatgcgatacagcartactttcatttcgacacagakytgaatatacctatgtcacaatggcaatatgcaatgaaccgaacgttaccwgatgatatttatgtcaayaatgtagttacagtcgatgacgattttcattgtcgttaygattgtgtmggtaaacgytatcgmtayaaagtatatcaagcacaacamcgcgatccatttcaaagtggtttgaaaacatttattcctgaamcrttggatttagryaaaatgaacagagcggcrcaacaattcataggtacacatgattttacgggdttttgttcgcaaaaaactgaagtagaaagcaargttagaacattataccaaagtgaaatygtaaagacagatgatggctttgattatattgtcactggatctggatttttatataacatggtgcgtgtcttagttgcatttttaatagaagtyggaaaaggrcgacatgaartwtcwgatgtrccraarctwcttgaatcaaagaatcgtaagaatgtwcctttcactgcamcggctgaaggaytatatttagagaaratttatttagatgaaaatgagttattaaaagactttggyaacgatatmaaaatacatcgyaaaaaatcattayaaaatgactga

SEQ ID NO: 3103 - DNA, 807 bp, Staphylococcus aureus
atgaaaaataaattgattatagggcgatatttaccaattaattcttttgttcatcatcttgatccaagagcaaagttaatgtttgtttttctttttattatattaatatttttctgtcattcaccattaacatatctttggrtgtttgcacttatcttattcwttatgagattagcaaaaattcaattatggttcctaatcaaaggtttaacrccaatatttttctttttaatcttcacattaatgatgcatatatttttaactaaaggtggatatgtattagttgaatggcatggcatcacgattgaaactaatggtattttagaagggctwtatatatcaytgcgtttaattgggattgtratgattgcaacaatwatgacactatctacaagtccaattgatttaacagatgcgtttgaaagattacttgcrccactaaagatgtttaaattaccagttcatcaattaagtatgataatgtccattgcgttacgattcatcccgacgttaatggatgagttagataaaatyattttggcrcaaaagtcgcgtggttctgaaataagttcagggaacattgcaacacgtattaaatcatttattccaytactagtgccactattcatctcagctttccaacgcgccgaagaattagcggtcgcaatggaagttaggggttatgatgccaatgttaagagaacgagctacagacagcttaaatggcaattgagagatacgwtatctttaaycatgattatcccaattgcwattattttattcgtattaaaatattcaggagtgtaa

SEQ ID NO: 3104 - DNA, 798 bp, Staphylococcus aureus
atgagaataatgtttataggggatatcgtaggtaaaattggacgagacgcaattgaaacgtacatacctcaactgaagcaaaagtataaaccaacagttacaattgtaaatgctgaaaatgcagcrcatggtaaaggtttgactgaaaaaatatataaacaattactaagaaatggtgtagatttcatgactatgggtaatcacacatatggtcaacgtgaaatttatgattttatagatgaagcaaaacgwctagtaagaccagckaattttccggatgaagcgccgggaattggtatgagatttatamaaattaatgatattaaacttgcagttattaatctgcaaggaagagcgtttatgccagatattgatgatccttttaaaaaggcagatcaattagtcaaggaagcacaagaacaaactccgtttatatttgttgattttcatgcagaaacaacttctgaaaagtatgcaatgggatggcatttagatggtagagctagcgctgttgttggaacgcatacacacattcaaacagcagatgaacgtattttaccaaagggkacagggtatataacggatgttggtatgacaggyttttatgayggcattttaggaataaataaaacagaggtaattgagcgttttatcactagtttgccacaaagacatgttgttccaaatgaaggtagaagtgtattatctggtgttgttattgatttrgacaaagaaggtaaaacaaagcacatcgaacgtatattgataaatgatgaccatccattttcaacattttaa

SEQ ID NO: 3105 - DNA, 861 bp, Staphylococcus aureus
atgaytatacgstttgacaatgtaagttatacctatcaaaaagggacaccataycagcatcaagctattcatgatgttaatacagaatttgaacaaggtaaatattaygccatcgttggacaaacgggtagtggtaaatcracrttgatacaaaatattaatgcrctgttaaagccractactgggacagttacagttgatgayattactattacacataagaccaaagataaatatattagacctgtaagaaaaagaattggaatggtatttcaatttcccgaatctcaattatttgaggacacagtagagcgtgaaatgatatttggacctaaaaactttaaaatgaatttagatgaagccaaaaactatgcccatcgtctgttgatggatttaggcttttcaagagatgtaatgtcacaatcaccatttcaaatgtcaggtggacaaatgcgtaaaatagcgattgtatcgatattggcaatgaatcctgatattatcgtggttgatgaaccyacagcaggacttgatccacaaagtaaacgacaagtaatgmgattactmaagtcaytacaaacagatgaaaataagrcaattatcctaatttcacatgatatgaatgaagtcgcrcgttatgcagatgaagtcatcgtwatgaaagaaggtagtatmgtgtcgcaaacatcaccaaaagagctcttcaaagataaaraaaaattggcggattggcatattggtttgccwgaaattgttcagttacaatatgactttgaacaaaaayatcaaacaaaattaaaagatattgccttaactgaagaagcatttgtaagcttgtataaggagtggcaacatgaaaaataa

SEQ ID NO: 3106 - DNA, 1761 bp, Staphylococcus aureus
atgaaaccacaattatcgtggaaagttggcggtcaacaaggcgaaggtattgaatcaactggggaaatcttcgcwacggctatgaatagaaaaggatattatttatatggatatagacatttttcaagtcgtatcaaaggtggacatacgaataataaaattagagtttctacgacgcctgttcatgcaattagtgatgatttagatattttgattgcatttgaccaagaaacaattgatgttaaccatyatgaaatgagagaagacagtatyattttagctgatgccaaggctaaacctgtgaaaccagaaggatgtcatgcacagcttattgaattaccttttacagcaaccgctaaagaattaggtacagcattaatgaaaaacatggttgcaataggtgctactagcgcattgatgaatttgaatacaaatacatttgaagaacttattactaatatgttttctaaaaaaggtgacaaggtagttgaagtcaatatccaagcattaaacgaaggttatcaattaatgcaatcycgcttayctgaaatckacggggactttgaattagagtcaacagatgcactaccacatctatatatgattggtaacgatgccattggattaggtgcaattgctgcaggttcacaatttatggcggcatatcctattacacctgcgtctgaagttatggaatatatgattgccaatatatctaaagtaaacggagcggttattcaaacagaagatgaaattgctgctgtaactatggctattggtgcaaattatggtggagtcagagcgtttacggctagtgctggtccaggtttatctttaatgatggaagcaattggattatctggtatgactgaaacgccattagtcatwattaatacycaacgaggtggaccttctactggattacctacgaaacaagaacagtcagatttaatgcaaatgatttatggtacacatggtgatattccaaaaatwgttgtagcaccwacwgatgcagaagatgcattttatttaactatggaagcmtttaatttagcagaacaatatcaatgccctgttatagttytaagtgatttrcaattatctttaggwaaacaaactgttgaaaaattagattataatcgyattgaaattaaacgtggtgaaatcattcaatctgatattgaacgtgaagaagatgataaaggttatttcaagcgttatgcgttaacatccratggtgtttctcctagacctatcccsggtrttaaaggaggtattcatcatataactggtgtggaacacaatgaagaaggtaaacctagygaatctgcrtcaaatagacaacaacaaatggaaaaacgaatgcgtaaaattgagcagttactaattgaatcgccagtagaagctaacttacaacatgargatgcagatattctttatatcggttttatttctacaaaaggtgcaattcaagaaggtagtaaycgtttgaatcaacaaggcataaaagttaacactatacaaattagacaattgcatccattcccaacaagcgttattcaagatgcagttaataaagcgaagaaagtcgttgtagtggagcacaattatcaaggacaattggctagtattataaaaatgaatgtcaatattcatgataagattgaaaattatacaaagtatgatgggacacctttcctaccacatgaaatcgaagwaaaaggyaaaataattgctactgaaataaaggagatggtatag

SEQ ID NO: 3107 - DNA, 921 bp, Staphylococcus aureus
atgagtcagaaaatactagtaatatatagmraacccagtcaatgtcatatacagcgatttataaatattgtaaaatatgatagatacacgaatcgtaaaggagagagacaagtggaggataagaattcagttattgtatttaaaaatgtttcatttcaatatcaaagtgatgcatccttcacattgaaagatgtttcttttartatacctaaaggtcagtggacatctattgttggtcataacggttctggraaatctacaattgccaagttaatgattggcatagagaaagttaaatctggagaaattttttataataatcaarctataacwgatgataattttgaaaagttaagaaaagacataggaatwgtattycagaatccggataatcaatttgttggttcaattgtaaaatacgatgtrgcatttggactcgaaaatcatgcggttccayatgacgaaatgcayagaagagtcrgcgaagcacttraacaagtwgatatgttagaacgtgcagattatgaacctaatgcattatcggggggacagaagcagcgtgtggctatagcaagtgtattagcacttaacccctctgtcattatattagatgaggcgacttctatgttagatcctgatgcacgtcaaaatttattggatttagtgagaaaagttaaatcagaacataatattacaatcatttctattacgcatgatttatctgaggcgatggaagcagatcatgttatcgttatgaataaagggactgtctataaagaaggmacagcgaytgaaattttcgacmatgcagaagagttaacaasaataggtctagatttgccattcccaatcaaaataaatcaaatgctgggayaccaaacatcattcttaacttatgaagggctggtggatcaactatga

SEQ ID NO: 3108 - DNA, 867 bp, Staphylococcus aureus
atgscgacatttaaagattttagaaataatgttaagcctaactggtgcccyggatgtggcgatttctcagtacaagctgcaattcaaaaagcagccgcaaatatagggttagaacctgaasaagtagctatcatcaccggtataggatgttctggccgtctttcaggatatattaattcttatggcgttcattctattcacggacgtgcattacctttagctcaaggtgtaaaaatggcgaataaagatttaactgttattgcatckggaggagatggtgatggttatgctatwggtatggggcatacaatccatgctttaagaagaaatatgaacatgacgtatatagtcatggataatcaaatttatggtttgacaaagggacaaacatcgccgtcatcagcagtaggatttgttactaaaacaacgccaaaaggtaatatagaaaaaaatgttgcgcctttagaattagyattatcatctggtgccacatttgtagcccaaggtttttcaagygatattaaaggattaacaaaactaattgaagatgcaattaatcaygatggrttttcattygttaatgtcttttcaccatgtgtgacttataataaaattaacacatacgattggtttaaagaacatttaacaagtgttgatgacattgaaaaytatgattctacagataaacaattagcgactaaaactgttattgaacatgaatctttagtaactggtattgtttatcaagataaagaaacmccatcatatgaatctcaaatyaaagagttagatgatacaccactwgctaaaagagatatcaaaattactgaagacacsttcaatgcattaactgaacaatttatttaa

SEQ ID NO: 3109 - DNA, 369 bp, Staphylococcus aureus
atgggttacagaaaattaggtcgtacttctgatcaacgtaaagctatgttacgtgacttagctacatcacttattattagtgaacgtattgaaactacagaagctcgtgcaaaagaagttcgcagtgttgttgagaaattaatcactttaggtaaaaaaggagatttagcttctcgtcgtaatgcagctaaaactttacgtaatgttgaaatcttaaacgaagatgaaactacacaaactgcacttcaaaaattatttggtgaaatcgcagagcgttacacagaacgtcaaggtggttacactcgtatccttaaacaaggccctcgtcgcggtgacggtgctgaatcagtaattatcgaattagtataa

SEQ ID NO: 3110 - DNA, 294 bp, Staphylococcus aureus
atgaaagacacattaatgagtrtacaaataattcctaaaacaccaracaatgacaatgttataccttacgtagacgaggcgattaaaataattgacgaatctggtwtgcattttagagtaggtccgttagaaacgacagtacaaggaaatatgaatgaatgtttaattttaatacaatcrttaaatgaacgaatggtggaacttgaatgtccaagtattattagccaagttaagttttatcatgtgccagayggcatyactattgaaactttaactgaaaaatatgatgaataa

SEQ ID NO: 3111 - DNA, 945 bp, Staphylococcus aureus
atgatagaaatcgaaaaacctagaattgagacaattgaaattagtgaagatgctaaattcggtaagttcgttgttgaaccactagaacgtggctacggtactacactaggaaactccttacgtcgtatcctactatcttcattaccaggtgcagccgttaagtayattgaaattgagggagttttacatgaattctcagcagtagacaatgtagttgaagatgtttctacaattattatgaacattaaacaattagcattgaaaatttactctgaagaagataaaactttagaaattgatgtacgtgatgaaggcgaagtaacagcaagcgacattacacatgayagtgatgttgaaattttaaacccagagcttaaaattgcaacagtatctaaaggtggtcacttaaaaattcgtctagttgctaacaagggtagaggttacgcattagcagaacaaaataatactagtgatttaccaattggtgtaatccctgttgattcattgtattcacctgttgaacgtgtgaactatactgttgaaaatacacgtgtaggtcaaagcagtgattttgataaattaacattggatgtttggactaatggttcaatcacaccacaagaatcagtttcattagcagcaaaaataatgactgaacacttgaatatcttcgttggtcttactgatgaagcgcaaaacgctgaaatcatgattgaaaaagaagaagatcaaaaagaaaaagtattagaaatgtctattgaagaattagacttatctgtacgttcatataactgcttaaaacgcgcaggaatcaattctgttcaagagttagctgacaaatctgaagctgacatgatgaaagtgcgtaatttaggtcgtaaatctttagaagaagttaaatacaaattagaagatttaggattaggattaagaaaagaagattga

SEQ ID NO: 3112 - DNA, 1545 bp, Staphylococcus aureus
gtgaacgaagaacaaagaaaagcaagttctgtagatgttttagctgagagagataagaaagcagaaaaagattatagtaaatattttgaacatgtttatcarccgcctaatttaaaagaagcraaaaaaagaggtaaacaagaagttcgttataatagagatttycaaattgatgaaaaatatcgcggtatggggaacgagcgtacatttttaattaaaacatatggatgtcaaatgaatgcacatgacactgaggtcattgctggtatacttgaagcattaggctatcaagcaacgactgatattaacactgcagatgttattttaattaatacatgtgcgattagagaaaatgccgagaacaaagtktttagtgaaataggtaatttgaagcatttgaaraaagaacgacctgatattttaatcggwgtttgtggttgtatgtcacaagaagagtcagtagtgaataaaattttaaaatcgtatcaaaatgtagatatgatatttggtacacayaatattcatcatttaccagaaattttagaagaagcatacttatctaaagcaatggttgttgaagtatggtctaaagaaggagacgttattgaaaatcttccaaaagtccgtgaaggcaacattaaagcatgggtcaatattatgtatggttgtgataagttttgtacatattgyattgttccatttacaagaggyaaagaacgaagccgyagacctgaagacattatagatgaagtacgtgaacttgctcgtgaaggttacaaagaaataacgcttttaggtcaaaatgtaaattcttatggtaaagatttacaggatatagaatatgacttaggagaycttttacaagcaatttctaaaatagcgattccaagagttcgtttcacaacaagtcatccttgggacttyacagatcacatgattgatgttatttcagagggtggtaatatcgttcckcatatccacttgccagttcaatctggaaataatgcagtattaaaaataatgggtagaaaatatacacgagaaagttatttggatttagtaaaacgaatcaaagatagaattccwaatgtagcattaactacagatattattgtagggtatccaaatgaatcagaggaacaatttgaagaaactttaactytgtatgatgaagttggttttgaacatgcatatacgtayttgtattcacaacgtgatggtacgcctgctgctaaaatgaaagataatgtacctttaratgtcaaaaaggaacgattgcaacgtttgaataaaaaagttggtcattattcacaaatagctatgagtaagtacgaaggacaaactgtaacagtactttgtgaaggwagtagtaaaaaagatgatcaggttcttgctggctacactgataaaaataagytagttaatttcaaagcrcctaaagaaatgattggtaaactagtggaagtacgaatagatgaagctaaacagtattcattaaatggcagytttrtaaaggaagtagagccggaaatggtgattcaataa

SEQ ID NO: 3113 - DNA, 390 bp, Staphylococcus aureus
atggcacgtaaacaagtatctcgtaaacgtagagtgaaaaagaatattgaaaatggtgtagcacacatccgttcaacattcaacaacactattgtaactatcactgatgagttcggtaatgctttatcatggtcatcagctggtgcattaggattcaaaggatctaaaaaatcaacaccatttgcagcacaaatggcttctgaaactgcatctaaatcagctatggagcatggtttaaaaacagttgaagtaacagttaaaggacctggtccaggtcgtgaatcagctattcgtgcattacaatctgcaggtttagaagtaactgcgatcagagacgttactccagtacctcataacggttgtcgtccaccaaaacgtcgtcgtgtataa

SEQ ID NO: 3114 - DNA, 366 bp, Staphylococcus aureus
atgtataataaagatgacgtgttgaamcaagcggataatattgcaaataaaattaaaaatttggatactatcaaaacatatcaacaaattgaagcacagattcatcagaaccaaacgataaagactaaaatggatatgttaaaaaagcatcaaaaacaagcagtaaactttcaaaattacgggaaacaaaatgcgctagaacagtcggaacataccattcaragtatagaagcagaaataaatacattgcccatagttgaacagtttcaaacttcacaatatgaagcgaatcaattattgaaaatgtttgtatcaacaatggaaacacgtttaaatgaccataataaagccaarcatagtgattaa

SEQ ID NO: 3115 - DNA, 366 bp, Staphylococcus aureus
atggcacgtattgcaggagtagatattccacgtgaaaaacgcgtagttatctcattaacttatatatacggtatcggtacgtcaactgctcaaaaaattcttgaagaagctaacgtatcagctgatactcgtgtgaaagatttaactgatgacgaattaggtcgcatccgtgaagttgtagacggttataaagtcgaaggtgacttacgtcgtgaaactaacttaaatatcaaacgtttaatggaaatttcatcataccgtggtatccgtcaccgtcgtggtttaccagttcgtggtcaaaaaacgaaaaacaacgcgcgtactcgtaaaggaccagttaaaacggtagctaacaagaaaaaataa

SEQ ID NO: 3116 - DNA, 492 bp, Staphylococcus aureus
atgaaatcaagaaaactggctataactgcacttttaattgcaataaatgttgtattaagcagtattatcatcattcctctaggaccagttaaggcagcaccagtacagcattttgtaaatgtattaagtgcggtcatagtaggtccttggtatggattagctcaagcgcttatatcatcaattttaagagttctttttggwactggtacagcttttgcatttccrggtagtatgattggagttttattggctagtatgttttacatatatcgtaaacatatattyatggccgcggtcggtgaagtacttggaactggtgtcatcggaagtttaatttgtataccattagcatatttccttgggcttcaagacttcttcattaaaccgytaatgattacgttcatagtctcaagtgctatcggatctattataagttatttcttattamttactctaaaaaaacgtggtattcttcaaaggtttataaaataa

SEQ ID NO: 3117 - DNA, 1110 bp, Staphylococcus aureus
ttgaatattgtaattacaggrgcamadggttttgtaggaaaaaacttgaaagcagatttaacwtcaacgacagatcatcatattttcgaagtacatcgacaaactaaagaggaagwattagagtcarcrttgttgaaagcagactttrtcgtrcatttagcrggwgttaatcgacctgaacaysacaaagaattcagcttaggaaaygtgagttatttagatcatgtacttgatatattaactagaaatacgaaraagccrgcgatattattatcgtcttcaatacaagcaacacaagataatccttatggtgagagtaagttgcaaggkgaacagctattaagasartatgccgaagagtatggcaatacggtttatatttatcgmtggccaaatttattcggyaagtggtgtaagccgaattataactcwgtgatagcaacattttgttacaaaattgcacgtaacgaagagattcaagttaatratcggraygttgaactaacrctaaactacgtggatgatatcgtcgctgaaataaarcgtgctattgaaggaamtccaacgattgaaaatggtgtacctacagtaccaaaygtatttaaagtgacattgggagaaattgtagattyattatacaagttcaaacagtcacgtctcgatcgaacattgccgaaattagataacttrtttgaaaaagatttgtatagtacgtatttaagctatctacctagtacagactttagttatcccttacttatgaatgtggatgataggggwtcttttacagaatttataaaaacaccggatcgtggtcaagtttctgtaaatatttctaarccaggwattactaaaggtaatcactggcaycatactaaaaacgaaaaatttctagtcgtatcaggtaaaggggtaattcgttttagacatgttaatgatratgaaatcattgartattaygtttctggcgayaaattagaagttgtagacataccagtaggatacacacataatattgaaaatttaggygacacagatatggtaactattatgtgggtgaatgaaatgtttgatccaaatcagccagatacgtatttcttggaggtatag

SEQ ID NO: 3118 - DNA, 2523 bp, Staphylococcus aureus
atgttttatgaagatgccaaggaggcatcacgtgtacttgaaattactttaactaaaagagatgctaaaaaagaaaatccaattccgatgtgtggtgttccgtatcattctgcagatagttatatagatacacttgttaataatggatataaagtagctatttgtgaacagatggaagatccgaaacaaacgaaaggtatggttagacgtgaggtagtaagaattgtgactccaggaactgtgatggagcaaggtggtgtagatgataaacaaaataactatattttaagttttgttatgaatcaacctgaaattgcgcttagttactgtgatgtttctactggygaattaaaggttacacattttaatgatgaagcgactttattaaatgaaattacgacgataaaccctaacgaagttgttatcaatgacaatatttccgatmatttaaaaagacaaattaatatggtgacagaaacaataacagtcagggaaacgttatcatcwgaaatctayagtgtgaatcaaactgaacataaattaatgtatcaagcgacacaattattgctagattatattcatcatacacaaaarcgtgatttatcgcatatygaggatgytgttcaatatgcagctatagattatatgaaaatggatttttatgctaagagaaaccttgagttaacggaaagcattcgattaaaatcmaaaaaaggaacgctactttggctratggacgaaacgaaaacaccaatgggagcacgccgmttaaaacaatggatagatagaccactaataagtaaagaacaaattgaagcacgattagatatcgttgatgaatttagtgctcatttcatagaaagagacaccttaagaacatatcttaatcaagtgtatgatattgaacgtcttgttgggcgtgttagttacggaaatgttaatgcgagagatttaattcaacttaaacattccatttctgaaataccgaatattaaagcattactaaattctatgaatcagratackcttgtacaagttaatcaactagaaccmcttgatgatttacttgatatattagaacagagtttagtagaagaaccaccaatttcagttaaagatggyggactattcaaagttggttttaataygcaattagatgaatatcttgaagcttcaaaaaacggaaaaacatggttagcagaaytacaagcmaaagaaagacaacgtacaggaataaaatcattgaaaataagctttaataaagtgtttggttattttatagaaataacacgtgccaacttgcaaaattttgaaccaagtgaatttggttatatgaggaagcaaacgttatcgaatgckgaacgwtttataactgatgaacttaaagaaaaagaagatatcattttaggtgcggaagacaaagccatygaattagaatatcaattatttgttcagctacgtgaagaagttaaaaaatatactgaacgtttacaacawcaagctaaaattatttcagagytagattgtttacagagctttgcagaaattgctcaaaaatataattayactaggccttcatttagtgaaaataaaacattagaattagtggaatctaggcacccagtagtggaaagagtaatggattataatgactatgtgcctaataattgtcgattagataaygaaacatttatatatttaattacaggtccgaatatgtctggtaaatcgacrtatatgagacaagttgccataattagtataatggcccaaatgggagcttatgtcccttgtaaagaggcwgtgttacctatatttgatcaaatattcactagaataggtgcggcagatgatttggtttcaggtaagagtacgtttatggtagaaatgctagaagcacaaaaggcattaacttatgcaacagaggatagtttgattattttcgatgaaattggacgtggtacttcaacgtatgacggtttagctttagcgcaggcaatgatagagtatgtagctgaaacatcrcatgctaaaacgttattttcaacacattatcatgaattgacaacattagatcaagcattaccaagtctaaaaaatgttcacgtcgctgctaatgaatataaaggtgaacttatattcttgcataaagtcaaagatggtgcagttgacgatagttatggtattcaagttgcgaaattagctgatttacctgaaaaagttattagcagagcacaagtgatyctaagcgagtttgaagcgtctgctggtaaaaaatcatcgatatcaaatttaaaaatggtcgaaaatgaacctgaaattaatcaagaaaattyaaacttaagtgttgaagaaacaactgatactttatctcaaaaagactttgaacaagcatcatttgatttgtttgaaaatgatcaaraaagcgagattgaactacaaattaaaaatttgaatttatctaatatgacaccaattgaggcattggtgaagttaagtgaattacaaaatcaattaaaatag

SEQ ID NO: 3119 - DNA, 219 bp, Staphylococcus aureus
atggctaaacaagatgtaattgaattagaaggtactgtattagatactttaccgaacgcaatgtttaaagtagaattagaaaatggtcatgagattttagctcacgtaagtggtaaaatcagaatgaattacattcgtattctacctggcgacaaagtaactgttgagatgtctccgtacgatttaacacgcggaagaattacttatcgttataaataa

SEQ ID NO: 3120 - DNA, 2010 bp, Staphylococcus aureus
atggggaaaattaaagaactccaaacctcattagcaaataaaatcgcagcaggtgaagtagttgaaagaccgagttctgttgtgaaagaactgttggaaaatgctatagatgcaggcgctacagaaataagcattgaagtagaggaatctggcgtccaatctattcgcgtagtcgataatggaagcggaattgaagcggaagacttaggattagtatttcatagacatgcgactagtaarttagatcaagatgaagatttatttcatattaggacrttaggattccgtggtgaagcactagccagtatttcatcagttgctaaagtaacattgaagacttgcacggataatgctaatggaaatgaaatatatgtagaaaatggtgaaatattaaatcataagcctgcaaaagcgaaaaaaggaacagatatacttgtagaatcattattttataatacaccagcacgtttaaaatatatwaaaagtttatacactgaactaggtaaaataacagatattgtcaayagaatggcwatgagycatccggacattcgaatagcactcatttcagatggcaaaacaatgttaagtacaaatggttcaggamgaactaatgaagtgatggcagagatttatgggatgaaagttgcacgagatttagtacatatatctggagatacaagtgattatcacattgaaggttttgttgcaaagcctgaacattctagaagtaataagcactatatttctatttttattaatggacgatacattaaaaactttatgytaaataaagcgattttagaaggctatcatacactcttaacaataggtaggttcccgatttgttatattaatattgaaatggatccaatcttagtagacgtaaatgttcatccaacaaaactagaagtgcgtttatcaaaagaagagcaactataycaattgatwgtgagcaaaatacaagaagcatttaaagaccgtatattaattcctaaaaataacttggattatgtgccraaaaaaaataaagtrttayattcattcgaacaacaaaaaatcgaatttgaacaaagacaaaacacagagaataahcargagaagacgttttcatctgaagaaagtaacagtaagycatttatgghagaaaatcraaacgatgaratagttataaragaagattcatataatccattcgtaacgaaaacrtctgaaagtttaatarctgatgatgaatcttcyggttatrataatacacgtgaaaaagatgaagactacttcaaaaarcaacaagaaattytacaagaaatggatcaaacatttgattcraatgabgrtrcawctgtgcaaaattatgagaataaagcgtctgatgattattatgatgtaaacgatattaaaggaacaaaaagtaaagaccctaaacgaagaattccatatatggaaattgttggmcaagtacatggracgtatattattgctcaaaatgaatttggcatgtacatgattgaccagcatgcagctcaagaaagaataaaatatgaatattttcgagataaaataggtgargttaccaatgaartacaagatttattaatcccgttaacatttcatttttcaaargatgaacaattagtyattgatcaatataaaaatgagcttcaacaagtaggtatcatgttagaacattttggtggtcatgattatattgtaagtagctatccagtttggttccctaaagatgaagtagaagaaatyattaaagatatgattgagctaattttggaagagaaaaaagtagatatyaaaaaattacgtgaagatgtagcaatcatgatgtcatgtaaaaaatcyattaaagcgaatcattatttacaaaaacatgaaatgtctgatttaattgatcaattaagagaagcggaagatccatttacatgtccacatggtcgtccaatwatcattaatttttcaaaatacgaattagaaaaattatttaagcgtgtgatgtag

SEQ ID NO: 3121 - DNA, 648 bp, Staphylococcus aureus
atgaatatcattttgatgggtttacctggcgcaggtaaaggaactcaagcaagtgaaattgtcaagaaattcccaataccccacatttcaactggtgacatgttcagaaaagctataaaagaagaaactgaattaggtaaagaagctaagtcttatatggaccgtggcgaattagttcctgatgaagtgactgtaggtatcgttaaggaaagaatttctgaagacgatgcaaaaaaaggctttttattagatggcttcccaagaacaatcgagcaagctgaggcattaaataatattatgtctgagcttgacagaaacattgatgctgtcatcaatatcgaagttccggaagaagaattaatgaaccgtcttacaggtcgtcgaatctgtgagtcatgtggtacaacgtatcatcttgtatttaatcctccgaaggtcgaaggtatttgtgatatcgatggtggtaaattgtatcaacgagaagatgataatcctgaaacggtagctaatcgtttgagtgttaatattaaacaatctaarcctattttagatttctatgatcaaaaaggtgtattgaaaaatattgatggttcaaaagatattagcgacgttaccaaagatgtcattgatattttagatcatttgtaa

SEQ ID NO: 3122 - DNA, 543 bp, Staphylococcus aureus
atgaatcaagtgaataacaacatattgcctgcyataagaaacattaaagatttagagaaactgattaaaacagaytataaaatgtgtgtgcttctagatatgcatataggacatataaaaagtattatggaattgctgaagcaaaatcatatagagtgttttattcatatagatttgataaaaggtttaagycacgatgaatttgcaagtgaatttattattcagcaatacaagccaaaaggtatygtatcgactaaatctaaagtaataaaaaaagckaaatcattaaatactttaacgatttttagagtrtttattattgatagtcaagcattgaaacgcagtatagatttgataaaaaaagtkgaacctgattttgttgaagtacttccrggtgttgcgagtaaagcgattcatcatattcagaaagaaacaaacacacaagtcattgcaggtggcctaattaatacaatagatgaagtyaatgaagctgttaaaaatggagcgaaatatgtaacwactagttatgataaactytggtra

SEQ ID NO: 3123 - DNA, 1293 bp, Staphylococcus aureus
atgattcaaacccttgtgaacttctttagaacaaaagaggttcgtaacaagattttcttcacactagcaatgttagtaatttttaaaatagggacttatataccagctccaggagtaaatcctgcagcttttgataatccccaaggttctcaaggtgccactgagttattaaatacttttggtggcggagccttgaaacgattttctatttttgcaatgggtattgtaccctacatcactgcatcaatcgtaatgcaattattacaaatggatattgtccctaaattctcagaatgggcaaaacaaggtgaagtaggtagaagaaagttaaataacgttactcgttatttagcaatttctttagcatttatccaatctataggtatggcattccaatttaataattatctcaaaggtgcgctgattatcaatcagtcaattatgagttatttattaatagcactagttttgacarcwggaactgctttcttaatatggcttggtgatcaaatcactcagttcggtgttggtaatggtatttctattatcatatttgcgggtattttatcaacgttgccagccagtctaattcaatttkrwcaammwgcgttcgttgggcaagaagatacatcattagcatggttgaaagtattaggacttttagtgtcactgatactattaactgtaggtgctatttatgtacttgaagccgttcgtaaaattccgattcaatatgctaagaaacaaactgctcaaagattaggttcacaggcaacttatctacctttaaaagtgaactcagccggtgttattcctgtaatctttgcaatggcgttcttcttactgcctagaacattaacgttgttctatccagataaagaatgggcacaaaacattgcgaatgctgcaaatccttcaagtaatgttggtatggttgtatatattgtactaattatactattcacatacttctatgcatttgtacaagttaatccggaaaaaatggctgataaccttaagaaacaaggtagctatgttccaggyattagacctggtgaacaaaccaaaaaatatattactaaagttttatatcgtttaacttttgtaggttctatcttcttagccgttatttcaattctaccratattagcaactaagtttatgggattaccacaatcaattcagattggtggtacaagtttacttatcgttattggtgtagcgattgaaacaatgaaatctttagaagcwcaagtatctcaaaaagaatataaaggctttggtggtagataa

SEQ ID NO: 3124 - DNA, 819 bp, Staphylococcus aureus
atgaatgtatatttagcagaattcctaggaactgcaatcttaatcctttttggtggtggcgtttgtgccaatgtcaatttaaagagaagtgctgcgaatggtgctgattggattgtcatcacagctggatggggattagcggttacaatgggtgtrtwtgctgtyggtcaattctcaggtgcacatttaaacccagcggtgtctttagctcttgcattagacrgaarttttgattggtcattagttcctggttatattgttgctcaaatgttaggtrcaattgtyggagcaacrattgtatggttaatgtacttgccacattggawagcgacagaagaagctggcgckaaattaggtgttttctctacagcaccrgctattaagaattaytttgccaactttttaagtgarattatcggaacaatggcattaactttaggtattytatttatcggtgtaaacaamattgcygatggtttaaatcctttaattgtcggagcattaattgttgcaatyggattaagtttaggcggtgctactggttatgcaatcaacccagcacgtgatttaggtccgagaattgcacatgcgattttaccaatagctggyaaaggtggttcaaattggtcatatgcaatcgttcctatcttaggaccaattgccggtggtttattaggtgcrgtrgtatacgctgtattttataaacatacatttaatattggttgtgcaattgcaattgttgtagttattattactttgattttaggttacattttaaataaatcatcaaaaaaaggtgatatcgaatcaatttactaa

SEQ ID NO: 3125 - DNA, 441 bp, Staphylococcus aureus
atgaaattacatgagttaaaaccggcagaaggttcacgtaaagaacgcaatcgtgttggacgtggtgttgcgacaggtaayggtaaaacaagtggtcgcggacacaaaggtcaaaaagctcgttcaggcggtggtgtaagaccaggattygaaggtggtcaattaccattattccgtcgtttaccaaaacgtggttttactaacataaatcgtaaagaatatgctattgttaacttagaccaacttaataaatttgaagatggtactgaagtaactccagctttattagtagaatctggtgttgttaagaatgaaaaatctggtatcaaaatactaggtaatggttcacttgataagaaattgacagtgaaagctcataaattctcagcttcagcagcagaagctattgatgctaaaggtggagcacacgaggtgatctaa

SEQ ID NO: 3126 - DNA, 1497 bp, Staphylococcus aureus
atggaaaaatatattttatctatagaccaaggaacaacaagctcaagagcgattttattcaatcaaaaaggggaaattgcaggggtagcacaacgtgagtttaagcaatattttccacaatcaggttgggttgaacatgatgcaaatgaaatttggacatctgtgttagctgtaatgacggaagtaattaatgaaaatgatgttagagctgatcaaattgcaggwatcggtattacaaaccaacgygaaacaacggtkgtttgggacaaacatactggccgcccaatttatcacgcaattgtttggcaatcacgtcaaacacaatcaatttgttcagaattaaaacaacaaggatatgaacaaacatttagagataagacaggattacttttagatccgtattttgcaggtacaaaagttaaatggattctagacaatgttgaaggtgcacgagaaaaagcagaaaatggcgatctattatttggaacgattgatacttggttagtatggaaattatcaggaaaagcygcgcatattactgattattcaaatgcgagtcgtacattaatgtttaatatccatgatttagaatgggacgatgagttattagaactacttacagtacctaaaaatatgttgccagaagttaaascttcragtgaartatatggtaagacaattgattaccacttctatggtcaagaagtaccaatygctggwgtagctggtgatcaacaagcagcattatttggacaagcttgcttcgaaygtggtgacgtgaaaaacacatatggaactggtggcttcatgttaatgaatacaggtgacaaagcggttaaatctgaaagtggtttattaacaacaattgcttatggtattgatggaaaagtaaattatgcgcttgaaggttccatctttgtttcgggttcagcaatccaatggttacgtgatggattaagaatgattaattcagcaccacaatcagaaagttatgcgacacgagttgactctactgagggtgtttatgttgttccagcttttgtaggtttaggaacaccatattgggattctgaagcacgtggtgcgattttcggtttawcacgtggaactgaaaaagagcactttatccgtgcaacwwtagaatcaytatgttaccaaactcgtgacgttatggaagcaatgtcaaaagactctggyatygatgtccaaagtttacgtgtcgatggtggtgcagttaaraayaactttattatgcagttccaagcagacattgttaatacttctgttgaaagacctgaaattcaagaaactacagctttaggtgctgcatwtttrgcaggwttagcagttggattctgggagagtaaagatgatatcgctaaaaactggaaattagaagaaaaattcgatccgaaaatggatgaaggcgaaagagaaaaattatatagaggttggaaaaaagctgttgaagcaacacaagtttttaaaacagaataa

SEQ ID NO: 3127 - DNA, 180 bp, Staphylococcus aureus
atggctaaattacaaattaccctcactcgtagtgttattggtcgtcctgaaacacaacgtaaaactgttgaagctttaggtcttaaaaagactaacagttcagtagttgttgaagataaccctgctattcgtgggcaaatcaacaaagttaagcacttagtaacagtagaagaaaaataa

SEQ ID NO: 3128 - DNA, 1674 bp, Staphylococcus aureus
atggcrttgtctacttttaagagagaacatattaaaaagaatttaagaaatgatgaatatgatttagtaattattggtggcggtattacaggtgcaggtattgcactagacgcgagtgaaagaggaatgaaagttgcattagttgaaatgcaagactttgcacaaggaacaagctcaagatctacaaaattagtccatggtggtttrcgttacttaaaacaattccaaatwggagtagttgccgaaactggtaaagaacgtgcgattgtttatgaaaatggrcctcatgttacgactccagagtggatgcttttaccaatgcataaaggtggaacatttggtaaattctcaacatcaattggtttaggaatgtatgatcgtttagcaggtgttaagaagtctgaacgtaaaaaaatgttatctaaaaaagaaactttagctaaagaaccattagttaaaaaagaaggtctaaaaggcggcggttactatgttgaatatcgtactgacgatgcgcgtttaactattgaagttatgaagcgtgctgcygaaaaaggcgcagaaattatcaactatactaartcwgaacacttcacttatgataaaaatcaacaagtaaatggtgttaawgttatagataaattaactaatgaaaattatacaattaaggctaaaaaagtggttaatgcagcaggyccatgggttgatgatgttagaagtggtgattatgcacgcaataataaaaaattacgtttaactaaaggtgtacatgttgttattgatcaatcaaaattcccattaggtcaagcagtatactttgatactgaaaaagatggaagaatgatttttgcaatyccrcgtgaaggaaaagcgtatgtaggtactacagatacattctatgacaatatcaaatcttcaccattaactacacaagaagacagagaytatttaatcgatgcgattaattacatgttccctagtgttaatgttacagatgaagatattgaatcaacatgggcaggaattagaccattaatttacgaagarggcaaagacccttctgaaatctctcgtaaggatgaaatttgggaaggtaaatcaggtttattaactattgcaggtggtaaattaacaggctatcgtcacatggctcaagacattgttgatttagtatctaaacgcttgaaaaaagactayggtttaacatttagtccatgtaatacaaaaggtctggcaatttcwggtggcgatgtaggtggtagcaagaactttgatgcgtttgtagagcaaaaagtagatgtagctaaaggattcggcattgatgaagatgttgcragacgtttagcatctaaatatggttcaaatgttgatgaattgttcaacattgcgcaaacatctcaataccatgayagcaagttaccattagaaatttatgtagaacttgtttatagtattcaacaagaaatggtatacaaacctaacgatttcttagttcgtcgttctggtaaaatgtayttcaatattaaagatgtattagattataaagatrstrtcatcgatattatggcwgatatgytwgaytaytctccagctcaaattgargcwtatactgaagaagttgagcaagcaattaaagaagcgcaacatggaaataatcaaccagcagttaaagaataa

SEQ ID NO: 3129 - DNA, 501 bp, Staphylococcus aureus
atggctcgtagagaagaagagacgaaagaatttgaagaacgcgttgttacaatcaaccgtgtagcaaaagttgtaaaaggtggtcgtcgtttccgtttcactgcattagttgtagttggagacaaaaatggtcgtgtaggtttcggtactggtaaagctcaagaggtaccagaagcaatcaaaaaagctgttgaagcagctaaaaaagatttagtagttgttccacgtgttgaaggtacaactccacacacaattactggccgttacggttcaggaagcgtatttatgaaaccggctgcacctggtacaggagttatcgctggtggtcctgttcgtgccgtacttgaattagcaggtatcactgatatcttaagtaaatcattaggatcaaacacaccaatcaacatggttcgtgctacaatcgatggtttacaaaaccttaaaaatgctgaagatgttgcgaaattacgtggcaaaacagtagaagaattatacaattaa

SEQ ID NO: 3130 - DNA, 915 bp, Staphylococcus aureus
atgactgaaaaacaatttaaattaactgtacaagataatacgaatattgaagttaaagtgaattttacagatgtagattcaaaaggaattattcatatatttcatggtatggctgaacatatggaacgttacgataaattagcacatgcactttcwaagcatggcttcgatgtgatacgtcataatcatcgaggacatggtattaatattgatgaatcaacaagagggcattacgatgatatgaaacgagttatcggtgatgcctttgaagtagcgcaaacagtgagaggcaatgttgataaaccatacattataatcggacattcaatgggatccgttatagctagattgtttgtagaaacatatccgcaatatgttgatggtctaattttaagtggtactggtatgtatycattatggaaaggwttaccaaccgttaargtgttacaactgattacaaaaatttatggtgcygagaaacgrgttgaatgggttaaccagttagtatcaaatagttttaataaaaaaatacgtccattacgtacacaaagtgattggatttctagtaatccaaytgaagtagayaactttattaaagatccatatagtggatttaatgtgtcaaatcaattattatatcaaacagcmtattatatgctacatacatcacaattaaaaaatatraaaawgttaaatcatgccatgcctatattattagtttcaggatatgacgatyctttaggtgattatggtaaagggattttaaaattggcgaatatatatagaaaagcyggcattaaaaatgttaaagtkaatctttatcatcataaacgtcatgaagtgttatttgaaaaagatcatgacaaaatttgggaagacttgtttaaatggttgaatcaattttataaaaaataa

SEQ ID NO: 3131 - DNA, 360 bp, Staphylococcus aureus
atgatcagtaaaattgataaaaataaagtgcgtttaaaaagacatgctcgtgttcgtactaacttatcaggtacagctgaaaagccacgtttaaacgtatatcgttcaaacaagcatatctacgctcaaattattgatgataataaaggcgtaacattagctcaagcttcttcaaaagacagcgacattgctactacagcaactaaagttgaattagcaactaaagtcggtgaagcaattgctaaaaaagctgctgacaaaggcattaaagaaatcgtatttgaccgtggaggatatttatatcacggacgtgttaaagcattagctgaagcagcaagagaaagcggattagaattttaa

SEQ ID NO: 3132 - DNA, 936 bp, Staphylococcus aureus
atgaataaaaataagccttttattgtagtaattgtggggccaactgcttcaggtaaaacagagcttagcatmgaactcgcgaagcgtatcaatggtgaaatcataagcggtgaytctatgcaagtytacaaacatatgaatattggaactgcaaaagtaacacctgaagaaatggatggtattccacatcatttaattgrtatcttgaatcctgatgatacattttcagcatatgaattcaagcgattagcagaagatttaattactgatataacgaatagaggtaaagttccaatcatagcaggtggaacaggcttatatattcaatcattaatatataattatgaattagaagatgaaacagttacacctgcacaattatcsrtagttaaacaaaagttatctgcattagaacatttagataatcagcaactacacgawtatttagctcaatttgaygmggyttctgcmraaaatattcayccwaacaaycgmcaragagkrttgcgcgctatygaataytatttwaaaacaaaaaaacttttragtaatcgyaagaaagtgcaacaatttactgaaaattatgatacattattawtagggattgaaatgtcgcgtaaaacattatattcaagaataaataaacgtgttgatattatgttggatcacggattatttagagaagtgcaacaacttgttgaacaaggctatgaatcttgccaaagtatgcaagctattggatataaagaattaatacctgtgattaacggacaaatgatttatgaagatgctgtcaatgatttaaagcaacattcacgccaatatgcaaaacgacaaatgacatggttcaagaataaaatgagtgttcattggttagataaagaaaatatgtcacttcaaatgatgttagatgagattacaacccagattaagtaa

SEQ ID NO: 3133 - DNA, 417 bp, Staphylococcus aureus
atgacattcaaacaagaagaaaacacaattgaagttgtaagaccatctgattctaaagaagatagaacaaaccatggtacaactcgtgctttattaaayaatatggtacaaggtgtttctcaaggatacgtaaaagtacttgaacttgttggtgtaggttaccgtgctcaaatgcaaggtaaagacttaatccttaacgttggttattctcacccagtagaaattaaagctgaagaaaacattactttctcagttgagaaaaacacagtcgttaaagttgaaggtatttcaaaagaacaagttggagcattagcatctaacatccgttcagtaagacctccagagccttacaaaggtaaaggtattcgttaccaaggtgaatacgttcgccgtaaagaaggtaaaactggtaaataa

SEQ ID NO: 3134 - DNA, 234 bp, Staphylococcus aureus
atgattgcaaacgaaaacatccaagacaaagcactagagaattttaaagcaaaccaaactgaagtaactgtattctttctaaacggtttccaaatgaaaggtgttattgaagaatacgacaagtatgtcgtaagcttaaattctcaaggcaaacaacacttgatttacaaacatgcgatcagcacttatacagtagaaactgaagstcaagmatctactgaaagtgaagaataa

SEQ ID NO: 3135 - DNA, 399 bp, Staphylococcus aureus
atgacaatgacagatccaatcgcagatatgcttactcgtgtaagaaacgcaaacatggtgcgtcacgagaagttagaattacctgcatcaaatattaaaaaagaaattgctgaaatcttaaagagtgaaggtttcattaaaaatgttgaatacgtagaagatgataaacaaggtgtacttcgtttattcttaaaatatggtcaaaacgatgagcgtgttatcacaggattaaaacgtatttcaaaaccaggtttacgtgtttatgcaaaagctagcgaaatgcctaaagtattaaatggtttaggtattgcattagtatcaacttctgaaggtgtaatcactgacaaagaagcaagaaaacgtaatgttggyggagaaattatcgcatacgtttggtaa

SEQ ID NO: 3136 - DNA, 1239 bp, Staphylococcus aureus
atggctcagcaacaaattcatgatactaaaaataaactagaaaaagctgtmttagtcggtgtacatgctcaagatgataagcaatttaattttgagtctacaatggaggaattatcatctttatcagagacttgccaacttgaagtgttgggtcaaattactcaaaacagagatcgtgtagatcgcaaatattatgttggtaaaggtaaaatkgaagaaattcaagcatttattgagttcaaagatattgatgtagtcatcacraatgatgaattaacgactgcacaatccaaatcactaaatgaagctttaggtgtaaaaattattgatagaactcagttgattcttgaaatatttgcattaagagcaagaagtaaagaaggtaaattgcaagtagagctagcacaacttgattatttattacctagattgcaaggccatggtaaaagyctttctcgtttaggtggcggtattggaactagaggccctggtgaaacgaagttagagatggatcgyagacatattcgaactcgtatgaatgaaatwaaacwtcaattgcgracggtagaagaacatcgcgaaagatatcgaaataaaagaaatcaaaatcaggtgtttcaagtagctttagttggttatacaaatgctggtaaatcatcatggtttaatgttttagcaaatgaagagacrtatgaaaaagatcaattatttgcaacgttagatcctaaaacacgacaaattcaaataaatgatggatttaatttaattatttcagatactgttggttttatacagaaactacctacgacgttaattgcagcttttaaatcaactttagaagaggctaaaggtgcagatttattagtacatgtcgtagatagtagccatcctgaataccgtacgcagtatgacacagttaatgatttaatcaaacaattagatatgagtcatatttctcaaatagttatttttaataaaaaggacttatgtgatcatgcatcaaatygtccagcaagtgatttgcctaatgtttttgtttcwtctaaaaatgatggtgataaattacttgttaagackttatttattgatgaaatcaaaaggcaattaacttattatgatgagrcaattgcgacgaataatgcagatcgattatattttctaaaacaacatacattagtgactgaacttaaatatgatgaaattgaaaatgtttatcgtataaaaggatttraaaaataa

SEQ ID NO: 3137 - DNA, 186 bp, Staphylococcus aureus
gtggctaaaacttcaatggttgctaagcaacaaaaaaaacaaaaatatgcagttcgtgaatacactcgttgtgaacgttgtggccgtccacattctgtatatcgtaaatttaaattatgccgtatttgtttccgtgaattagcttacaaaggccaaatccctggcgttcgtaaagctagctggtaa

SEQ ID NO: 3138 - DNA, 1125 bp, Staphylococcus aureus
atggaaaaactraaattaatgacaatagttggtacaaggcctgaaatcattcgtttatcatcaacgattaaagcatgtgatcaataytttaatcagatattagtacacactggtcaaaattatgattatacattgaatcaaattttctttgatgatttggaattragacaaccggaccactacttagaggcwgttggaagtaayctyggagaaacgatggggaatattattgcgaagacrtatgaygttttattacgcgaacaaccrgatgcacttttaattcttggtgatacaaatagttgtttagcagcagtatctgctaaacgattaaarattcctgtgttycayatggaagcgggtaatagatgctttgatcagaatgtacctgaagaaatcaatcgtaaaattgttgaccatgtcagtgatgtgaatctaccttatacrgaacatagcagacgktatttattagatgaaggcttcaataaagcgaatatctttgtgacaggatcaccgatgacagaagtgatagaagcgcatcgagataaaattaatcacagtgacgttttaaataaactaggattagaaycgcaacaatacattttagtatctgcgcatagagaagagaatatcgataatgaaaagaattttaaatcattaatgaatgcgataaatgatattgccaaaaagtataaaatkcctgtgatttattcaacgcatccaagaagttggaagaaaattgaagaaagtaaatttgaatttgatccattagttaaamagttaaagccatttggtttctttgattataatgcattgcaaaaagatgcatttgttgtgctatcagatagtggaacattgtcagaagagtcgtctattttgaagttccctggtgtccttattcgaacttccacagaaagaccggaagtactagataaaggtacggttattrtaggtggtattacctataacaatctaatccaatccgttgaactagcaagagagatgcaaaacaataacgaaccgatgattgatgctattgattataaagacactaacgtttcgacaaargtagttaaaattattcaaagctataaagatattatcaatcgaaatacttggaggaaatga

SEQ ID NO: 3139 - DNA, 1239 bp, Staphylococcus aureus
atgaaagatataagtaagatagtagctgacgtcgaatcaacgttagcaccatattttaaagaaattgaagaaacwgcatatattaaycaagaaaaagtattaaatgcatttcatcatgtcaaagcaaccgaaagtgatctacaaggatcaacaggatacggrtatgatgaytttggacgtgatcatttagaagaaatatatgcgcaggcatttaaagcagaagatgcaattgttcgyccrcaaattatttcaggtacgcatgcgattactattgcattacaaagtttattaaaacatggtgatgaattaatttatataacgggwagtccatatgacactttacttgaagtcattggygtaaacggaaatggtattgaaagtttaatggagcayggygtatcrtataaagatattgcacttaaagaaggtaagatcgatattgaaagtgtgttagatgggrtttctgagcgyaccaaagtaatagcgattcaacgttcgaaaggctatgatcaaagaccttcaattcckctaratgaaattgaamaggtrattactaggttgaaaramgtgcatcctaatattttaatatttgtggataactgttatggggaatttgttgaaagacgtgaacctatagaatgtggtgccgatttaatagcaggatcattaattaaaaaccctggcggtggtttagctaagattggtggatacattgctggtagaaaagatttaattgaacgatgtggttatagattgacagcacctggtattggtaaagaagcrggtgcatcattaaatgcattgcttgaaatgtatcaaggtttctttttagcaccacaygttgtcagtcagagtcttaaaggkgcattgtttactagtttatttttagaaaaaatgaatatgaacacaacgccgaagtactacgaaaaacgaactgatttaattcaaacagttaaatttraaacgaaagaacaaatgatttcattttgtcaaagtattcaacacgcatccccaattaatgcacattttagtccagaacckagttatatgcctggttacgaagatgatgttattatggcwgctggtacgtttattcaaggttcatcgattgaattatctgcagatggacctattcgtcctccttatgaagcatatgtwcaagragsattaacatatgaacacgttaaaattgctgtgacaagagctgtkawkcagttgaaagarcaaggacttatataa

SEQ ID NO: 3140 - DNA, 492 bp, Staphylococcus aureus
atgaaaaaattcaattatagttcagtaatggaagtaccaaaaatagataaaatcgttgtgaacatgggtgtaggtgacgcagtacaaaattctaaagtattagacaatgctgttgaagaattagaattgatcactggtcaaaaaccattagtaactaaagctaaaaaatcaatcgcgactttccgtttacgtgaaggtatgccaatcggtgcgaaagtaacacttcgcggtgaaagaatgtatgaattcttagacaaattaatttcagtatcattaccacgtgtacgtgacttccaaggtgtttctaaaaaagcatttgacggacgcggtaactacactttaggtgttaaagaacaattaattttcccagaaatcgactatgataaagtaagtaaagttagaggaatggatattgttatcgtaacgactgctaacactgatgaagaagctcgtgaattgttagctaacttcggtatgccattccgtaaataa

SEQ ID NO: 3141 - DNA, 369 bp, Staphylococcus aureus
atgatatcgaatgatgcaatcagacgaaatatggctgtcttctctatgagtgtagtaagtaagttaacggatttaacgccaaggcaaatacgttactatgaaacacatgaactcatcaaacctgaaagaacagaaggtcaaaaacgtctgttctcactcaatgatttggaaagattactagaaattaaatcattattagaaaaaggatttaatatcaaagggattaaacaaatcatttatgactcacaagagcatttaacaacagatgaacaagagataagaaaaaagatgattgtagatgccacgcaaaagcctattggagaaactttgccaataaatcgtggtgatttatcccgatttattaaataa

SEQ ID NO: 3142 - DNA, 318 bp, Staphylococcus aureus
atgcatatcaaaaaaggtgacaacgttaaagttatcgcaggtaaagacaaaggtaaagaaggtaaagtaatygctactctacctaaaaaagaccgtgtcgttgtggaaggtgttaacattatgaaaaaacaccaaaaaccaactcaattaaatcctgaaggtggaatcttagaaacagaggcagcaatccatgtttctaatgtacaattattggaccctaaaacaaacgaaccaactcgtgtaggttacaaatttgttgatggtaaaaaagttcgtatcgctaaaaaatctggcgaagaaattaaatctaataattaa

SEQ ID NO: 3143 - DNA, 1341 bp, Staphylococcus aureus
atgccaaaacgtactttcactaaagamgacattcgtaaatttgcagaagaggaaaatgtaagatatttaagattacaattcactgatattttaggaacaattaaaaatgttgaagtgcctgtaagccaattagaaaaagtacttgataacgaaatgatgtttgacggttcttctatcgaaggtttcgtacgtatcgaagaatcagatatgtacttacatccagatttagatacttgggtaatcttcccatggactgctggacaaggtaaagttgcacgtttaatttgtgatgtatataaaacagatggaacaccatttgaaggggatcctcgtgcaaacttaaaacgtgtattaaaagaaatggaagatttaggcttcacagactttaacctaggrcctgaaccagaattcttcttgtttaagttggatgaaaaaggggaaccaactttagaacttaatgatgatggtggatatttcgatttagcacctacagatttaggtgaaaactgtcgtcgtgatattgttttagaattagaggatatgggcttcgatattgaagctagtcaccatgaagttgcccctggtcaacatgaaattgactttaaatatgcagatgctgttacagcatgtgataatatccaaacatttaaattggttgttaaaacaatcgcacgtaaacataatttacacgcaacatttatgcctaaaccattattyggtgtgaatggtagcggtatgcactttaacgtttcattattcaaaggtaaagaaaatgcattcttygatccraatactgaaatgggcttaacrgaaacwgcwtaycaattyacagcwggtgtrcttaaaaaygcacghggatttacwgckgtatgtaacccrttagtaaactcatayaaacgtttagtwcctggttatgaagcrccatgttatattgcatggagyggtaaaaaccgttcaccrttaatccgtgtaccatcttcaagaggattatcwactcgtatygaagtacgttcagtwgayccagctgcraacccatayatggcgttagctgcaatyttagaakctggwytagayggyattaaaaataaattaaaagttccagaaccwgttaaccaaaatatttacgaaatgaaycgtgaagaacgtgaagcagtaggcattcaagacttaccttcaacactttayacwgcattaaaagcaatgcgtgaaaatgaagttatwaaaaaagctttaggaaatcatatctataatcaatttattaattcaaaatcaattgaatgggattactayagaactcaagtmtctgaatgggaaagagatcagtacatgaagcaatattaa

SEQ ID NO: 3144 - DNA, 369 bp, Staphylococcus aureus
atgatccaacaagaaacacgcttgaaagtagcagacaactctggtgctcgtgaagttcttacaatcaaagtattaggtggatctggtcgtaaaacagcaaacatcggcgatgttatcgtatgtactgttaaaaatgcaacaccaggtggcgttgttaaaaaaggtgacgttgtcaaagctgtaatcgtacgtactaagtcaggtgttcgtcgtaatgacggttcatayatcaaatttgatgaaaatgcatgtgttatcatccgtgatgacaaaggcccacgtggtactcgtatcttcggacctgttgctcgtgaattacgtgaaggtaacttcatgaaaatcgtatcattagcaccagaagtactttaa

SEQ ID NO: 3145 - DNA, 264 bp, Staphylococcus aureus
gtgagcgaaagaaacgatcgtaaagtttatgtaggtaaagttgtttcagacaaaatggacaagactattacagtacttgttgaaacttacaaaacacacaaattatacggtaaacgagtraaatactctaaaaaatacaaaactcatgatgaaaacaattcagctaaattaggagacattgttaaaattcaagaaactcgtcctttatcagcaacaaaacgttttcgtwtagtagagattgttgaagagtcagtaattatttaa

SEQ ID NO: 3146 - DNA, 96 bp, Staphylococcus aureus
atggcgacttrtttggtctttgatgatgcaatgtttattaacaaattttcaactattatttcttacattagtcatatttttgacaatttactatta

SEQ ID NO: 3147 - DNA, 198 bp, Staphylococcus aureus
atgaattgctatgatgaaatatwcaatacaatcaaaraattgatagaaaacaaagagatawcragttatcaaattaataaagatactgggataagttacggtaatattaatgctatgcgccgtrgrgaaagaagaatagaaaatttaagcttaaagaatgcaaagatcttatatgaatatgcgaaaaaggtattrtaa

SEQ ID NO: 3148 - DNA, 210 bp, Staphylococcus aureus
atgaaagctaaggaaattagagacttaaccacttcagaaatcgaagaacaaatcaaatcttcaaaagaagagctttttaacctacgctttcagttagctacaggtcaattagaagaaactgcacgtattcgtacagtaagaaaaacgattgcacgtctaaaaactgttgctcgtgaaagagaaattgaacaaagtaaggctaatcaataa

SEQ ID NO: 3149 - DNA, 171 bp, Staphylococcus aureus
atgtcgcctaaagatacaacaagattcgagacaaaacctgatcatcaagcacagtttgactggaaagaaagcattaactttaaaacgaaagataatcaaaggattccactatatataggtgtgctactactttattattctcgttttataatcatgyatracaatgagtaa

SEQ ID NO: 3150 - DNA, 90 bp, Staphylococcus aureus
atgacatacggttcaattgtagctatactctgtgccctatttgtgattttcttcattccatatatggagaagaaagacaaaaagaagaar

SEQ ID NO: 3151 - DNA, 225 bp, Staphylococcus aureus
ttgacaaaaattatgaaccagtttaaagaaatttataatacaatagaaaaattactraatgataaatcaatatctaattatagaattaatcaagacactgrtgtttcttatggtggtataagtgaattaagaagcgggaaaagaaaagtgaataatttaactttagaaacagcggaaaaactctataattaccaaaaacaattagaaataatgattkaakattaa

SEQ ID NO: 3152 - DNA, 435 bp, Staphylococcus aureus
atgttactaccaaaacgtgtaaaatatcgtcgtcaacatcgtcctaaaacaactggtcgttctaaaggcggtaactacgtaacatttggtgagtttggtttacaagctacaacaacgtcttggatcacatctcgtcaaatcgaatctgctcgtatagcaatgacacgttacatgaaacgtggcgggaaagtttggattaaaatcttcccacatacaccatatactaaaaaacctttagaagtacgtatgggtgctggtaaaggtgcggttgaaggctggatcgcagttgttaaaccaggtagaattttattcgaagttgctggcgtttctgaagaagttgcgcgtgaagcactacgtttagcaagtcacaaacttccagtaaaaactaagtttgtaaaacgtgaggaattgggtggtgaaacaaatgaaagctaa

SEQ ID NO: 3153 - DNA, 654 bp, Staphylococcus aureus
gtgggtcaaaaaattaatccaatcggacttcgtgttggtattatccgtgattgggaagctaaatggtatgctgaaaaagacttcgcttcacttttacacgaagatttaaaaatccgtaaatttattgataatgaattaaaagaagcatcagtttctcacgtagagattgaacgtgctgcaaaycgtatcaacattgcaattcatactggtaaacctggtatggtaattggtaaaggcggttcagaaatcgaaaaattacgcaacaaattaaatgcgttaactgataaaaaagtacacatcaacgtaattgaaatcaaaaaagttgatcttgacgctcgtttagtagctgaaaacatcgcacgtcaattagaaaaccgtgcttcattccgtcgtgtacaaaaacaagcaatcactagagctatgaaacttggtgcwaaaggtatcaaaactcaartatctggtcgtttaggcggagctgacatcgctcgtgctgaacaatattcagaaggaactgttccacttcatacgttacgtgctgacatcgattatgcacacgctgaagctgacactacttacggtaaattaggcgttaaagtatggatytatcgtggagaagttcttcctactaagaacactagtggaggaggaaaataa

SEQ ID NO: 3154 - DNA, 252 bp, Staphylococcus aureus
atgagaacaattattttaagtctatttataattatgaacatcgttgcaatcattatgacattgagtcaacctctcaccgtgaattactttagtttacgggttatacttatctttttcacatttatattatcaatctttttcattttaattaagtcatcmcgattaaataatatattaacgattctttccattgygcttgycattattcatatgggcattctcgctcatagcacttacgtatatttatactaa

SEQ ID NO: 3155 - DNA, 354 bp, Staphylococcus aureus
atggaagcaaaagcggttgctagaacaataagaatcgcacctcgtaaagtaagactagttcttgacttaatcagaggtaaaaatgctgctgaagctattgcaattttaaaattaacaaacaaagcttcatcaccagtaattgaaaaagtattaatgtccgctttagctaatgctgaacataactatgacatgaacacagatgaattagtagttaaagaagcatatgctaacgaaggaccaacattaaaacgtttccgtccacgtgcgcaaggtcgtgcaagtgcgattaacaaacgtacaagccacattacaatcgtcgtaagtgacggtaaagaagaagctaaagaagcttaa

SEQ ID NO: 3156 - DNA, 186 bp, Staphylococcus aureus
atgtcagaatacaagaaaaarataattgaattaattgaaagtaatttaacaggatatgaaatttctaaaaaaactggagtttctcaataygtactttcacaattaagacagggcaaacgcgaagtagataatctaaccctgaatacaacagaaaaattatatgaatatgccaataaagttttgtaa

SEQ ID NO: 3157 - DNA, 279 bp, Staphylococcus aureus
atggctcgtagtattaaaaaaggacctttcgtcgatgagcatttaatgaaaaaagttgaagctcaagaaggaagcgaaaagaaacaagtaatcaaaacatggtcacgtcgttctacaattttccctaatttcatcggacatacttttgcagtatacgacggacgtaaacacgtacctgtatatgtaactgaagatatggtaggtcataaattaggtgagtttgctcctactcgtacattcaaaggacacgttgcagacgacaagaaaacaagaagataa

SEQ ID NO: 3158 - DNA, 102 bp, Staphylococcus aureus
atgttcmaagtgaattattcgattttaagttattatccagaatataatatcgcagtaagttggcaacgtttaagagaaggaaaaacmataaaaarcaagatt

SEQ ID NO: 3159 - DNA, 834 bp, Staphylococcus aureus
atggctattaaaaagtataagccaataacaaatggtcgtcgtaatatgacttcgttagatttcgcagaaatcacgaaaactacacctgaaaagtcattattaaaaccgctaccgaaaaaagcgggacgtaacaaccaaggtaaattgactgtaagacaccatggtggtggacacaaacgtcaataccgtgttatcgatttyaaacgtaacaaagatggtatcaatgcaaaagttgattctattcaatatgatccaaaccgctcagcaaacatcgctttagttgtatatgcagacggtgaaaaacgatatatcattgctcctaaaggattagaagtaggtcaaatcgttgaaagtggtgctgaagctgacayyaaagttggtaacgcattaccattacaaaacattccagttggtacagtagtacacaacatcgagcttaaacctggtaaaggtggacaaatcgctcgttcagctggtgcaagtgctcaagtacttggtaaagaaggtaaatacgtattaatcagattaagatctggtgaagttcgtatgatcttatctacttgccgtgctacaatcggtcaagttggtaacctacaacacgaattagttaacgttggtaaagccggacgttcaagatggaaaggtatycgtccaacagttcgtggttctgtaatgaaccctaacgatcacccacacggtggtggtgaaggtcgtgctcctatcggtagaccatctccaatgtcaccatggggtaaacctacgcttggtaagaaaactcgtcgtggtaaaaaatcatcagacaaacttatcgttcgtggacgtaagaaaaaataa

SEQ ID NO: 3160 - DNA, 317 bp, Staphylococcus aureus
aaagatcccccattcctactttatcgacattctttcattacttaccactttagatgttttttcgttggggataaaacttccctttagacaattttatccaaagacaatacaacagtgcaactttattaaagtcactgtcctttatcgcagcctttactttttagtaaagacagtggcttctcttatcaagtttcaaaacatattattttgaagaaaacgtccatctgaagtgtcaagtgcaaaattacatataaaggtttattctaaaatgaaaagatgatacaatcatattcagttacataaggaggtttcaatta

SEQ ID NO: 3161 - DNA, 317 bp, Staphylococcus aureus
taattgaaacctccttatgtaactgaatatgattgtatcatcttttcattttagaataaacctttatatgtaattttgcacttgacacttcagatggacgttttcttcaaaataatatgttttgaaacttgataagagaagccactgtctttactaaaaagtaaaggctgcgataaaggacagtgactttaataaagttgcactgttgtattgtctttggataaaattgtctaaagggaagttttatccccaacgaaaaaacatctaaagtggtaagtaatgaaagaatgtcgataaagtaggaatgggggatcttt

SEQ ID NO: 3162 - DNA, 162 bp, Staphylococcus aureus
catatgaatgtaaattatacattcaaaactagatagtaagtaaaagtgattttgcttcgcaaaacatttattttgattaagtcttcgatcgattagtattcgtcagctccacatgtcaccatgcttccacctcgaacctattaacctcatcatctttgaggg

SEQ ID NO: 3163 - DNA, 162 bp, Staphylococcus aureus
ccctcaaagatgatgaggttaataggttcgaggtggaagcatggtgacatgtggagctgacgaatactaatcgatcgaagacttaatcaaaataaatgttttgcgaagcaaaatcacttttacttactatctagttttgaatgtataatttacattcatatg

SEQ ID NO: 3164 - DNA, 470 bp, Staphylococcus aureus
tatgtttccaccatttttataagtcaaacgttaacatgaagttacgttcttttataaaaagatttaaacgcgttattaatcttgtgagtgttctttcgaacactagcgattatttcttatgaattcaagcttatttaaaactctttattcactcggttttgcttggtaaaatctatattttacttacttatctagttttcaatgtacaatttctttttagtcaagcgctcgcatactgctttattttcaaaaaatcaaatgctcatttacaaaagtaaactccgctttaatttttcttaatgcattgtctgacaatcgctttctttaaaaagaatagattgtcaagcgctcgcataagcaatatcactttaaccaaaaaatatttgaatgttaaataaacattcaaaactgaatacaatatgtcacgttattccgcatcttctgaagaagatgttccgaatatatcctta

SEQ ID NO: 3165 - DNA, 470 bp, Staphylococcus aureus
taaggatatattcggaacatcttcttcagaagatgcggaataacgtgacatattgtattcagttttgaatgtttatttaacattcaaatattttttggttaaagtgatattgcttatgcgagcgcttgacaatctattctttttaaagaaagcgattgtcagacaatgcattaagaaaaattaaagcggagtttacttttgtaaatgagcatttgattttttgaaaataaagcagtatgcgagcgcttgactaaaaagaaattgtacattgaaaactagataagtaagtaaaatatagattttaccaagcaaaaccgagtgaataaagagttttaaataagcttgaattcataagaaataatcgctagtgttcgaaagaacactcacaagattaataacgcgtttaaatctttttataaaagaacgtaacttcatgttaacgtttgacttataaaaatggtggaaacata

SEQ ID NO: 3166 - DNA, 150 bp, Staphylococcus aureus
gatttcacctcgttgattatgttcatataaagtttatattgatactcaatttacttaccctagattggacatatacttaaattactgttcaataaagctgaccgttagcgtttaagtacatcctttcacaatttgtctacagattaataa

SEQ ID NO: 3167 - DNA, 150 bp, Staphylococcus aureus
ttattaatctgtagacaaattgtgaaaggatgtacttaaacgctaacggtcagctttattgaacagtaatttaagtatatgtccaatctagggtaagtaaattgagtatcaatataaactttatatgaacataatcaacgaggtgaaatc

(The sequence listing continues in the following parts.)
